(19) United States
(12) Patent Application Publication
(10) Pub. No.: US 2002/0120116 A1
(43) Pub. Date: Aug. 29, 2002

(54) ENTEROCOCCUS FAECALIS POLYNUCLEOTIDES AND POLYPEPTIDES

(76) Inventors: CHARLES A. KUNSCH, ATLANTA, GA (US); PATRICK J. DILLON, CARLSBAD, CA (US); STEVEN BARASH, ROCKVILLE, MD (US)

Correspondence Address: HUMAN GENOME SCIENCES INC, 9410 KEY WEST AVENUE, ROCKVILLE, MD, 20850

(21) Appl. No.: 09/070,927

(22) Filed: May 4, 1998

(51) Int. Cl. C07K 16/00

(52) U.S. Cl. 536/23.2; 435/69.1; 435/70.1; 435/71.1; 435/252.3; 435/320.1; 530/350; 530/387.9; 800/13

(57) ABSTRACT

The present invention provides polynucleotide sequences of the genome of Enterococcus faecalis, polypeptide sequences encoded by the polynucleotide sequences, corresponding polynucleotides and polypeptides, vectors and hosts comprising the polynucleotides, and assays and other uses thereof. The present invention further provides polynucleotide and polypeptide sequence information stored on computer readable media, and computer-based systems and methods which facilitate its use.

[0001] This application claims benefit of 35 U.S.C. section 119(e) based on copending U.S. Provisional Application Serial No. 60/046,655, filed May 16, 1997; 60/044,031, filed May 6, 1997; and 60/066,099, filed Nov. 14, 1997. Provisional Application Serial No. 60/066,099, filed Nov. 14, 1997 is herein incorporated by reference in its entirety.

### FIELD OF THE INVENTION

[0002] The present invention relates to the field of molecular biology. In particular, it relates to, among other things, nucleotide sequences of Enterococcus faecalis, contigs, ORFs, fragments, probes, primers and related polynucleotides thereof, peptides and polypeptides encoded by the sequences, and uses of the polynucleotides and sequences thereof, such as in fermentation, polypeptide production, assays and pharmaceutical development, among others.

### BACKGROUND OF THE INVENTION

[0003] Enterococci have been recognized as being pathogenic for humans since the turn of the century when they were first described by Thiercelin in 1988 as microscopic organisms. The genus Enterococcus includes the species Enterococcus faecalis or E. faecalis which is the most common pathogen in the group, accounting for 80-90 percent of all enterococcal infections. See Lewis et al. (1990) Eur J. Clin Microbiol Infect Dis. 9:111-117.

[0004] The incidence of enterococcal infections has increased in recent years and enterococci are now the second most frequently reported nosocomial pathogens. Enterococcal infection is of particular concern because of its resistance to antibiotics. Recent attention has focused on enterococci not only because of their increasing role in nosocomial infections, but also because of their remarkable and increasing resistance to antimicrobial agents. These factors are mutually reinforcing since resistance allows enterococci to survive in an environment in which antimicrobial agents are heavily used; the hospital setting provides the antibiotics which eliminate or suppress susceptible bacteria, thereby providing a selective advantage for resistant organisms, and the hospital also provides the potential for dissemination of resistant enterococci via the usual routes of hand and environmental contamination.

[0005] Antimicrobial resistance can be divided into two general types, inherent or intrinsic property and that which is acquired. The genes for intrinsic resistance, like other other species characteristics, appear to reside on the chromosome. Acquired resistance results from either a mutation in the existing DNA or acquisition of new DNA. The various inherent traits expressed by enterococci include resistance to semisynthetic penicillinase-resistant penicillins, cephalosporins, low levels of aminoglycosides, and low levels of clindamycin. Examples of acquired resistance include resistance to chloramphenicol, erythromycin, high levels of clindamycin, tetracycline, high levels of aminoglycosides, penicillin by means of penicillinase, fluoroquinolones, and vancomycin. Resistance to high levels of penicillin without penicillinase and resistance to fluoroquinolones are not known to be plasmid or transposon mediated and presumably are due to mutation(s).

[0006] Although the main reservoir for enterococci in humans is the gastrointestinal tract, the bacteria can also reside in the gallbladder, urethra and vagina.

[0007] E. faecalis has emerged as an important pathogen in endocarditis, bacteremia, urinary tract infections (UTIs), intraabdominal infections, soft tissue infections, and neonatal sepsis (Lewis 1990, supra). In the 1970s and 1980s enterococci became firmly established as major nosocomial pathogens. They are now the fourth leading cause of hospital-acquired infection and the third leading cause of bacteremia in the United States. Fatality ratios for enterococcal bactermia range from 12% to 68%, with death due to enterococcal sepsis in 4 to 50% of these cases. See Emori, T. G. (1993) Clin. Microbiol. Rev. 6:428-442.

[0008] The ability of enterococci to colonize the gastrointestinal tract, plus the many intrinsic and acquired resistance traits, means that these organisms, which usually seem to have relatively low intrinsic virulence, are given an excellent opportunity to become secondary invaders. Since nosocomial isolates of enterococci have displayed resistance to essentially every useful antimicrobial agent, it will likely become increasingly difficult to successfully treat and control enterococcal infections. Particularly when the various resistance genes come together in a single strain, an event almost certain to occur at some time in the future.

[0009] The etiology of diseases mediated or exacerbated by Enterococcus faecalis, involves the programmed expression of E. faecalis genes, and that characterizing these genes and their patterns of expression would dramatically add to our understanding of the organism and its host interactions. Knowledge of the E. faecalis gene and genomic organization would improve our understanding of disease etiology and lead to improved and new ways of preventing, treating and diagnosing diseases. Thus, there is a need to characterize the genome of E. faecalis and for polynucleotides of this organism.

### SUMMARY OF THE INVENTION

[0010] The present invention is based on the sequencing of fragments of the Enterococcus faecalis genome. The primary nucleotide sequences which were generated are provided in SEQ ID NOS: 1-982.

[0011] The present invention provides the nucleotide sequence of hundreds of contigs of the Enterococcus faecalis genome, which are listed in tables below and set out in the Sequence Listing submitted herewith, and representative fragments thereof, in a form which can be readily used, analyzed, and interpreted by a skilled artisan. In one embodiment, the present invention is provided as contiguous strings of primary sequence information corresponding to the nucleotide sequences depicted in SEQ ID NOS:1-982.

[0012] The present invention further provides nucleotide sequences which are at least 95%, 96%, 97%, 98%, and 99%, identical to the nucleotide sequences of SEQ ID NOS:1-982.

[0013] The nucleotide sequence of SEQ ID NOS:1-982, a representative fragment thereof, or a nucleotide sequence which is at least 95% identical to the nucleotide sequence of SEQ ID NOS:1-982 may be provided in a variety of mediums to facilitate its use. In one application of this embodiment, the sequences of the present invention are recorded on computer readable media. Such media includes, but is not limited to: magnetic storage media, such as floppy discs, hard disc storage medium, and magnetic tape; optical storage media such as CD-ROM; electrical storage media such as RAM and ROM; and hybrids of these categories such as magnetic/optical storage media.

[0014] The present invention further provides systems, particularly computer-based systems which contain the sequence information herein described stored in a data storage means. Such systems are designed to identify commercially important fragments of the Enterococcus faecalis genome.

[0015] Another embodiment of the present invention is directed to fragments of the Enterococcus faecalis genome having particular structural or functional attributes. Such fragments of the Enterococcus faecalis genome of the present invention include, but are not limited to, fragments which encode peptides, hereinafter referred to as open reading frames or ORFs, fragments which modulate the expression of an operably linked ORF, hereinafter referred to as expression modulating fragments or EMFs, and fragments which can be used to diagnose the presence of Enterococcus faecalis in a sample, hereinafter referred to as diagnostic fragments or DFs.

[0016] Each of the ORFs in fragments of the Enterococcus faecalis genome disclosed in Tables 1-3, and the EMFs found 5′ prime of the initiation codon, can be used in numerous ways as polynucleotide reagents. For instance, the sequences can be used as diagnostic probes or amplification primers for detecting or determining the presence of a specific microbe in a sample, to selectively control gene expression in a host and in the production of polypeptides, such as polypeptides encoded by ORFs of the present invention, particular those polypeptides that have a pharmacological activity.

[0017] The present invention further includes recombinant constructs comprising one or more fragments of the Enterococcus faecalis genome of the present invention. The recombinant constructs of the present invention comprise vectors, such as a plasmid or viral vector, into which a fragment of the Enterococcus faecalis has been inserted.

[0018] The present invention further provides host cells containing any of the isolated fragments of the Enterococcus faecalis genome of the present invention. The host cells can be a higher eukaryotic host cell, such as a mammalian cell, a lower eukaryotic cell, such as a yeast cell, or a procaryotic cell such as a bacterial cell.

[0019] The present invention is further directed to isolated polypeptides and proteins encoded by ORFs of the present invention. A variety of methods, well known to those of skill in the art, routinely may be utilized to obtain any of the polypeptides and proteins of the present invention. For instance, polypeptides and proteins of the present invention having relatively short, simple amino acid sequences readily can be synthesized using commercially available automated peptide synthesizers. Polypeptides and proteins of the present invention also may be purified from bacterial cells which naturally produce the protein. Yet another alternative is to purify polypeptide and proteins of the present invention from cells which have been altered to express them.

[0020] The invention further provides methods of obtaining homologs of the fragments of the Enterococcus faecalis genome of the present invention and homologs of the proteins encoded by the ORFs of the present invention. Specifically, by using the nucleotide and amino acid sequences disclosed herein as a probe or as primers, and techniques such as PCR cloning and colony/plaque hybridization, one skilled in the art can obtain homologs.

[0021] The invention further provides antibodies which selectively bind polypeptides and proteins of the present invention. Such antibodies include both monoclonal and polyclonal antibodies.

[0022] The invention further provides hybridomas which produce the above-described antibodies. A hybridoma is an immortalized cell line which is capable of secreting a specific monoclonal antibody.

[0023] The present invention further provides methods of identifying test samples derived from cells which express one of the ORFs of the present invention, or a homolog thereof. Such methods comprise incubating a test sample with one or more of the antibodies of the present invention, or one or more of the DFs of the present invention, under conditions which allow a skilled artisan to determine if the sample contains the ORF or product produced therefrom.

[0024] In another embodiment of the present invention, kits are provided which contain the necessary reagents to carry out the above-described assays.

[0025] Specifically, the invention provides a compartmentalized kit to receive, in close confinement, one or more containers which comprises: (a) a first container comprising one of the antibodies, or one of the DFs of the present invention; and (b) one or more other containers comprising one or more of the following: wash reagents, reagents capable of detecting presence of bound antibodies or hybridized DFs.

[0026] Using the isolated proteins of the present invention, the present invention further provides methods of obtaining and identifying agents capable of binding to a polypeptide or protein encoded by one of the ORFs of the present invention. Specifically, such agents include, as further described below, antibodies, peptides, carbohydrates, pharmaceutical agents and the like. Such methods comprise steps of: (a)contacting an agent with an isolated protein encoded by one of the ORFs of the present invention; and (b)determining whether the agent binds to said protein.

[0027] The present genomic sequences of Enterococcus faecalis will be of great value to all laboratories working with this organism and for a variety of commercial purposes. Many fragments of the Enterococcus faecalis genome will be immediately identified by similarity searches against GenBank or protein databases and will be of immediate value to Enterococcus faecalis researchers and for immediate commercial value for the production of proteins or to control gene expression.

[0028] The methodology and technology for elucidating extensive genomic sequences of bacterial and other genomes has and will greatly enhance the ability to analyze and understand chromosomal organization. In particular, sequenced contigs and genomes will provide the models for developing tools for the analysis of chromosome structure and function, including the ability to identify genes within large segments of genomic DNA, the structure, position, and spacing of regulatory elements, the identification of genes with potential industrial applications, and the ability to do comparative genomic and molecular phylogeny.

### DESCRIPTION OF THE FIGURES

[0029] FIG. 1 is a block diagram of a computer system (102) that can be used to implement computer-based systems of the present invention.

[0030] FIG. 2 is a schematic diagram depicting the data flow and computer programs used to collect, assemble, edit and annotate the contigs of the Enterococcus faecalis genome of the present invention. Both Macintosh and Unix platforms are used to handle the AB 373 and 377 sequence data files, largely as described in Kerlavage et al., Proceedings of the Twenty-Sixth Annual Hawaii International Conference on System Sciences, 585, IEEE Computer Society Press, Washington D.C. (1993). Factura (AB) is a Macintosh program designed for automatic vector sequence removal and end-trimming of sequence files. The program Sequis runs on a Macintosh platform and parses the feature data extracted from the sequence files by Factura to the Unix based Enterococcus faecalis relational database. Assembly of contigs (and whole genome sequences) is accomplished by retrieving a specific set of sequence files and their associated features using Extrseq, a Unix utility for retrieving sequences from an SQL database. The resulting sequence file is processed by seq_filter to trim portions of the sequences with more than 1% ambiguous nucleotides. The sequence files were assembled using TIGR Assembler, an assembly engine designed at The Institute for Genomic Research (TIGR) for rapid and accurate assembly of thousands of sequence fragments. The collection of contigs generated by the assembly step is loaded into the database with the lassie program. Identification of open reading frames (ORFs) is accomplished by processing contigs with GeneMark, described in Borodovsky, M. and McIninch, J. D. (1993) Comput. Chem., 17:123 133. The ORFs are searched against E. faecalis sequences from GenBank and against all protein sequences using the BLASTN and BLASTP programs, described in Altschul et al., J. Mol. Biol. 215: 403-410 (1990)). Results of the ORF determination and similarity searching steps were loaded into the database. As described below, some results of the determination and the searches are set out in Tables 1-3.

### DETAILED DESCRIPTION OF ILLUSTRATIVE EMBODIMENTS

[0031] The present invention is based on the sequencing of fragments of the Enterococcus faecalis genome and analysis of the sequences. The primary nucleotide sequences generated by sequencing the fragments are provided in SEQ ID NOS: 1-982. (As used herein, the “primary sequence” refers to the nucleotide sequence represented by the IUPAC nomenclature system.)

[0032] In addition to the aforementioned Enterococcus faecalis polynucleotide and polynucleotide sequences, the present invention provides the nucleotide sequences of SEQ ID NOS: 1-982, or representative fragments thereof, in a form which can be readily used, analyzed, and interpreted by a skilled artisan.

[0033] As used herein, a “representative fragment of the nucleotide sequence depicted in SEQ ID NOS:1-982” refers to any portion of the SEQ ID NOS: 1-982 which is not presently represented within a publicly available database. Preferred representative fragments of the present invention are Enterococcus faecalis open reading frames (ORFs), expression modulating fragment (EMFs) and fragments which can be used to diagnose the presence of Enterococcus faecalis in a sample (DFs). A non-limiting identification of preferred representative fragments is provided in Tables 1-3. As discussed in detail below, the information provided in SEQ ID NOS:1-982 and in Tables 1-3 together with routine cloning, synthesis, sequencing and assay methods will enable those skilled in the art to clone and sequence all “representative fragments” of interest, including open reading frames encoding a large variety of Enterococcus faecalis proteins.

[0034] The present invention is further directed to nucleic acid molecules encoding portions or fragments of the nucleotide sequences described herein. Fragments include portions of the nucleotide sequences of Table 1-3 and SEQ ID NOS:1-982, at least 10 contiguous nucleotides in length selected from any two integers, one of which representing a 5′ nucleotide position and a second of which representing a 3′ nucleotide position, where the first nucleotide for each nucleotide sequence in SEQ ID NOS:1-982 is position 1. That is, every combination of a 5′ and 3′ nucleotide position that a fragment at least 10 contiguous nucleotides in length could occupy is included in the invention. At least means a fragment may be 10 contiguous nucleotide bases in length or any integer between 10 and the length of an entire nucleotide sequence of SEQ ID NOS:1-982 minus 1. Therefore, included in the invention are contiguous fragments specified by any 5′ and 3′ nucleotide base positions of a nucleotide sequences of SEQ ID NOS:1-982 wherein the contiguous fragment is any integer between 10 and the length of an entire nucleotide sequence minus 1.

[0035] Further, the invention includes polynucleotides comprising fragments specified by size, in nucleotides, rather than by nucleotide positions. The invention includes any fragment size, in contiguous nucleotides, selected from integers between 10 and the length of an entire nucleotide sequence minus 1. Preferred sizes of contiguous nucleotide fragments include 20 nucleotides, 30 nucleotides, 40 nucleotides, 50 nucleotides. Other preferred sizes of contiguous nucleotide fragments, which may be useful as diagnostic probes and primers, include fragments 50-300 nucleotides in length which include, as discussed above, fragment sizes representing each integer between 50-300. Larger fragments are also useful according to the present invention corresponding to most, if not all, of the nucleotide sequences shown in SEQ ID NOS:1-982. The preferred sizes are, of course, meant to exemplify not limit the present invention as all size fragments, representing any integer between 10 and the length of an entire nucleotide sequence minus 1, of each SEQ ID NO:, are included in the invention.

[0036] The present invention also provides for the exclusion of any fragment, specified by 5′ and 3′ base positions or by size in nucleotide bases as described above for any nucleotide sequence of SEQ ID NOS:1-982. Any number of fragments of nucleotide sequences in SEQ ID NOS:1-982, specified by 5′ and 3′ base positions or by size in nucleotides, as described above, may be excluded from the present invention.

[0037] While the presently disclosed sequences of SEQ ID NOS:1-982 are highly accurate, sequencing techniques are not perfect and, in relatively rare instances, further investigation of a fragment or sequence of the invention may reveal a nucleotide sequence error present in a nucleotide sequence disclosed in SEQ ID NOS:1-982. However, once the present invention is made available (i.e., once the information in SEQ ID NOS:1-982 and Tables 1-3 has been made available), resolving a rare sequencing error in SEQ ID NOS: 1-982 will be well within the skill of the art. The present disclosure makes available sufficient sequence information to allow any of the described contigs or portions thereof to be obtained readily by straightforward application of routine techniques. Further sequencing of such polynucleotides may proceed in like manner using manual and automated sequencing methods which are employed ubiquitous in the art. Nucleotide sequence editing software is publicly available. For example, Applied Biosystem's (AB) AutoAssembler can be used as an aid during visual inspection of nucleotide sequences. By employing such routine techniques potential errors readily may be identified and the correct sequence then may be ascertained by targeting further sequencing effort, also of a routine nature, to the region containing the potential error.

[0038] Even if all of the very rare sequencing errors in SEQ ID NOS: 1-982 were corrected, the resulting nucleotide sequences would still be at least 95% identical, nearly all would be at least 99% identical, and the great majority would be at least 99.9% identical to the nucleotide sequences of SEQ ID NOS:1-982.

[0039] As discussed elsewhere herein, polynucleotides of the present invention readily may be obtained by routine application of well known and standard procedures for cloning and sequencing DNA. Detailed methods for obtaining libraries and for sequencing are provided below, for instance. A wide variety of Enterococcus faecalis strains that can be used to prepare E. faecalis genomic DNA for cloning and for obtaining polynucleotides of the present invention are available to the public from recognized depository institutions, such as the American Type Culture Collection (ATCC). While the present invention is enabled by the sequences and other information herein disclosed, the E. faecalis strain that provided the DNA of the present Sequence Listing, Strain V586, kindly provided by Dr. Michael Gilmore, University of Oklahoma, has been deposited in the ATCC, as a convenience to those of skill in the art. The E. faecalis strain V586 was deposited May 2, 1997 at the ATCC, 10801 University Blvd. Manassas, Va. 20110-2209, and given accession number 55969. The provision of the deposits is not a waiver of any rights of the inventors or their assignees in the present subject matter.

[0040] The nucleotide sequences of the genomes from different strains of Enterococcus faecalis differ somewhat. However, the nucleotide sequences of the genomes of all Enterococcus faecalis strains will be at least 95% identical, in corresponding part, to the nucleotide sequences provided in SEQ ID NOS: 1-982. Nearly all will be at least 99% identical and the great majority will be 99.9% identical.

[0041] The present application is further directed to nucleic acid molecules at least 90%, 95%, 96%, 97%, 98% or 99% identical to a nucleic acid sequence shown in SEQ ID NOS: 1-982. The above nucleic acid sequences are included irrespective of whether they encode a polypeptide having E. faecalis activity. This is because even where a particular nucleic acid molecule does not encode a polypeptide having E. faecalis activity, one of skill in the art would still know how to use the nucleic acid molecule, for instance, as a hybridization probe. Uses of the nucleic acid molecules of the present invention that do not encode a polypeptide having E. faecalis activity include, inter alia, isolating an E. faecalis gene or allelic variants thereof from a DNA library, and detecting E. faecalis mRNA expression samples, environmental samples, suspected of containing E. faecalis by Northern Blot analysis.

[0042] Preferred, are nucleic acid molecules having sequences at least 90%, 95%, 96%, 97%, 98% or 99% identical to the nucleic acid sequence shown in SEQ ID NOS: 1-982, which do, in fact, encode a polypeptide having E. faecalis protein activity By “a polypeptide having E. faecalis activity” is intended polypeptides exhibiting activity similar, but not necessarily identical, to an activity of the E. faecalis protein of the invention, as measured in a particular biological assay suitable for measuring activity of the specified protein.

[0043] Due to the degeneracy of the genetic code, one of ordinary skill in the art will immediately recognize that a large number of the nucleic acid molecules having a sequence at least 90%, 95%, 96%, 97%, 98%, or 99% identical to the nucleic acid sequences shown in SEQ ID NOS: 1-982 will encode a polypeptide having E. faecalis protein activity. In fact, since degenerate variants of these nucleotide sequences all encode the same polypeptide, this will be clear to the skilled artisan even without performing the above described comparison assay. It will be further recognized in the art that, for such nucleic acid molecules that are not degenerate variants, a reasonable number will also encode a polypeptide having E. faecalis protein activity. This is because the skilled artisan is fully aware of amino acid substitutions that are either less likely or not likely to significantly effect protein function (e.g., replacing one aliphatic amino acid with a second aliphatic amino acid), as further described below.

[0044] The biological activity or function of the polypeptides of the present invention are expected to be similar or identical to polypeptides from other bacteria that share a high degree of structural identity/similarity. Tables 1 and 2 lists accession numbers and descriptions for the closest matching sequences of polypeptides available through Genbank. It is therefore expected that the biological activity or function of the polypeptides of the present invention will be similar or identical to those polypeptides from other bacterial genuses, species, or strains listed in Tables 1 and 2.

[0045] By a polynucleotide having a nucleotide sequence at least, for example, 95% “identical” to a reference nucleotide sequence of the present invention, it is intended that the nucleotide sequence of the polynucleotide is identical to the reference sequence except that the polynucleotide sequence may include up to five point mutations per each 100 nucleotides of the reference nucleotide sequence encoding the E. faecalis polypeptide. In other words, to obtain a polynucleotide having a nucleotide sequence at least 95% identical to a reference nucleotide sequence, up to 5% of the nucleotides in the reference sequence may be deleted, inserted, or substituted with another nucleotide. The query sequence may be an entire sequence shown in SEQ ID NOS: 1-982, the ORF (open reading frame), or any fragment specified as described herein.

[0046] As a practical matter, whether any particular nucleic acid molecule or polypeptide is at least 90%, 95%, 96%, 97%, 98% or 99% identical to a nucleotide sequence of the presence invention can be determined conventionally using known computer programs. A preferred method for determining the best overall match between a query sequence (a sequence of the present invention) and a subject sequence, also referred to as a global sequence alignment, can be determined using the FASTDB computer program based on the algorithm of Brutlag et al. See Brutlag et al. (1990) Comp. App. Biosci. 6:237-245. In a sequence alignment the query and subject sequences are both DNA sequences. An RNA sequence can be compared by first converting U's to T's. The result of said global sequence alignment is in percent identity. Preferred parameters used in a FASTDB alignment of DNA sequences to calculate percent identity arc: Matrix=Unitary, k-tuple=4, Mismatch Penalty=1, Joining Penalty=30, Randomization Group Length=0, Cutoff Score=1, Gap Penalty=5, Gap Size Penalty 0.05, Window Size=500 or the length of the subject nucleotide sequence, whichever is shorter.

[0047] If the subject sequence is shorter than the query sequence because of 5′ or 3′ deletions, not because of internal deletions, a manual correction must be made to the results. This is because the FASTDB program does not account for 5′ and 3′ truncations of the subject sequence when calculating percent identity. For subject sequences truncated at the 5′ or 3′ ends, relative to the query sequence, the percent identity is corrected by calculating the number of bases of the query sequence that are 5′ and 3′ of the subject sequence, which are not matched/aligned, as a percent of the total bases of the query sequence. Whether a nucleotide is matched/aligned is determined by results of the FASTDB sequence alignment. This percentage is then subtracted from the percent identity, calculated by the above FASTDB program using the specified parameters, to arrive at a final percent identity score. This corrected score is what is used for the purposes of the present invention. Only nucleotides outside the 5′ and 3′ nucleotides of the subject sequence, as displayed by the FASTDB alignment, which are not matched/aligned with the query sequence, are calculated for the purposes of manually adjusting the percent identity score.

[0048] For example, a 90 nucleotide subject sequence is aligned to a 100 nucleotide query sequence to determine percent identity. The deletions occur at the 5′ end of the subject sequence and therefore, the FASTDB alignment does not show a matched/alignment of the first 10 nucleotides at 5′ end. The 10 unpaired nucleotides represent 10% of the sequence (number of nucleotides at the 5′ and 3′ ends not matched/total number of nucleotides in the query sequence) so 10% is subtracted from the percent identity score calculated by the FASTDB program. If the remaining 90 nucleotides were perfectly matched the final percent identity would be 90%. In another example, a 90 nucleotide subject sequence is compared with a 100 nucleotide query sequence. This time the deletions are internal deletions so that there are no nucleotides on the 5′ or 3′ of the subject sequence which are not matched/aligned with the query. In this case the percent identity calculated by FASTDB is not manually corrected. Once again, only nucleotides 5′ and 3′ of the subject sequence which are not matched/aligned with the query sequence are manually corrected for. No other manual corrections are to made for the purposes of the present invention.

[0049] Computer Related Embodiments

[0050] The nucleotide sequences provided in SEQ ID) NOS: 1-982, a representative fragment thereof, or a nucleotide sequence at least 95%, preferably at least 99% and most preferably at least 99.9% identical to a polynucleotide sequence of SEQ ID NOS:1-982 may be “provided” in a variety of mediums to facilitate use thereof. As used herein, provided refers to a manufacture, other than an isolated nucleic acid molecule, which contains a nucleotide sequence of the present invention; i.e., a nucleotide sequence provided in SEQ ID NOS:1-982, a representative fragment thereof, or a nucleotide sequence at least 95%, preferably at least 99% and most preferably at least 99.9% identical to a polynucleotide of SEQ ID NOS:1-982. Such a manufacture provides a large portion of the Enterococcus faecalis genome and parts thereof (e.g., a Enterococcus faecalis open reading frame (ORF)) in a form which allows a skilled artisan to examine the manufacture using means not directly applicable to examining the Enterococcus faecalis genome or a subset thereof as it exists in nature or in purified form.

[0051] In one application of this embodiment, a nucleotide sequence of the present invention can be recorded on computer readable media. As used herein, “computer readable media” refers to any medium which can be read and accessed directly by a computer. Such media include, but are not limited to: magnetic storage media, such as floppy discs, hard disc storage medium, and magnetic tape; optical storage media such as CD-ROM; electrical storage media such as RAM and ROM; and hybrids of these categories, such as magnetic/optical storage media. A skilled artisan can readily appreciate how any of the presently known computer readable mediums can be used to create a manufacture comprising computer readable medium having recorded thereon a nucleotide sequence of the present invention. Likewise, it will be clear to those of skill how additional computer readable media that may be developed also can be used to create analogous manufactures having recorded thereon a nucleotide sequence of the present invention.

[0052] As used herein, “recorded” refers to a process for storing information on computer readable medium. A skilled artisan can readily adopt any of the presently know methods for recording information on computer readable medium to generate manufactures comprising the nucleotide sequence information of the present invention. A variety of data storage structures are available to a skilled artisan for creating a computer readable medium having recorded thereon a nucleotide sequence of the present invention. The choice of the data storage structure will generally be based on the means chosen to access the stored information. In addition, a variety of data processor programs and formats can be used to store the nucleotide sequence information of the present invention on computer readable medium. The sequence information can be represented in a word processing text file, formatted in commercially-available software such as WordPerfect and MicroSoft Word, or represented in the form of an ASCII file, stored in a database application, such as DB2, Sybase, Oracle, or the like. A skilled artisan can readily adapt any number of data-processor structuring formats (e.g., text file or database) in order to obtain computer readable medium having recorded thereon the nucleotide sequence information of the present invention.

[0053] Computer software is publicly available which allows a skilled artisan to access sequence information provided in a computer readable medium. Thus, by providing in computer readable form the nucleotide sequences of SEQ ID NOS:1-982, a representative fragment thereof, or a nucleotide sequence at least 95%, preferably at least 99% and most preferably at least 99.9% identical to a sequence of SEQ ID NOS: 1-982 the present invention enables the skilled artisan routinely to access the provided sequence information for a wide variety of purposes.

[0054] The examples which follow demonstrate how software which implements the BLAST (Altschul et al., J. Mol. Biol. 215:403-410 (1990)) and BLAZE (Brutlag et al., Comp. Chem. 17:203-207 (1993)) search algorithms on a Sybase system was used to identify open reading frames (ORFs) within the Enterococcus faecalis genome which contain homology to ORFs or proteins from both Enterococcus faecalis and from other organisms. Among the ORFs discussed herein are protein encoding fragments of the Enterococcus faecalis genome useful in producing commercially important proteins, such as enzymes used in fermentation reactions and in the production of commercially useful metabolites, proteins to be used as vaccines or in the generation of immuno-therapeutic reagents, or as drug screening targets.

[0055] The present invention further provides systems, particularly computer-based systems, which contain the sequence information described herein. Such systems are designed to identify, among other things, commercially important fragments of the Enterococcus faecalis genome.

[0056] As used herein, “a computer-based system” refers to the hardware means, software means, and data storage means used to analyze the nucleotide sequence information of the present invention. The minimum hardware means of the computer-based systems of the present invention comprises a central processing unit (CPU), input means, output means, and data storage means. A skilled artisan can readily appreciate that any one of the currently available computer-based system are suitable for use in the present invention.

[0057] As stated above, the computer-based systems of the present invention comprise a data storage means having stored therein a nucleotide sequence of the present invention and the necessary hardware means and software means for supporting and implementing a search means.

[0058] As used herein, “data storage means” refers to memory which can store nucleotide sequence information of the present invention, or a memory access means which can access manufactures having recorded thereon the nucleotide sequence information of the present invention.

[0059] As used herein, “search means” refers to one or more programs which are implemented on the computer-based system to compare a target sequence or target structural motif with the sequence information stored within the data storage means. Search means are used to identify fragments or regions of the present genomic sequences which match a particular target sequence or target motif. A variety of known algorithms are disclosed publicly and a variety of commercially available software for conducting search means are and can be used in the computer-based systems of the present invention. Examples of such software includes, but is not limited to, MacPattern (EMBL), BLASTN and BLASTX (NCBI). A skilled artisan can readily recognize that any one of the available algorithms or implementing software packages for conducting homology searches can be adapted for use in the present computer-based systems.

[0060] As used herein, a “target sequence” can be any DNA or amino acid sequence of six or more nucleotides or two or more amino acids. A skilled artisan can readily recognize that the longer a target sequence is, the less likely a target sequence will be present as a random occurrence in the database. The most preferred sequence length of a target sequence is from about 10 to 100 amino acids or from about 30 to 300 nucleotide residues. However, it is well recognized that searches for commercially important fragments, such as sequence fragments involved in gene expression and protein processing, may be of shorter length.

[0061] As used herein, “a target structural motif,” or “target motif,” refers to any rationally selected sequence or combination of sequences in which the sequence(s) are chosen based on a three-dimensional configuration which is formed upon the folding of the target motif. There arc a variety of target motifs known in the art. Protein target motifs include, but are not limited to, enzymic active sites and signal sequences. Nucleic acid target motifs include, but are not limited to, promoter sequences, hairpin structures and inducible expression elements (protein binding sequences).

[0062] A variety of structural formats for the input and output means can be used to input and output the information in the computer-based systems of the present invention. A preferred format for an output means ranks fragments of the Enterococcus faecalis genomic sequences possessing varying degrees of homology to the target sequence or target motif. Such presentation provides a skilled artisan with a ranking of sequences which contain various amounts of the target sequence or target motif and identifies the degree of homology contained in the identified fragment.

[0063] A variety of comparing means can be used to compare a target sequence or target motif with the data storage means to identify sequence fragments of the Enterococcus faecalis genome. In the present examples, implementing software which implement the BLAST algorithm, described in Altschul et al. (1990) J. Mol. Biol. 215: 403-410, is used to identify open reading frames within the Enterococcus faecalis genome. A skilled artisan can readily recognize that any one of the publicly available homology search programs can be used as the search means for the computer-based systems of the present invention. Of course, suitable proprietary systems that may be known to those of skill also may be employed in this regard.

[0064] FIG. 1 provides a block diagram of a computer system illustrative of embodiments of this aspect of present invention. The computer system 102 includes a processor 106 connected to a bus 104. Also connected to the bus 104 are a main memory 108 (preferably implemented as random access memory, RAM) and a variety of secondary storage devices 110, such as a hard drive 112 and a removable medium storage device 114. The removable medium storage device 114 may represent, for example, a floppy disk drive, a CD-ROM drive, a magnetic tape drive, etc. A removable storage medium 116 (such as a floppy disk, a compact disk, a magnetic tape, etc.) containing control logic and/or data recorded therein may be inserted into the removable medium storage device 114. The computer system 102 includes appropriate software for reading the control logic and/or the data from the removable medium storage device 114, once it is inserted into the removable medium storage device 114.

[0065] A nucleotide sequence of the present invention may be stored in a well known manner in the main memory 108, any of the secondary storage devices 110, and/or a removable storage medium 116. During execution, software for accessing and processing the genomic sequence (such as search tools, comparing tools, etc.) reside in main memory 108, in accordance with the requirements and operating parameters of the operating system, the hardware system and the software program or programs.

[0066] Biochemical Embodiments

[0067] Other embodiments of the present invention are directed to isolated fragments of the Enterococcus faecalis genome. The fragments of the Enterococcus faecalis genome of the present invention include, but are not limited to fragments which encode peptides, hereinafter open reading frames (ORFs), fragments which modulate the expression of an operably linked ORF, hereinafter expression modulating fragments (EMFs) and fragments which can be used to diagnose the presence of Enterococcus faecalis in a sample, hereinafter diagnostic fragments (DFs).

[0068] As used herein, an “isolated nucleic acid molecule” or an “isolated fragment of the Enterococcus faecalis genome” refers to a nucleic acid molecule possessing a specific nucleotide sequence which has been subjected to purification means to reduce, from the composition, the number of compounds which are normally associated with the composition. Particularly, the term refers to the nucleic acid molecules having the sequences set out in SEQ ID NOS:1-982, to representative fragments thereof as described above, to polynucleotides at least 95%, preferably at least 99% and especially preferably at least 99.9% identical in sequence thereto, also as set out above.

[0069] A variety of purification means can be used to generate the isolated fragments of the present invention. These include, but are not limited to methods which separate constituents of a solution based on charge, solubility, or size.

[0070] In one embodiment, Enterococcus faecalis DNA can be enzymatically sheared to produce fragments of 15-20 kb in length. These fragments can then be used to generate a Enterococcus faecalis library by inserting them into lambda clones as described in the Examples below. Primers flanking, for example, an ORF, such as those enumerated in Tables 1-3 can then be generated using nucleotide sequence information provided in SEQ ID NOS:1-982. Well known and routine techniques of PCR cloning then can be used to isolate the ORF from the lambda DNA library or Enterococcus faecalis genomic DNA. Thus, given the availability of SEQ ID NOS:1-982, the information in Tables 1, 2 and 3, and the information that may be obtained readily by analysis of the sequences of SEQ ID NOS:1-982 using methods set out above, those of skill will be enabled by the present disclosure to isolate any ORF-containing or other nucleic acid fragment of the present invention.

[0071] The isolated nucleic acid molecules of the present invention include, but are not limited to single stranded and double stranded DNA, and single stranded RNA. As used herein, an “open reading frame,” ORF, means a series; of triplets coding for amino acids without any termination codons and is a sequence translatable into protein. Each sequence of SEQ ID NOS:1-982, however, begins and ends with a termination codon. For purposes of numbering and reference to polynucleotide and polypeptide sequences the entire sequence of each sequence of SEQ ID NOS:1-982 is included with the first nucleotide being position 1. Therefore, for reference purposes the numbering used in the present invention is that provided in the sequence listing for SEQ ID NOS:1-982.

[0072] Tables 1, 2, and 3 list ORFs in the Enterococcus faecalis genomic contigs of the present invention that were identified as putative coding regions by the GeneMark software using organism-specific second-order Markov probability transition matrices. It will be appreciated that other criteria can be used, in accordance with well known analytical methods, such as those discussed herein, to generate more inclusive, more restrictive, or more selective lists.

[0073] Table 1 sets out ORFs in the Enterococcus faecalis contigs of the present invention that over a continuous region of at least 50 bases are 95% or more identical (by BLAST analysis) to a nucleotide sequence available through GenBank in March, 1997.

[0074] Table 2 sets out ORFs in the Enterococcus faecalis contigs of the present invention that are not in Table 1 and match, with a BLASTP probability score of 0.01 or less, a polypeptide sequence available through GenBank in March, 1997.

[0075] Table 3 sets out ORFs in the Enterococcus faecalis contigs of the present invention that do not match significantly, by BLASTP analysis, a polypeptide sequence available through GenBank in March, 1997.

[0076] In each table, the first and second columns identify the ORF by, respectively, contig number and ORF number within the contig; the third column indicates the coordinate of the first nucleotide of the ORF, counting from the 5′ end of the contig strand; the fourth column indicates the coordinate of the final nucleotide of the ORF, counting from the 5′ end of the contig strand.

[0077] In Tables 1 and 2, column five lists the Reference for the closest matching sequence available through GenBank. These reference numbers are the database entry numbers commonly used by those of skill in the art, who will be familiar with their denominators. Descriptions of the nomenclature are available from the National Center for Biotechnology Information. Column six in Tables 1 and 2 provides the gene name of the matching sequence.

[0078] In Table 1, column seven provides the nucleotide BLAST percent identity score from the comparison of the ORF and the GenBank sequence, column eight indicates the length in nucleotides of the highest scoring segment pair identified by the BLAST identity analysis, and column nine provides the total length of the ORF in nucleotides.

[0079] In Table 2, column seven provides the protein BLAST percent similarity of the highest scoring segment pair identified, column eight provides the percent identity of the highest scoring segment pair, and column nine provides the total length of the ORF in nucleotides.

[0080] The concepts of percent identity and percent similarity of two polypeptide sequences is well understood in the art. For example, two polypeptides 10 amino acids in length which differ at three amino acid positions (e.g., at positions 1, 3 and 5) are said to have a percent identity of 70%. However, the same two polypeptides would be deemed to have a percent similarity of 80% if, for example at position 5, the amino acids moieties, although not identical, were “similar” (i.e., possessed similar biochemical characteristics). Many programs for analysis of nucleotide or amino acid sequence similarity, such as fasta and BLAST specifically list percent identity of a matching region as an output parameter. Thus, for instance, Tables 1 and 2 herein enumerate the percent identity of the highest scoring segment pair in each ORF and its listed relative. Further details concerning the algorithms and criteria used for homology searches are provided below and are described in the pertinent literature highlighted by the citations provided below.

[0081] It will be appreciated that other criteria can be used to generate more inclusive and more exclusive listings of the types set out in the tables. As those of skill will appreciate, narrow and broad searches both are useful. Thus, a skilled artisan can readily identify ORFs in contigs of the Enterococcus faecalis genome other than those listed in Tables 1-3, such as ORFs which are overlapping or encoded by the opposite strand of an identified ORF in addition to those ascertainable using the computer-based systems of the present invention.

[0082] As used herein, an “expression modulating fragment,” EMF, means a series of nucleotide molecules which modulates the expression of an operably linked ORF or EMF.

[0083] As used herein, a sequence is said to “modulate the expression of an operably linked sequence” when the expression of the sequence is altered by the presence of the EMF. EMFs include, but are not limited to, promoters, and promoter modulating sequences (inducible elements). One class of EMFs are fragments which induce the expression or an operably linked ORF in response to a specific regulatory factor or physiological event.

[0084] EMF sequences can be identified within the contigs of the Enterococcus faecalis genome by their proximity to the ORFs provided in Tables 1-3. An intergenic segment, or a fragment of the intergenic segment, from about 10 to 200 nucleotides in length, taken from any one of the ORFs of Tables 1-3 will modulate the expression of an operably linked ORF in a fashion similar to that found with the naturally linked ORF sequence. As used herein, an “intergenic segment” refers to fragments of the Enterococcus faecalis genome which are between two ORF(s) herein described. EMFs also can be identified using known EMFs as a target sequence or target motif in the computer-based systems of the present invention. Further, the two methods can be combined and used together.

[0085] The presence and activity of an EMF can be confirmed using an EMF trap vector. An EMF trap vector contains a cloning site linked to a marker sequence. A marker sequence encodes an identifiable phenotype, such as antibiotic resistance or a complementing nutrition auxotrophic factor, which can be identified or assayed when the EMF trap vector is placed within an appropriate host under appropriate conditions. As described above, a EMF will modulate the expression of an operably linked marker sequence. A more detailed discussion of various marker sequences is provided below.

[0086] A sequence which is suspected as being an EMF is cloned in all three reading frames in one or more restriction sites upstream from the marker sequence in the EMF trap vector. The vector is then transformed into an appropriate host using known procedures and the phenotype of the transformed host in examined under appropriate conditions. As described above, an EMF will modulate the expression of an operably linked marker sequence.

[0087] As used herein, a “diagnostic fragment,” DF, means a series of nucleotide molecules which selectively hybridize to Enterococcus faecalis sequences. DFs can be readily identified by identifying unique sequences within contigs of the Enterococcus faecalis genome, such as by using well-known computer analysis software, and by generating and testing probes or amplification primers consisting of the DF sequence in an appropriate diagnostic format which determines amplification or hybridization selectivity.

[0088] The sequences falling within the scope of the present invention are not limited to the specific sequences herein described, but also include allelic and species variations thereof. Allelic and species variations can be routinely determined by comparing the sequences provided in SEQ ID NOS:1-982, a representative fragment thereof, or a nucleotide sequence at least 99% and preferably 99.9% identical to SEQ ID NOS:1-982, with a sequence from another isolate of the same species. Furthermore, to accommodate codon variability, the invention includes nucleic acid molecules coding for the same amino acid sequences as do the specific ORFs disclosed herein. In other words, in the coding region of an ORF, substitution of one codon for another which encodes the same amino acid is expressly contemplated.

[0089] Any specific sequence disclosed herein can be readily screened for errors by resequencing a particular fragment, such as an ORF, in both directions (i.e., sequence both strands). Alternatively, error screening can be performed by sequencing corresponding polynucleotides of Enterococcus faecalis origin isolated by using part or all of the fragments in question as a probe or primer.

[0090] Each of the ORFs of the Enterococcus faecalis genome disclosed in Tables 1, 2 and 3, and the EMFs found 5 to the ORFs, can be used as polynucleotide reagents in numerous ways. For example, the sequences can be used as diagnostic probes or diagnostic amplification primers to detect the presence of a specific microbe in a sample, particularly Enterococcus faecalis. Especially preferred in this regard are ORFs such as those of Table 3, which do not match previously characterized sequences from other organisms and thus are most likely to be highly selective for Enterococcus faecalis. Also particularly preferred are ORFs that can be used to distinguish between strains of Enterococcus faecalis, particularly those that distinguish medically important strain, such as drug-resistant strains.

[0091] In addition, the fragments of the present invention, as broadly described, can be used to control gene expression through triple helix formation or antisense DNA or RNA, both of which methods are based on the binding of a polynucleotide sequence to DNA or RNA. Triple helix-formation optimally results in a shut-off of RNA transcription from DNA, while antisense RNA hybridization blocks translation of an mRNA molecule into polypeptide. Information from the sequences of the present invention can be used to design antisense and triple helix-forming oligonucleotides. Polynucleotides suitable for use in these methods are usually 20 to 40 bases in length and are designed to be complementary to a region of the gene involved in transcription, for triple-helix formation, or to the mRNA itself, for antisense inhibition. Both techniques have been demonstrated to be effective in model systems, and the requisite techniques are well known and involve routine procedures. Triple helix techniques are discussed in, for example, Lee et al., Nucl. Acids Res. 6:3073 (1979); Cooney et al., Science 241:456 (1988); and Dervan et al., Science 251:1360 (1991). Antisense techniques in general are discussed in, for instance, Okano, J. Neurochem. 56:560 (1991) and Oligodeoxynucleotides as Antisense Inhibitors of Gene Expression, CRC Press, Boca Raton, Fla. (1988)).

[0092] The present invention further provides recombinant constructs comprising one or more fragments of the Enterococcus faecalis genomic fragments and contigs of the present invention. Certain preferred recombinant constructs of the present invention comprise a vector, such as a plasmid or viral vector, into which a fragment of the Enterococcus faecalis genome has been inserted, in a forward or reverse orientation. In the case of a vector comprising one of the ORFs of the present invention, the vector may further comprise regulatory sequences, including for example, a promoter, operably linked to the ORF. For vectors comprising the EMFs of the present invention, the vector may further comprise a marker sequence or heterologous ORF operably linked to the EMF.

[0093] Large numbers of suitable vectors and promoters are known to those of skill in the art and are commercially available for generating the recombinant constructs of the present invention. The following vectors are provided by way of example. Useful bacterial vectors include phagescript, PsiX174, pBS SK (+ or −), pBS KS (+ or −), pNH8a, pNH16a, pNH18a, pNH46a (available from Stratagene); pTrc99A, pKK223-3, pKK233-3, pDR540, pRIT5 (available from Pharmacia). Useful eukaryotic vectors include pWLneo, pSV2cat, pOG44, pXT1, pSG (available from Stratagene) pSVK3, pBPV, pMSG, pSVL (available from Pharmacia).

[0094] Promoter regions can be selected from any desired gene using CAT (chloramphenicol transferase) vectors or other vectors with selectable markers. Two appropriate vectors are pKK232-8 and pCM7. Particular named bacterial promoters include lacI, lacZ, T3, T7, gpt, lambda PR, and trc. Eukaryotic promoters include CMV immediate early, HSV thymidine kinase, early and late SV40, LTRs from retrovirus, and mouse metallothionein-I. Selection of the appropriate vector and promoter is well within the level of ordinary skill in the art.

[0095] The present invention further provides host cells containing any one of the isolated fragments of the Enterococcus faecalis genomic fragments and contigs of the present invention, wherein the fragment has been introduced into the host cell using known methods. The host cell can be a higher eukaryotic host cell, such as a mammalian cell, a lower eukaryotic host cell, such as a yeast cell, or a procaryotic cell, such as a bacterial cell.

[0096] A polynucleotide of the present invention, such as a recombinant construct comprising an ORF of the present invention, may be introduced into the host by a variety of well established techniques that are standard in the art, such as calcium phosphate transfection, DEAE, dextran mediated transfection and electroporation, which are described in, for instance, Davis, L. et al., BASIC METHODS IN MOLECULAR BIOLOGY (1986).

[0097] A host cell containing one of the fragments of the Enterococcus faecalis genomic fragments and contigs of the present invention, can be used in conventional manners to produce the gene product encoded by the isolated fragment (in the case of an ORF) or can be used to produce a heterologous protein under the control of the EMF. The present invention further provides isolated polypeptides encoded by the nucleic acid fragments of the present invention or by degenerate variants of the nucleic acid fragments of the present invention. By “degenerate variant” is intended nucleotide fragments which differ from a nucleic acid fragment of the present invention (e.g., an ORF) by nucleotide sequence but, due to the degeneracy of the Genetic Code, encode an identical polypeptide sequence.

[0098] Preferred nucleic acid fragments of the present invention are the ORFs depicted in Tables 2 and 3 which encode proteins.

[0099] A variety of methodologies known in the art can be utilized to obtain any one of the isolated polypeptides or proteins of the present invention. At the simplest level, the amino acid sequence can be synthesized using commercially available peptide synthesizers. This is particularly useful in producing small peptides and fragments of larger polypeptides. Such short fragments as may be obtained most readily by synthesis are useful, for example, in generating antibodies against the native polypeptide, as discussed further below.

[0100] In an alternative method, the polypeptide or protein is purified from bacterial cells which naturally produce the polypeptide or protein. One skilled in the art can readily employ well-known methods for isolating polypeptides and proteins to isolate and purify polypeptides or proteins of the present invention produced naturally by a bacterial strain, or by other methods. Methods for isolation and purification that can be employed in this regard include, but are not limited to, immunochromatography, HPLC, size-exclusion chromatography, ion-exchange chromatography, and immuno-affinity chromatography.

[0101] The polypeptides and proteins of the present invention also can be purified from cells which have been altered to express the desired polypeptide or protein. Preferred polypeptides and proteins of the present invention are polypeptides and proteins coded for by the polynucleotides of SEQ ID NOS:1-982, wherein the polypeptides and proteins are coded in the same frame as the termination codon at the end of each sequence of SEQ ID NOS:1-982. As used herein, a cell is said to be altered to express a desired polypeptide or protein when the cell, through genetic manipulation, is made to produce a polypeptide or protein which it normally does not produce or which the cell normally produces at a lower level. Those skilled in the art can readily adapt procedures for introducing and expressing either recombinant or synthetic sequences into eukaryotic or prokaryotic cells in order to generate a cell which produces one of the polypeptides or proteins of the present invention.

[0102] The polypeptides of the present invention arc preferably provided in an isolated form, and preferably are substantially purified. A recombinantly produced version of the E. faecalis polypeptide can be substantially purified by the one-step method described by Smith et al. (1988) Gene 67:31-40. Polypeptides of the invention also can be purified from natural or recombinant sources using antibodies directed against the polypeptides of the invention in methods which are well known in the art of protein purification.

[0103] The invention further provides for isolated E. faecalis polypeptides comprising an amino acid sequence selected from the group including: (a) the amino acid sequence of a full-length E. faecalis polypeptide having the complete amino acid sequence from the first methionine codon to the termination codon of each sequence listed in SEQ ID NOS:1-982, wherein said termination codon is at the end of each SEQ ID NO: and said first methionine is the first methionine in frame with said termination codon; and (b) the amino acid sequence of a full-length E. faecalis polypeptide having the complete amino acid sequence in (a) excepting the N-terminal methionine.

[0104] The polypeptides of the present invention also include polypeptides having an amino acid sequence at least 80% identical, more preferably at least 90% identical, and still more preferably 95%, 96%, 97%, 98% or 99% identical to those described in (a) and (b) above.

[0105] The present invention is further directed to polynucleotide encoding portions or fragments of the amino acid sequences described herein as well as to portions or fragments of the isolated amino acid sequences described herein. Fragments include portions of the amino acid sequences described herein, are at least 5 contiguous amino acid in length, are selected from any two integers, one of which representing a N-terminal position. The initiation codon of the polypeptides of the present inventions position 1. The initiation codon (position 1) for purposes of the present invention is the first methionine codon of each sequence of SEQ ID NOS:1-982 which is in frame with the termination codon at the end of each said sequence. Every combination of a N-terminal and C-terminal position that a fragment at least 5 contiguous amino acid residues in length could occupy, on any given amino acid sequence encoded by a sequence of SEQ ID NOS:1-982 is included in the invention, i.e., from initiation codon up to the termination codon. At least means a fragment may be 5 contiguous amino acid residues in length or any integer between 5 and the number of residues in a full length amino acid sequence minus 1. Therefore, included in the invention are contiguous fragments specified by any N-terminal and C-terminal positions of amino acid sequence set forth in SEQ ID NOS:1-982 wherein the contiguous fragment is any integer between 5 and the number of residues in a full length sequence minus 1.

[0106] Further, the invention includes polypeptides comprising fragments specified by size, in amino acid residues, rather than by N-terminal and C-terminal positions. The invention includes any fragment size, in contiguous amino acid residues, selected from integers between 5 and the number of residues in a full length sequence minus 1. Preferred sizes of contiguous polypeptide fragments include about 5 amino acid residues, about 10 amino acid residues, about 20 amino acid residues, about 30 amino acid residues, about 40 amino acid residues, about 50 amino acid residues, about 100 amino acid residues, about 200 amino acid residues, about 300 amino acid residues, and about 400 amino acid residues. The preferred sizes are, of course, meant to exemplify, not limit, the present invention as all size fragments representing any integer between 5 and the number of residues in a full length sequence minus I are included in the invention. The present invention also provides for the exclusion of any fragments specified by N-terminal and C-terminal positions or by size in amino acid residues as described above. Any number of fragments specified by N-terminal and C-terminal positions or by size in amino acid residues as described above may be excluded.

[0107] The above fragments need not be active since they would be useful, for example, in immunoassays, in epitope mapping, epitope tagging, to generate antibodies to a particular portion of the protein, as vaccines, and as molecular weight markers.

[0108] Further polypeptides of the present invention include polypeptides which have at least 90% similarity, more preferably at least 95% similarity, and still more preferably at least 96%, 97%, 98% or 99% similarity to those described above.

[0109] A further embodiment of the invention relates to a polypeptide which comprises the amino acid sequence of a E. faecalis polypeptide having an amino acid sequence which contains at least one conservative amino acid substitution, but not more than 50 conservative amino acid substitutions, not more than 40 conservative amino acid substitutions, not more than 30 conservative amino acid substitutions, and not more than 20 conservative amino acid substitutions. Also provided are polypeptides which comprise the amino acid sequence of a E. faecalis polypeptide, having at least one, but not more than 10, 9, 8, 7, 6, 5, 4, 3, 2 or 1 conservative amino acid substitutions.

[0110] By a polypeptide having an amino acid sequence at least, for example, 95% “identical” to a query amino acid sequence of the present invention, it is intended that the amino acid sequence of the subject polypeptide is identical to the query sequence except that the subject polypeptide sequence may include up to five amino acid alterations per each 100 amino acids of the query amino acid sequence. In other words, to obtain a polypeptide having an amino acid sequence at least 95% identical to a query amino acid sequence, up to 5% of the amino acid residues in the subject sequence may be inserted, deleted, (indels) or substituted with another amino acid. These alterations of the reference sequence may occur at the amino or carboxy terminal positions of the reference amino acid sequence or anywhere between those terminal positions, interspersed either individually among residues in the reference sequence or in one or more contiguous groups within the reference sequence.

[0111] As a practical matter, whether any particular polypeptide is at least 90%, 95%, 96%, 97%, 98% or 99% identical to the amino acid sequences encoded by the sequences of SEQ ID NOS:1-982, as described herein, can be determined conventionally using known computer programs. A preferred method for determining the best overall match between a query sequence (a sequence of the present invention) and a subject sequence, also referred to as a global sequence alignment, can be determined using the FASTDB computer program based on the algorithm of Brutlag et al., (1990) Comp. App. Biosci. 6:237-245. In a sequence alignment the query and subject sequences are both amino acid sequences. The result of said global sequence alignment is in percent identity. Preferred parameters used in a FASTDB amino acid alignment are: Matrix=PAM 0, k-tuple=2, Mismatch Penalty=1, Joining Penalty-20, Randomization Group Length=0, Cutoff Score=1, Window Size=sequence length, Gap Penalty=5, Gap Size Penalty=0.05, Window Size=500 or the length of the subject amino acid sequence, whichever is shorter.

[0112] If the subject sequence is shorter than the query sequence due to N- or C-terminal deletions, not because of internal deletions, the results, in percent identity, must be manually corrected. This is because the FASTDB program does not account for N- and C-terminal truncations of the subject sequence when calculating global percent identity. For subject sequences truncated at the N- and C-termini, relative to the query sequence, the percent identity is corrected by calculating the number of residues of the query sequence that are N- and C-terminal of the subject sequence, which are not matched/aligned with a corresponding subject residue, as a percent of the total bases of the query sequence. Whether a residue is matched/aligned is determined by results of the FASTDB sequence alignment. This percentage is then subtracted from the percent identity, calculated by the above FASTDB program using the specified parameters, to arrive at a final percent identity score. This final percent identity score is what is used for the purposes of the present invention. Only residues to the N- and C-terminal of the subject sequence, which are not matched/aligned with the query sequence, are considered for the purposes of manually adjusting the percent identity score. That is, only query amino acid residues outside the farthest N- and C-terminal residues of the subject sequence.

[0113] For example, a 90 amino acid residue subject sequence is aligned with a 100 residue query sequence to determine percent identity. The deletion occurs at the N-terminus of the subject sequence and therefore, the FASTDB alignment does not match/align with the first 10 residues at the N-terminus. The 10 unpaired residues represent 10% of the sequence (number of residues at the N- and C-termini not matched/total number of residues in the query sequence) so 10% is subtracted from the percent identity score calculated by the FASTDB program. If the remaining 90 residues were perfectly matched the final percent identity would be 90%. In another example, a 90 residue subject sequence is compared with a 100 residue query sequence. This time the deletions are internal so there are no residues at the N- or C-termini of the subject sequence which are not matched/aligned with the query. In this case the percent identity calculated by FASTDB is not manually corrected. Once again, only residue positions outside the N- and C-terminal ends of the subject sequence, as displayed in the FASTDB alignment, which are not matched/aligned with the query sequence are manually corrected. No other manual corrections are to made for the purposes of the present invention.

[0114] The above polypeptide sequences are included irrespective of whether they have their normal biological activity. This is because even where a particular polypeptide molecule does not have biological activity, one of skill in the art would still know how to use the polypeptide, for instance, as a vaccine or to generate antibodies. Other uses of the polypeptides of the present invention that do not have E. faecalis activity include, inter alia, as epitope tags, in epitope mapping, and as molecular weight markers on SDS-PAGE gels or on molecular sieve gel filtration columns using methods known to those of skill in the art.

[0115] As described below, the polypeptides of the present invention can also be used to raise polyclonal and monoclonal antibodies, which are useful in assays for detecting E. faecalis protein expression or as agonists and antagonists capable of enhancing or inhibiting E. faecalis protein function. Further, such polypeptides can be used in the yeast two-hybrid system to “capture” E. faecalis protein binding proteins which are also candidate agonists and antagonists according to the present invention. See, e.g., Fields et al. (1989) Nature 340:245-246.

[0116] Any host/vector system can be used to express one or more of the ORFs of the present invention. These include, but are not limited to, eukaryotic hosts such as HeLa cells, CV-1 cell, COS cells, and Sf9 cells, as well as prokaryotic host such as E. coli and B. subtilis. The most preferred cells are those which do not normally express the particular polypeptide or protein or which expresses the polypeptide or protein at low natural level.

[0117] “Recombinant,” as used herein, means that a polypeptide or protein is derived from recombinant (e.g., microbial or mammalian) expression systems. “Microbial” refers to recombinant polypeptides or proteins made in bacterial or fungal (e.g., yeast) expression systems. As a product, “recombinant microbial” defines a polypeptide or protein essentially free of native endogenous substances and unaccompanied by associated native glycosylation. Polypeptides or proteins expressed in most bacterial cultures, e.g., E. coli, will be free of glycosylation modifications; polypeptides or proteins expressed in yeast will have a glycosylation pattern different from that expressed in mammalian cells.

[0118] “Nucleotide sequence” refers to a heteropolymer of deoxyribonucleotides. Generally, DNA segments encoding the polypeptides and proteins provided by this invention are assembled from fragments of the Enterococcus faecalis genome and short oligonucleotide linkers, or from a series of oligonucleotides, to provide a synthetic gene which is capable of being expressed in a recombinant transcriptional unit comprising regulatory elements derived from a microbial or viral operon.

[0119] Recombinant expression vehicle or “vector” refers to a plasmid or phage or virus or vector, for expressing a polypeptide from a DNA (RNA) sequence. The expression vehicle can comprise a transcriptional unit comprising an assembly of (1) a genetic regulatory elements necessary for gene expression in the host, including elements required to initiate and maintain transcription at a level sufficient for suitable expression of the desired polypeptide, including, for example, promoters and, where necessary, an enhancer and a polyadenylation signal; (2) a structural or coding sequence which is transcribed into mRNA and translated into protein, and (3) appropriate signals to initiate translation at the beginning of the desired coding region and terminate translation at its end. Structural units intended for use in yeast or eukaryotic expression systems preferably include a leader sequence enabling extracellular secretion of translated protein by a host cell. Alternatively, where recombinant protein is expressed without a leader or transport sequence, it may include an N-terminal methionine residue. This residue may or may not be subsequently cleaved from the expressed recombinant protein to provide a final product.

[0120] “Recombinant expression system” means host cells which have stably integrated a recombinant transcriptional unit into chromosomal DNA or carry the recombinant transcriptional unit extra chromosomally. The cells can be prokaryotic or eukaryotic. Recombinant expression systems as defined herein will express heterologous polypeptides or proteins upon induction of the regulatory elements linked to the DNA segment or synthetic gene to be expressed.

[0121] Mature proteins can be expressed in mammalian cells, yeast, bacteria, or other cells under the control of appropriate promoters. Cell-free translation systems can also be employed to produce such proteins using RNAs derived from the DNA constructs of the present invention. Appropriate cloning and expression vectors for use with prokaryotic and eukaryotic hosts are described in Sambrook et al., Molecular Cloning: A Laboratory Manual, 2nd Edition, Cold Spring Harbor Laboratory Press, Cold Spring Harbor, N.Y. (1989), the disclosure of which is hereby incorporated by reference in its entirety.

[0122] Generally, recombinant expression vectors will include origins of replication and selectable markers permitting transformation of the host cell, e.g., the ampicillin resistance gene of E. coli and S. cerevisiae TRP1 gene, and a promoter derived from a highly expressed gene to direct transcription of a downstream structural sequence. Such promoters can be derived from operons encoding glycolytic enzymes such as 3-phosphoglycerate kinase (PGK), alpha-factor, acid phosphatase, or heat shock proteins, among others. The heterologous structural sequence is assembled in appropriate phase with translation initiation and termination sequences, and preferably, a leader sequence capable of directing secretion of translated protein into the periplasmic space or extracellular medium. Optionally, the heterologous sequence can encode a fusion protein including an N-terminal identification peptide imparting desired characteristics, e.g., stabilization or simplified purification of expressed recombinant product.

[0123] Useful expression vectors for bacterial use are constructed by inserting a structural DNA sequence encoding a desired protein together with suitable translation initiation and termination signals in operable reading phase with a functional promoter. The vector will comprise one or more phenotypic selectable markers and an origin of replication to ensure maintenance of the vector and, when desirable, provide amplification within the host.

[0124] Suitable prokaryotic hosts for transformation include strains of E. coli, B. subtilis, Salmonella typhimurium and various species within the genera Pseudomonas and Streptomyces. Others may, also be employed as a matter of choice.

[0125] As a representative but non-limiting example, useful expression vectors for bacterial use can comprise a selectable marker and bacterial origin of replication derived from commercially available plasmids comprising genetic elements of the well known cloning vector pBR322 (ATCC 37017). Such commercial vectors include, for example, pKK223-3 (available form Pharmacia Fine Chemicals, Uppsala, Sweden) and GEM 1 (available from Promega Biotec, Madison, Wis., USA). These pBR322 “backbone” sections are combined with an appropriate promoter and the structural sequence to be expressed.

[0126] Following transformation of a suitable host strain and growth of the host strain to an appropriate cell density, the selected promoter, where it is inducible, is derepressed or induced by appropriate means (e.g., temperature shift or chemical induction) and cells are cultured for an additional period to provide for expression of the induced gene product. Thereafter cells are typically harvested, generally by centrifugation, disrupted to release expressed protein, generally by physical or chemical means, and the resulting crude extract is retained for further purification.

[0127] Various mammalian cell culture systems can also be employed to express recombinant protein. Examples of mammalian expression systems include the COS-7 lines of monkey kidney fibroblasts, described in Gluzman, Cell 23:175 (1981), and other cell lines capable of expressing a compatible vector, for example, the C127, 3T3, CHO, HeLa and BHK cell lines.

[0128] Mammalian expression vectors will comprise an origin of replication, a suitable promoter and enhancer, and also any necessary ribosome binding sites, polyadenylation site, splice donor and acceptor sites, transcriptional termination sequences, and 5 flanking nontranscribed sequences. DNA sequences derived from the SV40 viral genome, for example, SV40 origin, early promoter, enhancer, splice, and polyadenylation sites may be used to provide the required nontranscribed genetic elements.

[0129] Recombinant polypeptides and proteins produced in bacterial culture is usually isolated by initial extraction from cell pellets, followed by one or more salting-out, aqueous ion exchange or size exclusion chromatography steps. Microbial cells employed in expression of proteins can be disrupted by any convenient method, including freeze-thaw cycling, sonication, mechanical disruption, or use of cell lysing agents. Protein refolding steps can be used, as necessary, in completing configuration of the mature protein. Finally, high performance liquid chromatography (HPLC) can be employed for final purification steps.

[0130] The present invention further includes isolated polypeptides, proteins and nucleic acid molecules which are substantially equivalent to those herein described. As used herein, substantially equivalent can refer both to nucleic acid and amino acid sequences, for example a mutant sequence, that varies from a reference sequence by one or more substitutions, deletions, or additions, the net effect of which does not result in an adverse functional dissimilarity between reference and subject sequences. For purposes of the present invention, sequences having equivalent biological activity, and equivalent expression characteristics are considered substantially equivalent. For purposes of determining equivalence, truncation of the mature sequence should be disregarded.

[0131] The invention further provides methods of obtaining homologs from other strains of Enterococcus faecalis, of the fragments of the Enterococcus faecalis genome of the present invention and homologs of the proteins encoded by the ORFs of the present invention. As used herein, a sequence or protein of Enterococcus faecalis is defined as a homolog of a fragment of the Enterococcus faecalis fragments or contigs or a protein encoded by one of the ORFs of the present invention,, if it shares significant homology to one of the fragments of the Enterococcus faecalis genome of the present invention or a protein encoded by one of the ORFs of the present invention. Specifically, by using the sequence disclosed herein as a probe or as primers, and techniques such as PCR cloning and colony/plaque hybridization, one skilled in the art can obtain homologs.

[0132] As used herein, two nucleic acid molecules or proteins are said to “share significant homology” if the two contain regions which possess greater than 85% sequence (amino acid or nucleic acid) homology. Preferred homologs in this regard are those with more than 90% homology. Especially preferred are those with 93% or more homology. Among especially preferred homologs those with 95% or more homology are particularly preferred. Very particularly preferred among these are those with 97% and even more particularly preferred among those are homologs with 99% or more homology. The most preferred homologs among these are those with 99.9% homology or more. It will be understood that, among measures of homology, identity is particularly preferred in this regard.

[0133] Region specific primers or probes derived from the nucleotide sequence provided in SEQ ID NOS:1-982 or from a nucleotide sequence at least 95%, particularly at least 99%, especially at least 99.5% identical to a sequence of SEQ ID NOS:1-982 can be used to prime DNA synthesis and PCR amplification, as well as to identify colonies containing cloned DNA encoding a homolog. Methods suitable to this aspect of the present invention are well known and have been described in great detail in many publications such as, for example, Innis et al., PCR Protocols, Academic Press, San Diego, Calif. (1990)).

[0134] When using primers derived from SEQ ID NOS:1-982 or from a nucleotide sequence having an aforementioned identity to a sequence of SEQ ID NOS: 1-982, one skilled in the art will recognize that by employing high stringency conditions (e.g., annealing at 50-60° C. in 6×SSPC and 50% formamicle, and washing at 50-65° C. in 0.5×SSPC) only sequences which are greater than 75% homologous to the primer will be amplified. By employing lower stringency conditions (e.g., hybridizing at 35-37° C. in 5×SSPC and 40-45% formamide, and washing at 42° C. in 0.5×SSPC), sequences which are greater than 40-50% homologous to the primer will also be amplified.

[0135] When using DNA probes derived from SEQ ID NOS:1-982, or from a nucleotide sequence having an aforementioned identity to a sequence of SEQ ID NOS:1-982, for colony/plaque hybridization, one skilled in the art will recognize that by employing high stringency conditions (e.g., hybridizing at 50-65° C. in 5×SSPC and 50% formamide, and washing at 50-65° C. in 0.5×SSPC), sequences having regions which are greater than 90% homologous to the probe can be obtained, and that by employing lower stringency conditions (e.g., hybridizing at 35-37° C. in 5×SSPC and 40-45% formamide, and washing at 42° C. in 0.5×SSPC), sequences having regions which are greater than 35-45% homologous to the probe will be obtained.

[0136] Any organism can be used as the source for homologs of the present invention so long as the organism naturally expresses such a protein or contains genes encoding the same. The most preferred organism for isolating homologs are bacteria which are closely related to Enterococcus faecalis.

[0137] Illustrative Uses of Compositions of the Invention

[0138] Each ORF provided in Tables 1 and 2 is identified with a function by homology to a known gene or polypeptide. As a result, one skilled in the art can use the polypeptides of the present invention for commercial, therapeutic and industrial purposes consistent with the type of putative identification of the polypeptide. Such identifications permit one skilled in the art to use the Enterococcus faecalis ORFs in a manner similar to the known type of sequences for which the identification is made; for example, to ferment a particular sugar source or to produce a particular metabolite. A variety of reviews illustrative of this aspect of the invention are available, including the following reviews on the industrial use of enzymes, for example, BIOCHEMICAL ENGINEERING AND BIOTECHNOLOGY HANDBOOK, 2nd Ed., MacMillan Publications, Ltd. NY (1991) and BIOCATALYSTS IN ORGANIC SYNTHESES, Tramper et al., Eds., Elsevier Science Publishers, Amsterdam, The Netherlands (1985). A variety of exemplary uses that illustrate this and similar aspects of the present invention are discussed below.

[0139] 1. Biosynthetic Enzymes

[0140] Open reading frames encoding proteins involved in mediating the catalytic reactions involved in intermediary and macromolecular metabolism, the biosynthesis of small molecules, cellular processes and other functions includes enzymes involved in the degradation of the intermediary products of metabolism, enzymes involved in central intermediary metabolism, enzymes involved in respiration, both aerobic and anaerobic, enzymes involved in fermentation, enzymes involved in ATP proton motor force conversion, enzymes involved in broad regulatory function, enzymes involved in amino acid synthesis, enzymes involved in nucleotide synthesis, enzymes involved in cofactor and vitamin synthesis, can be used for industrial biosynthesis.

[0141] The various metabolic pathways present in Enterococcus faecalis can be identified based on absolute nutritional requirements as well as by examining the various enzymes identified in Table 1-3 and SEQ ID NOS:1-982.

[0142] Of particular interest are polypeptides involved in the degradation of intermediary metabolites as well as non-macromolecular metabolism. Such enzymes include amylases, glucose oxidases, and catalase.

[0143] Proteolytic enzymes are another class of commercially important enzymes. Proteolytic enzymes find use in a number of industrial processes including the processing of flax and other vegetable fibers, in the extraction, clarification and depectinization of fruit juices, in the extraction of vegetables' oil and in the maceration of fruits and vegetables to give unicellular fruits. A detailed review of the proteolytic enzymes used in the food industry is provided in Rombouts et al., Symbiosis 21:79 (1986) and Voragen et al. in Biocatalysts In Agricultural Biotechnology, Whitaker et al., Eds., American Chemical Society Symposium Series 389:93 (1989).

[0144] The metabolism of sugars is an important aspect of the primary metabolism of Enterococcus faecalis. Enzymes involved in the degradation of sugars, such as, particularly, glucose, galactose, fructose and xylose, can be used in industrial fermentation. Some of the important sugar transforming enzymes, from a commercial viewpoint, include sugar isomerases such as glucose isomerase. Other metabolic enzymes have found commercial use such as glucose oxidases which produces ketogulonic acid (KGA). KGA is an intermediate in the commercial production of ascorbic acid using the Reichstein's procedure, as described in Krueger et al., Biotechnology 6(A), Rhine et al., Eds., Verlag Press, Weinheim, Germany (1984).

[0145] Glucose oxidase (GOD) is commercially available and has been used in purified form as well as in an immobilized form for the deoxygenation of beer. See, for instance, Hartmeir et al., Biotechnology Letters 1:21 (1979). The most important application of GOD is the industrial scale fermentation of gluconic acid. Market for gluconic acids which are used in the detergent, textile, leather, photographic, pharmaceutical, food, feed and concrete industry, as described, for example, in Bigelis et al., beginning on page 357 in GENE MANIPULATIONS AND FUNGI; Benett et al., Eds., Academic Press, New York (1985). In addition to industrial applications, GOD has found applications in medicine for quantitative determination of glucose in body fluids recently in biotechnology for analyzing syrups from starch and cellulose hydrosylates. This application is described in Owusu et al., Biochem. et Biophysica. Acta. 872:83 (1986), for instance.

[0146] The main sweetener used in the world today is sugar which comes from sugar beets and sugar cane. In the field of industrial enzymes, the glucose isomerase process shows the largest expansion in the market today. Initially, soluble enzymes were used and later immobilized enzymes were developed (Krueger et al., Biotechnology, The Textbook of Industrial Microbiology, Sinauer Associated Incorporated, Sunderland, Mass. (1990)). Today, the use of glucose-produced high fructose syrups is by far the largest industrial business using immobilized enzymes. A review of the industrial use of these enzymes is provided by Jorgensen, Starch 40:307 (1988).

[0147] Proteinases, such as alkaline serine proteinases, are used as detergent additives and thus represent one of the largest volumes of microbial enzymes used in the industrial sector. Because of their industrial importance, there is a large body of published and unpublished information regarding the use of these enzymes in industrial processes. (See Faultman et al., Acid Proteases Structure Function and Biology, Tang, J., ed., Plenum Press, New York (1977) and Godfrey et al., Industrial Enzymes, MacMillan Publishers, Surrey, UK (1983) and Hepner et al., Report Industrial Enzymes by 1990, Hel Hepner & Associates, London (1986)).

[0148] Another class of commercially usable proteins of the present invention are the microbial lipases, described by, for instance, Macrae et al., Philosophical Transactions of the Chiral Society of London 310:227 (1985) and Poserke, Journal of the American Oil Chemist Society 61:1758 (1984). A major use of lipases is in the fat and oil industry for the production of neutral glycerides using lipase catalyzed inter-esterification of readily available triglycerides. Application of lipases include the use as a detergent additive to facilitate the removal of fats from fabrics in the course of the washing procedures.

[0149] The use of enzymes, and in particular microbial enzymes, as catalyst for key steps in the synthesis of complex organic molecules is gaining popularity at a great rate. One area of great interest is the preparation of chiral intermediates. Preparation of chiral intermediates is of interest to a wide range of synthetic chemists particularly those scientists involved with the preparation of new pharmaceuticals, agrochemicals, fragrances and flavors. (See Davies et al., Recent Advances in the Generation of Chiral Intermediates Using Enzymes, CRC Press, Boca Raton, Fla. (1990)). The following reactions catalyzed by enzymes are of interest to organic chemists: hydrolysis of carboxylic acid esters, phosphate esters, amides and nitrites, esterification reactions, trans-esterification reactions, synthesis of amides, reduction of alkanones and oxoalkanates, oxidation of alcohols to carbonyl compounds, oxidation of sulfides to sulfoxides, and carbon bond forming reactions such as the aldol reaction.

[0150] When considering the use of an enzyme encoded by one of the ORFs of the present invention for biotransformation and organic synthesis it is sometimes necessary to consider the respective advantages and disadvantages of using a microorganism as opposed to an isolated enzyme. Pros and cons of using a whole cell system on the one hand or an isolated partially purified enzyme on the other hand, has been described in detail by Bud et al., Chemistry in Britain (1987), p. 127.

[0151] Amino transferases, enzymes involved in the biosynthesis and metabolism of amino acids, are useful in the catalytic production of amino acids. The advantages of using microbial based enzyme systems is that the amino transferase enzymes catalyze the stereo-selective synthesis of only L-amino acids and generally possess uniformly high catalytic rates. A description of the use of amino transferases for amino acid production is provided by Roselle-David, Methods of Enzymology 136:479 (1987).

[0152] Another category of useful proteins encoded by the ORFs of the present invention include enzymes involved in nucleic acid synthesis, repair, and recombination.

[0153] 2. Generation of Antibodies

[0154] As described here, the proteins of the present invention, as well as homologs thereof, can be used in a variety of procedures and methods known in the art which are currently applied to other proteins. The proteins of the present invention can further be used to generate an antibody which selectively binds the protein.

[0155] E. faecalis protein-specific antibodies for use in the present invention can be raised against the intact E. faecalis protein or an antigenic polypeptide fragment thereof, which may be presented together with a carrier protein, such as an albumin, to an animal system (such as rabbit or mouse) or, if it is long enough (at least about 25 amino acids), without a carrier.

[0156] As used herein, the term “antibody” (Ab) or “monoclonal antibody” (Mab) is meant to include intact molecules, single chain whole antibodies, and antibody fragments. Antibody fragments of the present invention include Fab and F(ab′)2 and other fragments including single-chain Fvs (scFv) and disulfide-linked Fvs (sdFv). Also included in the present invention are chimeric and humanized monoclonal antibodies and polyclonal antibodies specific for the polypeptides of the present invention. The antibodies of the present invention may be prepared by any of a variety of methods. For example, cells expressing a polypeptide of the present invention or an antigenic fragment thereof can be administered to an animal in order to induce the production of sera containing polyclonal antibodies. For example, a preparation of E. faecalis polypeptide or fragment thereof is prepared and purified to render it substantially free of natural contaminants. Such a preparation is then introduced into an animal in order to produce polyclonal antisera of greater specific activity.

[0157] In a preferred method, the antibodies of the present invention are monoclonal antibodies or binding fragments thereof. Such monoclonal antibodies can be prepared using hybridoma technology. See, e.g., Harlow et al., ANTIBODIES: A LABORATORY MANUAL, (Cold Spring Harbor Laboratory Press, 2nd ed. 1988); Hammerling, et al., in: MONOCLONAL ANTIBODIES AND T-CELL HYBRIDOMAS 563-681 (Elsevier, N.Y., 1981). Fab and F(ab′)2 fragments may be produced by proteolytic cleavage, using enzymes such as papain (to produce Fab fragments) or pepsin (to produce F(ab′)2 fragments). Alternatively, E. faecalis polypeptide-binding fragments, chimeric, and humanized antibodies can be produced through the application of recombinant DNA technology or through synthetic chemistry using methods known in the art.

[0158] Alternatively, additional antibodies capable of binding to the polypeptide antigen of the present invention may be produced in a two-step procedure through the use of anti-idiotypic antibodies. Such a method makes use of the fact that antibodies are themselves antigens, and that, therefore, it is possible to obtain an antibody which binds to a second antibody. In accordance with this method, E. faecalis polypeptide-specific antibodies arc used to immunize an animal, preferably a mouse. The splenocytes of such an animal are then used to produce hybridoma cells, and the hybridoma cells are screened to identify clones which produce an antibody whose ability to bind to the E. faecalis polypeptide-specific antibody can be blocked by the E. faecalis polypeptide antigen. Such antibodies comprise anti-idiotypic antibodies to the E. faecalis polypeptide-specific antibody and can be used to immunize an animal to induce formation of further E. faecalis polypeptide-specific antibodies.

[0159] Antibodies and fragements thereof of the present invention may be described by the portion of a polypeptide of the present invention recognized or specifically bound by the antibody. Antibody binding fragements of a polypeptide of the present invention may be described or specified in the same manner as for polypeptide fragements discussed above., i.e., by N-terminal and C-terminal positions or by size in contiguous amino acid residues. Any number of antibody binding fragments, of a polypeptide of the present invention, specified by N-terminal and C-terminal positions or by size in amino acid residues, as described above, may also be excluded from the present invention. Therefore, the present invention includes antibodies the specifically bind a particularly described fragement of a polypeptide of the present invention and allows for the exclusion of the same.

[0160] Antibodies and fragements thereof of the present invention may also be described or specified in terms of their cross-reactivity. Antibodies and fragements that do not bind polypeptides of any other species of Enterococcus other than E. faecalis are included in the present invention. Likewise, antibodies and fragements that bind only species of Enterococcus, i.e. antibodies and fragements that do not bind bacteria from any genus other than Enterococcus, are included in the present invention.

[0161] 3. Diagnostic and Detection Assays and Kits

[0162] The present invention further relates to methods for assaying enterococcal infection in an animal by detecting the expression of genes encoding enterococcal polypeptides of the present invention. The methods comprise analyzing tissue or body fluid from the animal for Enterococcus-specific antibodies, nucleic acids, or proteins. Analysis of nucleic acid specific to Enterococcus is assayed by PCR or hybridization techniques using nucleic acid sequences of the present invention as either hybridization probes or primers. See, e.g., Sambrook et al. Molecular cloning: A Laboratory Manual (Cold Spring Harbor Laboratory Press, 2nd ed., 1983, page 54 reference); Eremeeva et al. (1994) J. Clin. Microbiol. 32:803-810 (describing differentiation among spotted fever group Rickettsiae species by analysis of restriction fragment length polymorphism of PCR-amplified DNA) and Chen et al. 1994 J. Clin. Microbiol. 32:589-595 (detecting B. burgdorferi nucleic acids via PCR).

[0163] Where diagnosis of a disease state related to infection with Enterococcus has already been made, the present invention is useful for monitoring progression or regression of the disease state whereby patients exhibiting enhanced Enterococcus gene expression will experience a worse clinical outcome relative to patients expressing these gene(s) at a lower level.

[0164] By “biological sample” is intended any biological sample obtained from an animal, cell line, tissue culture, or other source which contains Enterococcus polypeptide, mRNA, or DNA. Biological samples include body fluids (such as saliva, blood, plasma, urine, mucus, synovial fluid, etc.) tissues (such as muscle, skin, and cartilage) and any other biological source suspected of containing Enterococcus polypeptides or nucleic acids. Methods for obtaining biological samples such as tissue are well known in the art.

[0165] The present invention is useful for detecting diseases related to Enterococcus infections in animals. Preferred animals include monkeys, apes, cats, dogs, birds, cows, pigs, mice, horses, rabbits and humans. Particularly preferred are humans.

[0166] Total RNA can be isolated from a biological sample using any suitable technique such as the single-step guanidinium-thiocyanate-phenol-chloroform method described in Chomczynski et al. (1987) Anal. Biochem. 162:156-159. mRNA encoding Enterococcus polypeptides having sufficient homology to the nucleic acid sequences identified in SEQ ID NOS:1-982 to allow for hybridization between complementary sequences are then assayed using any appropriate method. These include Northern blot analysis, S1 nuclease mapping, the polymerase chain reaction (PCR), reverse transcription in combination with the polymerase chain reaction (RT-PCR), and reverse transcription in combination with the ligase chain reaction (RT-LCR).

[0167] Northern blot analysis can be performed as described in Harada et al. (1990) Cell 63:303-312. Briefly, total RNA is prepared from a biological sample as described above. For the Northern blot, the RNA is denatured in an appropriate buffer (such as glyoxal/dimethyl sulfoxide/sodium phosphate buffer), subjected to agarose gel electrophoresis, and transferred onto a nitrocellulose filter. After the RNAs have been linked to the filter by a UV linker, the filter is prehybridized in a solution containing formamide, SSC, Denhardt's solution, denatured salmon sperm, SDS, and sodium phosphate buffer. A E. faecalis polynucleotide sequence shown in SEQ ID NOS:1-982 labeled according to any appropriate method (such as the ³²P-multiprimed DNA labeling system (Amersham)) is used as probe. After hybridization overnight, the filter is washed and exposed to x-ray film. DNA for use as probe according to the present invention is described in the sections above and will preferably at least 15 nucleotides in length.

[0168] S1 mapping can be performed as described in Fujita et al. (1987) Cell 49:357-367. To prepare probe DNA for use in S1 mapping, the sense strand of an above-described E. faecalis DNA sequence of the present invention is used as a template to synthesize labeled antisense DNA. The antisense DNA can then be digested using an appropriate restriction endonuclease to generate further DNA probes of a desired length. Such antisense probes are useful for visualizing protected bands corresponding to the target mRNA (i.e., mRNA encoding Enterococcus polypeptides).

[0169] Levels of mRNA encoding Enterococcus polypeptides are assayed, for e.g., using the RT-PCR method described in Makino et al. (1990) Technique 2:295-301. By this method, the radioactivities of the “amplicons” in the polyacrylamide gel bands are linearly related to the initial concentration of the target mRNA. Briefly, this method involves adding total RNA isolated from a biological sample in a reaction mixture containing a RT primer and appropriate buffer. After incubating for primer annealing, the mixture can be supplemented with a RT buffer, cNTPs, DTT, RNase inhibitor and reverse transcriptase. After incubation to achieve reverse transcription of the RNA, the RT products are then subject to PCR using labeled primers. Alternatively, rather than labeling the primers, a labeled dNTP can be included in the PCR reaction mixture. PCR amplification can be performed in a DNA thermal cycler according to conventional techniques. After a suitable number of rounds to achieve amplification, the PCR reaction mixture is electrophoresed on a polyacrylamide gel. After drying the gel, the radioactivity of the appropriate bands (corresponding to the mRNA encoding the Enterococcus polypeptides of the present invention) are quantified using an imaging analyzer. RT and PCR reaction ingredients and conditions, reagent and gel concentrations, and labeling methods are well known in the art. Variations on the RT-PCR method will be apparent to the skilled artisan. Other PCR methods that can detect the nucleic acid of the present invention can be found in PCR PRIMER: A LABORATORY MANUAL (C. W. Dieffenbach et al. eds., Cold Spring Harbor Lab Press, 1995).

[0170] The polynucleotides of the present invention., including both DNA and RNA, may be used to detect polynucleotides of the present invention or Enterococcal species including E. faecalis using bio chip technology. The present invention includes both high density chip arrays (>1000 oligonucleotides per cm²) and low density chip arrays (<1000 oligonucleotides per cm²). Bio chips comprising arrays of polynucleotides of the present invention may be used to detect Enterococcal species, including E. faecalis, in biological and environmental samples and to diagnose an animal, including humans, with an E. faecalis or other Enterococcal infection. The bio chips of the present invention may comprise polynucleotide sequences of other pathogens including bacteria, viral, parasitic, and fungal polynucleotide sequences, in addition to the polynucleotide sequences of the present invention, for use in rapid differential pathogenic detection and diagnosis. The bio chips can also be used to monitor an E. faecalis or other Enterococcal infections and to monitor the genetic changes (deletions, insertions, mismatches, etc.) in response to drug therapy in the clinic and drug development in the laboratory. The bio chip technology comprising arrays of polynucleotides of the present invention may also be used to simultaneously monitor the expression of a multiplicity of genes, including those of the present invention. The polynucleotides used to comprise a selected array may be specified in the same manner as for the fragements, i.e., by their 5′ and 3′ positions or length in contigious base pairs and include from. Methods and particular uses of the polynucleotides of the present invention to detect Enterococcal species, including E. faecalis, using bio chip technology include those known in the art and those of: U.S. Pat. Nos. 5,510,270, 5,545,531, 5,445,934, 5,677,195, 5,532,128, 5,556,752, 5,527,681, 5,451,683, 5,424,186, 5,607,646, 5,658,732 and World Patent Nos. WO/9710365, WO/9511995, WO/9743447, WO/9535505, each incorporated herein in their entireties.

[0171] Biosensors using the polynucleotides of the present invention may also be used to detect, diagnose, and monitor E. faecalis or other Enterococcal species and infections thereof. Biosensors using the polynucleotides of the present invention may also be used to detect particular polynucleotides of the present invention. Biosensors using the polynucleotides of the present invention may also be used to monitor the genetic changes (deletions, insertions, mismatches, etc.) in response to drug therapy in the clinic and drug development in the laboratory. Methods and particular uses of the polynucleotides of the present invention to detect Enterococcal species, including E. faecalis, using biosenors include those known in the art and those of: U.S. Pat. Nos. 5,721,102, 5,658,732, 5,631,170, and World Patent Nos. WO97/35011, WO/97/20203, each incorporated herein in their entireties.

[0172] Thus, the present invention includes both bio chips and biosensors comprising polynucleotides of the present invention and methods of their use.

[0173] Assaying Enterococcus polypeptide levels in a biological sample can occur using any art-known method, such as antibody-based techniques. For example, Enterococcus polypeptide expression in tissues can be studied with classical immunohistological methods. In these, the specific recognition is provided by the primary antibody (polyclonal or monoclonal) but the secondary detection system can utilize fluorescent, enzyme, or other conjugated secondary antibodies. As a result, an immunohistological staining of tissue section for pathological examination is obtained. Tissues can also be extracted, e.g., with urea and neutral detergent, for the liberation of Enterococcus polypeptides for Western-blot or dot/slot assay. See, e.g., Jalkanen, M. et al. (1985) J. Cell. Biol. 101:976-985; Jalkanen, M. et al. (1987) J. Cell . Biol. 105:3087-3096. In this technique, which is based on the use of cationic solid phases, quantitation of a Enterococcus polypeptide can be accomplished using an isolated Enterococcus polypeptide as a standard. This technique can also be applied to body fluids.

[0174] Other antibody-based methods useful for detecting Enterococcus polypeptide gene expression include immunoassays, such as the ELISA and the radioimmunoassay (RIA). For example, a Enterococcus polypeptide-specific monoclonal antibodies can be used both as an immunoabsorbent and as an enzyme-labeled probe to detect and quantify a Enterococcus polypeptide. The amount of a Enterococcus polypeptide present in the sample can be calculated by reference to the amount present in a standard preparation using a linear regression computer algorithm. Such an ELISA is described in Iacobelli et al. (1988) Breast Cancer Research and Treatment 11:19-30. In another ELISA assay, two distinct specific monoclonal antibodies can be used to detect Enterococcus polypeptides in a body fluid. In this assay, one of the antibodies is used as the immunoabsorbent and the other as the enzyme-labeled probe.

[0175] The above techniques may be conducted essentially as a “one-step” or “two-step” assay. The “one-step” assay involves contacting the Enterococcus polypeptide with immobilized antibody and, without washing, contacting the mixture with the labeled antibody. The “two-step” assay involves washing before contacting the mixture with the labeled antibody. Other conventional methods may also be employed as suitable. It is usually desirable to immobilize one component of the assay system on a support, thereby allowing other components of the system to be brought into contact with the component and readily removed from the sample. Variations of the above and other immunological methods included in the present invention can also be found in Harlow et al., ANTIBODIES: A LABORATORY MANUAL, (Cold Spring Harbor Laboratory Press, 2nd ed. 1988).

[0176] Suitable enzyme labels include, for example, those from the oxidase group, which catalyze the production of hydrogen peroxide by reacting with substrate. Glucose oxidase is particularly preferred as it has good stability and its substrate (glucose) is readily available. Activity of an oxidase label may be assayed by measuring the concentration of hydrogen peroxide formed by the enzyme-labeled antibody/substrate reaction. Besides enzymes, other suitable labels include radioisotopes, such as iodine (¹²⁵I, ¹²¹I), carbon (¹⁴C), sulphur (³⁵S), tritium (³H), indium (¹¹²In), and technetium (^{99m}Tc), and fluorescent labels, such as fluorescein and rhodamine, and biotin.

[0177] Further suitable labels for the Enterococcus polypeptide-specific antibodies of the present invention are provided below. Examples of suitable enzyme labels include malate dehydrogenase, Enterococcal nuclease, delta-5-steroid isomerase, yeast-alcohol dehydrogenase, alpha-glycerol phosphate dehydrogenase, triose phosphate isomerase, peroxidase, alkaline phosphatase, asparaginase, glucose oxidase, beta-galactosidase, ribonuclease, urease, catalase, glucose-6-phosphate dehydrogenase, glucoamylase, and acetylcholine esterase.

[0178] Examples of suitable radioisotopic labels include ³H, ¹¹¹In, ¹²⁵I, ¹³¹I, ³²P, ³⁵S, ¹⁴C, ⁵¹ Cr, ⁵⁷To, ⁵⁸Co, ⁵⁹Fe, ⁷⁵Se, ¹⁵²Eu, ⁹⁰Y, ⁶⁷Cu, ²¹⁷Ci, ²¹¹At, ²¹²Pb, ⁴⁷Sc, ¹⁰⁹Pd, etc. ¹¹¹In is a preferred isotope where in vivo imaging is used since its avoids the problem of dehalogenation of the ¹²⁵I or ¹³¹I-labeled monoclonal antibody by the liver. In addition, this radionucleotide has a more favorable gamma emission energy for imaging. See, e.g., Perkins et al. (1985) Eur. J. Nucl. Med. 10:296-301; Carasquillo et al. (1987) J. Nucl. Med. 28:281-287. For example, ¹¹¹In coupled to monoclonal antibodies with 1-(P-isothiocyanatobenzyl)-DPTA has shown little uptake in non-tumors tissues, particularly the liver, and therefore enhances specificity of tumor localization. See, Esteban et al. (1987) J. Nucl. Med. 28:861-870.

[0179] Examples of suitable non-radioactive isotopic labels include ¹⁵⁷Gd, ⁵⁵Mn, ¹⁶²Dy, ⁵²Tr, and ⁵⁶Fe.

[0180] Examples of suitable fluorescent labels include an ¹⁵²Eu label, a fluorescein label, an isothiocyanate label, a rhodamine label, a phycoerythrin label, a phycocyanin label, an allophycocyanin label, an o-phthaldehyde label, and a fluorescamine label.

[0181] Examples of suitable toxin labels include, Pseudomonas toxin, diphtheria toxin, ricin, and cholera toxin.

[0182] Examples of chemiluminescent labels include a luminal label, an isoluminal label, an aromatic acridinium ester label, an imidazole label, an acridinium salt label, an oxalate ester label, a luciferin label, a luciferase label, and an aequorin label.

[0183] Examples of nuclear magnetic resonance contrasting agents include heavy metal nuclei such as Gd, Mn, and iron.

[0184] Typical techniques for binding the above-described labels to antibodies are provided by Kennedy et al. (1976) Clin. Chim. Acta 70:1-31, and Schurs et al. (1977) Clin. Chim. Acta 81:1-40. Coupling techniques mentioned in the latter are the glutaraldehyde method, the periodate method, the dimaleimide method, the m-maleimidobenzyl-N-hydroxy-succinimide ester method, all of which methods are incorporated by reference herein.

[0185] In a related aspect, the invention includes a diagnostic kit for use in screening serum containing antibodies specific against E. faecalis infection. Such a kit may include an isolated E. faecalis antigen comprising an epitope which is specifically immunoreactive with at least one anti-E. faecalis antibody. Such a kit also includes means for detecting the binding of said antibody to the antigen. In specific embodiments, the kit may include a recombinantly produced or chemically synthesized peptide or polypeptide antigen. The peptide or polypeptide antigen may be attached to a solid support.

[0186] In a more specific embodiment, the detecting means of the above-described kit includes a solid support to which said peptide or polypeptide antigen is attached. Such a kit may also include a non-attached reporter-labeled anti-human antibody. In this embodiment, binding of the antibody to the E. faecalis antigen can be detected by binding of the reporter labeled antibody to the anti-E. faecalis polypeptide antibody.

[0187] In a related aspect, the invention includes a method of detecting E. faecalis infection in a subject. This detection method includes reacting a body fluid, preferably serum, from the subject with an isolated E. faecalis antigen, and examining the antigen for the presence of bound antibody. In a specific embodiment, the method includes a polypeptide antigen attached to a solid support, and serum is reacted with the support. Subsequently, the support is reacted with a reporter-labeled anti-human antibody. The support is then examined for the presence of reporter-labeled antibody.

[0188] The solid surface reagent employed in the above assays and kits is prepared by known techniques for attaching protein material to solid support material, such as polymeric beads, dip sticks, 96-well plates or filter material. These attachment methods generally include non-specific adsorption of the protein to the support or covalent attachment of the protein, typically through a free amine group, to a chemically reactive group on the solid support, such as an activated carboxyl, hydroxyl, or aldehyde group. Alternatively, streptavidin coated plates can be used in conjunction with biotinylated antigen(s).

[0189] The polypeptides and antibodies of the present invention, including fragments thereof, may be used to detect Enterococcal species including E. faecalis using bio chip and biosensor technology. Bio chip and biosensors of the present invention may comprise the polypeptides of the present invention to detect antibodies, which specifically recognize Enterococcal species, including E. faecalis. Bio chip and biosensors of the present invention may also comprise antibodies which specifically recognize the polypeptides of the present invention to detect Enterococcal species, including E. faecalis or specific polypeptides of the present invention. Bio chips or biosensors comprising polypeptides or antibodies of the present invention may be used to detect Enterococcal species, including E. faecalis, in biological and environmental samples and to diagnose an animal, including humans, with an E. faecalis or other Enterococcal infection. Thus, the present invention includes both bio chips and biosensors comprising polypeptides or antibodies of the present invention and methods of their use. The bio chips of the present invention may further comprise polypeptide sequences of other pathogens including bacteria, viral, parasitic, and fungal polypeptide sequences, in addition to the polypeptide sequences of the present invention, for use in rapid differential pathogenic detection and diagnosis. The bio chips of the present invention may further comprise antibodies or fragements thereof specific for other pathogens including bacteria, viral, parasitic, and fungal polypeptide sequences, in addition to the antibodies or fragements thereof of the present invention, for use in rapid differential pathogenic detection and diagnosis. The bio chips and biosensors of the present invention may also be used to monitor an E. faecalis or other Enterococcal infection and to monitor the genetic changes (amio acid deletions, insertions, substitutions, etc.) in response to drug therapy in the clinic and drug development in the laboratory. The bio chip and biosensors comprising polypeptides or antibodies of the present invention may also be used to simultaneously monitor the expression of a multiplicity of polypeptides, including those of the present invention. The polypeptides used to comprise a bio chip or biosensor of the present invention may be specified in the same manner as for the fragements, i.e., by their N-terminal and C-terminal positions or length in contigious amino acid residue. Methods and particular uses of the polypeptides and antibodies of the present invention to detect Enterococcal species, including E. faecalis, or specific polypeptides using bio chip and biosensor technology include those known in the art, those of the U.S. patent Nos. and World Patent Nos. listed above for bio chips and biosensors using polynucleotides of the present invention, and those of: U.S. Pat. Nos. 5,658,732, 5,135,852, 5,567,301, 5,677,196, 5,690,894 and World Patent Nos. WO9729366, WO9612957, each incorporated herein in their entireties.

[0190] 4. Screening Assay for Binding Agents

[0191] Using the isolated proteins of the present invention, the present invention further provides methods of obtaining and identifying agents which bind to a protein encoded by one of the ORFs of the present invention or to one of the fragments and the Enterococcus faecalis fragment and contigs herein described.

[0192] In general, such methods comprise steps of:

[0193] (a) contacting an agent with an isolated protein encoded by one of the ORFs of the present invention, or an isolated fragment of the Enterococcus faecalis genome; and

[0194] (b) determining whether the agent binds to said protein or said fragment.

[0195] The agents screened in the above assay can be, but are not limited to, peptides, carbohydrates, vitamin derivatives, or other pharmaceutical agents. The agents can be selected and screened at random or rationally selected or designed using protein modeling techniques.

[0196] For random screening, agents such as peptides, carbohydrates, pharmaceutical agents and the like are selected at random and are assayed for their ability to bind to the protein encoded by the ORF of the present invention.

[0197] Alternatively, agents may be rationally selected or designed. As used herein, an agent is said to be “rationally selected or designed” when the agent is chosen based on the configuration of the particular protein. For example, one skilled in the art can readily adapt currently available procedures to generate peptides, pharmaceutical agents and the like capable of binding to a specific peptide sequence in order to generate rationally designed antipeptide peptides, for example see Hurby et al., “Application of Synthetic Peptides: Antisense Peptides,” in Synthetic Peptides, A User's Guide, W. H. Freeman, NY (1992), pp. 289-307, and Kaspczak et al., Biochemistry 28:9230-8 (1989), or pharmaceutical agents, or the like.

[0198] In addition to the foregoing, one class of agents of the present invention, as broadly described, can be used to control gene expression through binding to one of the ORFs or EMFs of the present invention. As described above, such agents can be randomly screened or rationally designed/selected. Targeting the ORF or EMF allows a skilled artisan to design sequence specific or element specific agents, modulating the expression of either a single ORF or multiple ORFs which rely on the same EMF for expression control.

[0199] One class of DNA binding agents are agents which contain base residues which hybridize or form a triple helix by binding to DNA or RNA. Such agents can be based on the classic phosphodiester, ribonucleic acid backbone, or can be a variety of sulfhydryl or polymeric derivatives which have base attachment capacity.

[0200] Agents suitable for use in these methods usually contain 20 to 40 bases and are designed to be complementary to a region of the gene involved in transcription (triple helix—see Lee et al., Nucl. Acids Res. 6:3073 (1979); Cooney et al., Science 241:456 (1988); and Dervan et al., Science 251:1360 (1991)) or to the mRNA itself (antisense—Okano, J. Neurochem. 56:560 (1991); Oligodeoxynucleotides as Antisense Inhibitors of Gene Expression, CRC Press, Boca Raton, Fla. (1988)). Triple helix-formation optimally results in a shut-off of RNA transcription from DNA, while antisense RNA hybridization blocks translation of an mRNA molecule into polypeptide. Both techniques have been demonstrated to be effective in model systems. Information contained in the sequences of the present invention can be used to design antisense and triple helix-forming oligonucleotides, and other DNA binding agents.

[0201] 5. Pharmaceutical Compositions and Vaccines

[0202] The present invention further provides pharmaceutical agents which can be used to modulate the growth or pathogenicity of Enterococcus faecalis, or another related organism, in vivo or in vitro. As used herein, a “pharmaceutical agent” is defined as a composition of matter which can be formulated using known techniques to provide a pharmaceutical compositions. As used herein, the “pharmaceutical agents of the present invention” refers the pharmaceutical agents which are derived from the proteins encoded by the ORFs of the present invention or are agents which are identified using the herein described assays.

[0203] As used herein, a pharmaceutical agent is said to “modulate the growth and/or pathogenicity of Enterococcus faecalis or a related organism, in vivo or in vitro,” when the agent reduces the rate of growth, rate of division, or viability of the organism in question. The pharmaceutical agents of the present invention can modulate the growth or pathogenicity of an organism in many fashions, although an understanding of the underlying mechanism of action is not needed to practice the use of the pharmaceutical agents of the present invention. Some agents will modulate the growth by binding to an important protein thus blocking the biological activity of the protein, while other agents may bind to a component of the outer surface of the organism blocking attachment or rendering the organism more prone to act the bodies nature immune system. Alternatively, the agent may comprise a protein encoded by one of the ORFs of the present invention and serve as a vaccine. The development and use of a vaccine based on outer membrane components are well known in the art.

[0204] As used herein, a “related organism” is a broad term which refers to any organism whose growth can be modulated by one of the pharmaceutical agents of the present invention. In general, such an organism will contain a homolog of the protein which is the target of the pharmaceutical agent or the protein used as a vaccine. As such, related organisms do not need to be bacterial but may be fungal or viral pathogens.

[0205] The pharmaceutical agents and compositions of the present invention may be administered in a convenient manner, such as by the oral, topical, intravenous, intraperitoneal, intramuscular, subcutaneous, intranasal or intradermal routes. The pharmaceutical compositions are administered in an amount which is effective for treating and/or prophylaxis of the specific indication. In general, they are administered in an amount of at least about 1 mg/kg body weight and in most cases they will be administered in an amount not in excess of about 1 g/kg body weight per day. In most cases, the dosage is from about 0.1 mg/kg to about 10 g/kg body weight daily, taking into account the routes of administration, symptoms, etc.

[0206] The agents of the present invention can be used in native form or can be modified to form a chemical derivative. As used herein, a molecule is said to be a “chemical derivative” of another molecule when it contains additional chemical moieties not normally a part of the molecule. Such moieties may improve the molecule's solubility, absorption, biological half life, etc. The moieties may alternatively decrease the toxicity of the molecule, eliminate or attenuate any undesirable side effect of the molecule, etc. Moieties capable of mediating such effects are disclosed in, among other sources, REMINGTON'S PHARMACEUTICAL SCIENCES (1980) cited elsewhere herein.

[0207] For example, such moieties may change an immunological character of the functional derivative, such as affinity for a given antibody. Such changes in immunomodulation activity are measured by the appropriate assay, such as a competitive type immunoassay. Modifications of such protein properties as redox or thermal stability, biological half-life, hydrophobicity, susceptibility to proteolytic degradation or the tendency to aggregate with carriers or into multimers also may be effected in this way and can be assayed by methods well known to the skilled artisan.

[0208] The therapeutic effects of the agents of the present invention may be obtained by providing the agent to a patient by any suitable means (e.g., inhalation, intravenously, intramuscularly, subcutaneously, enterally, or parenterally). It is preferred to administer the agent of the present invention so as to achieve in effective concentration within the blood or tissue in which the growth of the organism is to be controlled. To achieve an effective blood concentration, the preferred method is to administer the agent by injection. The administration may be by continuous infusion, or by single or multiple injections.

[0209] In providing a patient with one of the agents of the present invention, the dosage of the administered agent will vary depending upon such factors as the patient's age, weight, height, sex, general medical condition, previous medical history, etc. In general, it is desirable to provide the recipient with a dosage of agent which is in the range of from about 1 pg/kg to 10 mg/kg (body weight of patient), although a lower or higher dosage may be administered. The therapeutically effective dose can be lowered by using combinations of the agents of the present invention or another agent.

[0210] As used herein, two or more compounds or agents are said to be administered “in combination” with each other when either (1) the physiological effects of each compound, or (2) the serum concentrations of each compound can be measured at the same time. The composition of the present invention can be administered concurrently with, prior to, or following the administration of the other agent.

[0211] The agents of the present invention are intended to be provided to recipient subjects in an amount sufficient to decrease the rate of growth (as defined above) of the target organism.

[0212] The administration of the agent(s) of the invention may be for either a “prophylactic” or “therapeutic” purpose. When provided prophylactically, the agent(s) are provided in advance of any symptoms indicative of the organisms growth. The prophylactic administration of the agent(s) serves to prevent, attenuate, or decrease the rate of onset of any subsequent infection. When provided therapeutically, the agent(s) are provided at (or shortly after) the onset of an indication of infection. The therapeutic administration of the compound(s) serves to attenuate the pathological symptoms of the infection and to increase the rate of recovery.

[0213] The agents of the present invention are administered to a subject, such as a mammal, or a patient, in a pharmaceutically acceptable form and in a therapeutically effective concentration. A composition is said to be “pharmacologically acceptable” if its administration can be tolerated by a recipient patient. Such an agent is said to be administered in a “therapeutically effective amount” if the amount administered is physiologically significant. An agent is physiologically significant if its presence results in a detectable change in the physiology of a recipient patient.

[0214] The agents of the present invention can be formulated according to known methods to prepare pharmaceutically useful compositions, whereby these materials, or their functional derivatives, are combined in a mixture with a pharmaceutically acceptable carrier vehicle. Suitable vehicles and their formulation, inclusive of other human proteins, e.g., human serum albumin, are described, for example, in REMINGTON'S PHARMACEUTICAL SCIENCES, 16th Ed., Osol, A., Ed., Mack Publishing, Easton, Pa. (1980). In order to form a pharmaceutically acceptable composition suitable for effective administration, such compositions will contain an effective amount of one or more of the agents of the present invention, together with a suitable amount of carrier vehicle.

[0215] Additional pharmaceutical methods may be employed to control the duration of action. Control release preparations may be achieved through the use of polymers to complex or absorb one or more of the agents of the present invention. The controlled delivery may be effectuated by a variety of well known techniques, including formulation with macromolecules such as, for example, polyesters, polyamino acids, polyvinyl, pyrrolidone, ethylenevinylacetate, methylcellulose, carboxymethylcellulose, or protamine, sulfate, adjusting the concentration of the macromolecules and the agent in the formulation, and by appropriate use of methods of incorporation, which can be manipulated to effectuate a desired time course of release. Another possible method to control the duration of action by controlled release preparations is to incorporate agents of the present invention into particles of a polymeric material such as polyesters, polyamino acids, hydrogels, poly(lactic acid) or ethylene vinylacetate copolymers. Alternatively, instead of incorporating these agents into polymeric particles, it is possible to entrap these materials in microcapsules prepared, for example, by coacervation techniques or by interfacial polymerization with, for example, hydroxymethylcellulose or gelatine-microcapsules and poly(methylmethacylate) microcapsules, respectively, or in colloidal drug delivery systems, for example, liposomes, albumin microspheres, microemulsions, nanoparticles, and nanocapsules or in macroemulsions. Such techniques are disclosed in REMINGTON'S PHARMACEUTICAL SCIENCES (1980).

[0216] The invention further provides a pharmaceutical pack or kit comprising one or more containers filled with one or more of the ingredients of the pharmaceutical compositions of the invention. Associated with such container(s) can be a notice in the form prescribed by a governmental agency regulating the manufacture, use or sale of pharmaceuticals or biological products, which notice reflects approval by the agency of manufacture, use or sale for human administration.

[0217] In addition, the agents of the present invention may be employed in conjunction with other therapeutic compounds.

[0218] The present invention also provides vaccines comprising one or more polypeptides of the present invention. Heterogeneity in the composition of a vaccine may be provided by combining E. faecalis polypeptides of the present invention. Multi-component vaccines of this type are desirable because they are likely to be more effective in eliciting protective immune responses against multiple species and strains of the Enterococcus genus than single polypeptide vaccines.

[0219] Multi-component vaccines are known in the art to elicit antibody production to numerous immunogenic components. See, e.g., Decker et al. (1996) J. Infect. Dis. 174:S270-275. In addition, a hepatitis B, diphtheria, tetanus, pertussis tetravalent vaccine has recently been demonstrated to elicit protective levels of antibodies in human infants against all four pathogenic agents. See, e.g., Axistegui, J. et al. (1997) Vaccine 15:7-9.

[0220] The present invention in addition to single-component vaccines includes multi-component vaccines. These vaccines comprise more than one polypeptide, immunogen or antigen. Thus, a multi-component vaccine would be a vaccine comprising more than one of the E. faecalis polypeptides of the present invention.

[0221] Further within the scope of the invention are whole cell and whole viral vaccines. Such vaccines may be produced recombinantly and involve the expression of one or more of the E. faecalis polypeptides described in SEQ ID NOS:1-982. For example, the E. faecalis polypeptides of the present invention may be either secreted or localized intracellular, on the cell surface, or in the periplasmic space. Further, when a recombinant virus is used, the E. faecalis polypeptides of the present invention may, for example, be localized in the viral envelope, on the surface of the capsid, or internally within the capsid. Whole cells vaccines which employ cells expressing heterologous proteins are known in the art. See, e.g., Robinson, K. et al. (1997) Nature Biotech. 15:653-657; Sirard, J. et al. (1997) Infect. Immun. 65:2029-2033; Chabalgoity, J. et al. (1997) Infect. Immun. 65:2402-2412. These cells may be administered live or may be killed prior to administration. Chabalgoity, J. et al., supra, for example, report the successful use in mice of a live attenuated Salmonella vaccine strain which expresses a portion of a platyhelminth fatty acid-binding protein as a fusion protein on its cells surface.

[0222] A multi-component vaccine can also be prepared using techniques known in the art by combining one or more E. faecalis polypeptides of the present invention, or fragments thereof, with additional non-Enterococcal components (e.g., diphtheria toxin or tetanus toxin, and/or other compounds known to elicit an immune response). Such vaccines are useful for eliciting protective immune responses to both members of the Enterococcus genus and non-Enterococcal pathogenic agents.

[0223] The vaccines of the present invention also include DNA vaccines. DNA vaccines are currently being developed for a number of infectious diseases. See, et al., Boyer, et al. (1997) Nat. Med. 3:526-532; reviewed in Spier, R. (1996) Vaccine 14:1285-1288. Such DNA vaccines contain a nucleotide sequence encoding one or more E. faecalis polypeptides of the present invention oriented in a manner that allows for expression of the subject polypeptide. For example, the direct administration of plasmid DNA encoding B. burgdorgeri OspA has been shown to elicit protective immunity in mice against borrelial challenge. See, Luke et al. (1997) J. Infect. Dis. 175:91-97.

[0224] The present invention also relates to the administration of a vaccine which is co-administered with a molecule capable of modulating immune responses. Kim et al. (1997) Nature Biotech. 15:641-646, for example, report the enhancement of immune responses produced by DNA immunizations when DNA, sequences encoding molecules which stimulate the immune response are co-administered. In a similar fashion, the vaccines of the present invention may be co-administered with either nucleic acids encoding immune modulators or the immune modulators themselves. These immune modulators include granulocyte macrophage colony stimulating factor (GM-CSF) and CD86.

[0225] The vaccines of the present invention may be used to confer resistance to Enterococcal infection by either passive or active immunization. When the vaccines of the present invention are used to confer resistance to Enterococcal infection through active immunization, a vaccine of the present invention is administered to an animal to elicit a protective immune response which either prevents or attenuates a Enterococcal infection. When the vaccines of the present invention are used to confer resistance to Enterococcal infection through passive immunization, the vaccine is provided to a host animal (e.g., human, dog, or mouse), and the antisera elicited by this antisera is recovered and directly provided to a recipient suspected of having an infection caused by a member of the Enterococcus genus.

[0226] The ability to label antibodies, or fragments of antibodies, with toxin molecules provides an additional method for treating Enterococcal infections when passive immunization is conducted. In this embodiment, antibodies, or fragments of antibodies, capable of recognizing the E. faecalis polypeptides disclosed herein, or fragments thereof, as well as other Enterococcus proteins, are labeled with toxin molecules prior to their administration to the patient. When such toxin derivatized antibodies bind to Enterococcus cells, toxin moieties will be localized to these cells and will cause their death.

[0227] The present invention thus concerns and provides a means for preventing or attenuating a Enterococcal infection resulting from organisms which have antigens that are recognized and bound by antisera produced in response to the polypeptides of the present invention. As used herein, a vaccine is said to prevent or attenuate a disease if its administration to an animal results either in the total or partial attenuation (i.e., suppression) of a symptom or condition of the disease, or in the total or partial immunity of the animal to the disease.

[0228] The administration of the vaccine (or the antisera which it elicits) may be for either a “prophylactic” or “therapeutic” purpose. When provided prophylactically, the compound(s) are provided in advance of any symptoms of Enterococcal infection. The prophylactic administration of the compound(s) serves to prevent or attenuate any subsequent infection. When provided therapeutically, the compound(s) is provided upon or after the detection of symptoms which indicate that an animal may be infected with a member of the Enterococcus genus. The therapeutic administration of the compound(s) serves to attenuate any actual infection. Thus, the E. faecalis polypeptides, and fragments thereof, of the present invention may be provided either prior to the onset of infection (so as to prevent or attenuate an anticipated infection) or after the initiation of an actual infection.

[0229] The polypeptides of the invention, whether encoding a portion of a native protein or a functional derivative thereof, may be administered in pure form or may be coupled to a macromolecular carrier. Example of such carriers are proteins and carbohydrates. Suitable proteins which may act as macromolecular carrier for enhancing the immunogenicity of the polypeptides of the present invention include keyhole limpet hemacyanin (KLH) tetanus toxoid, pertussis toxin, bovine serum albumin, and ovalbumin. Methods for coupling the polypeptides of the present invention to such macromolecular carriers are disclosed in Harlow et al., ANTIBODIES: A LABORATORY MANUAL, (Cold Spring Harbor Laboratory Press, 2nd ed. 1988).

[0230] A composition is said to be “pharmacologically or physiologically acceptable” if its administration can be tolerated by a recipient animal and is otherwise suitable for administration to that animal. Such an agent is said to be administered in a “therapeutically effective amount” if the amount administered is physiologically significant. An agent is physiologically significant if its presence results in a detectable change in the physiology of a recipient patient.

[0231] While in all instances the vaccine of the present invention is administered as a pharmacologically acceptable compound, one skilled in the art would recognize that the composition of a pharmacologically acceptable compound varies with the animal to which it is administered. For example, a vaccine intended for human use will generally not be co-administered with Freund's adjuvant. Further, the level of purity of the E. faecalis polypeptides of the present invention will normally be higher when administered to a human than when administered to a non-human animal.

[0232] As would be understood by one of ordinary skill in the art, when the vaccine of the present invention is provided to an animal, it may be in a composition which may contain salts, buffers, adjuvants, or other substances which are desirable for improving the efficacy of the composition. Adjuvants are substances that can be used to specifically augment a specific immune response. These substances generally perform two functions: (1) they protect the antigen(s) from being rapidly catabolized after administration and (2) they nonspecifically stimulate immune responses.

[0233] Normally, the adjuvant and the composition are mixed prior to presentation to the immune system, or presented separately, but into the same site of the animal being immunized. Adjuvants can be loosely divided into several groups based upon their composition. These groups include oil adjuvants (for example, Freund's complete and incomplete), mineral salts (for example, ALK(SO₄)₂, AlNa(SO₄)₂, AlNH₄(SO₄), silica, kaolin, and carbon), polynucleotides (for example, poly IC and poly AU acids), and certain natural substances (for example, wax D from Mycobacterium tuberculosis, as well as substances found in Corynebacterium parvum, or Bordetella pertussis, and members of the genus Brucella. Other substances useful as adjuvants are the saponins such as, for example, Quil A. (Superfos A/S, Denmark). Preferred adjuvants for use in the present invention include aluminum salts, such as AlK(SO₄)₂, AlNa(SO₄)₂, and AlNH₄(SO₄). Examples of materials suitable for use in vaccine compositions are provided in REMINGTON'S PHARMACEUTICAL SCIENCES 1324-1341 (A. Osol, ed, Mack Publishing Co, Easton, Pa., (1980) (incorporated herein by reference).

[0234] The therapeutic compositions of the present invention can be administered parenterally by injection, rapid infusion, nasopharyngeal absorption (intranasopharangeally), dermoabsorption, or orally. The compositions may alternatively be administered intramuscularly, or intravenously. Compositions for parenteral administration include sterile aqueous or non-aqueous solutions, suspensions, and emulsions. Examples of non-aqueous solvents are propylene glycol, polyethylene glycol, vegetable oils such as olive oil, and injectable organic esters such as ethyl oleate. Carriers or occlusive dressings can be used to increase skin permeability and enhance antigen absorption. Liquid dosage forms for oral administration may generally comprise a liposome solution containing the liquid dosage form. Suitable forms for suspending liposomes include emulsions, suspensions, solutions, syrups, and elixirs containing inert diluents commonly used in the art, such as purified water. Besides the inert diluents, such compositions can also include adjuvants, wetting agents, emulsifying and suspending agents, or sweetening, flavoring, or perfuming agents.

[0235] Therapeutic compositions of the present invention can also be administered in encapsulated form. For example, intranasal immunization using vaccines encapsulated in biodegradable microsphere composed of poly(DL-lactide-co-glycolide). See, Shahin, R. et al. (1995) Infect. Immun. 63:1195-1200. Similarly, orally administered encapsulated Salmonella typhimurium antigens can also be used. Allaoui-Attarki, K. et al. (1997) Infect. Immun. 65:853-857. Encapsulated vaccines of the present invention can be administered by a variety of routes including those involving contacting the vaccine with mucous membranes (e.g., intranasally, intracolonicly, intraduodenally).

[0236] Many different techniques exist for the timing of the immunizations when a multiple administration regimen is utilized. It is possible to use the compositions of the invention more than once to increase the levels and diversities of expression of the immunoglobulin repertoire expressed by the immunized animal. Typically, if multiple immunizations are given, they will be given one to two months apart.

[0237] According to the present invention, an “effective amount” of a therapeutic composition is one which is sufficient to achieve a desired biological effect. Generally, the dosage needed to provide an effective amount of the composition will vary depending upon such factors as the animal's or human's age, condition, sex, and extent of disease, if any, and other variables which can be adjusted by one of ordinary skill in the art.

[0238] The antigenic preparations of the invention can be administered by either single or multiple dosages of an effective amount. Effective amounts of the compositions of the invention can vary from 0.01-1,000 μg/ml per dose, more preferably 0.1-500 μg/ml pcr dose, and most preferably 10-300 μg/ml per dose.

[0239] 6. Shot-Gun Approach to Megabase DNA Sequencing

[0240] The present invention further demonstrates that a large genome can be sequenced using a random shotgun approach. This procedure, described in detail in the examples that follow, has eliminated the up front cost of isolating and ordering overlapping or contiguous subclones prior to the start of the sequencing protocols.

[0241] Certain aspects of the present invention are described in greater detail in the examples that follow. The examples are provided by way of illustration. Other aspects and embodiments of the present invention are contemplated by the inventors, as will be clear to those of skill in the art from reading the present disclosure.

### ILLUSTRATIVE EXAMPLES

[0242] Libraries and Sequencing

[0243] 1. Shotgun Sequencing Probability Analysis

[0244] The overall strategy for a shotgun approach to whole genome sequencing follows from the Lander and Waterman (Landerman and Waterman, Genomics 2:231 (1988)) application of the equation for the Poisson distribution. According to this treatment, the probability, P0, that any given base in a sequence of size L, in nucleotides, is not sequenced after a certain amount, n, in nucleotides, of random sequence has been determined can be calculated by the equation P0=e−m, where m is L/n, the fold coverage. For instance, for a genome of 2.8 Mb, m=1 when 2.8 Mb of sequence has been randomly generated (1×coverage). At that point, P0=e−1=0.37. The probability that any given base has not been sequenced is the same as the probability that any region of the whole sequence L has not been determined and, therefore, is equivalent to the fraction of the whole sequence that has yet to be determined. Thus, at one-fold coverage, approximately 37% of a polynucleotide of size L, in nucleotides has not been sequenced. When 14 Mb of sequence has been generated, coverage is 5× for a 2.8 Mb and the unsequenced fraction drops to 0.0067 or 0.67%. 5× coverage of a 2.8 Mb sequence can be attained by sequencing approximately 17,000 random clones from both insert ends with an average sequence read length of 410 bp.

[0245] Similarly, the total gap length, G, is determined by the equation G=Le−m, and the average gap size, g, follows the equation, g=L/n. Thus, 5× coverage leaves about 240 gaps averaging about 82 bp in size in a sequence of a polynucleotide 2.8 Mb long.

[0246] The treatment above is essentially that of Lander and Waterman, Genomics 2: 231 (1988).

[0247] 2. Random Library Construction

[0248] In order to approximate the random model described above during actual sequencing, a nearly ideal library of cloned genomic fragments is required. The following library construction procedure was developed to achieve this end.

[0249] Enterococcus faecalis DNA is prepared by phenol extraction. A mixture containing 200 μg DNA in 1.0 ml of 300 mM sodium acetate, 10 mM Tris-HCl, 1 mM Na-EDTA, 50% glycerol is processed through a nebulizer (IPI Medical Products) with a stream of nitrogen adjusted to 35 Kpa for 2 minutes. The sonicated DNA is ethanol precipitated and redissolved in 500 μl TE buffer.

[0250] To create blunt-ends, a 100 μl aliquot of the resuspended DNA is digested with 5 units of BAL31 nuclease (New England BioLabs) for 10 min at 30° C. in 200 μl BAL31 buffer. The digested DNA is phenol-extracted, ethanol-precipitated, redissolved in 100 μl TE buffer, and then size-fractionated by electrophoresis through a 1.0% low melting temperature agarose gel. The section containing DNA fragments 1.6-2.0 kb in size is excised from the gel, and the LGT agarose is melted and the resulting solution is extracted with phenol to separate the agarose from the DNA. DNA is ethanol precipitated and redissolved in 20 μl of TE buffer for ligation to vector.

[0251] A two-step ligation procedure is used to produce a plasmid library with 97% inserts, of which >99% were single inserts. The first ligation mixture (50 ul) contains 2 μg of DNA fragments, 2 μg pUC18 DNA (Pharmacia) cut with SmaI and dephosphorylated with bacterial alkaline phosphatase, and 10 units of T4 ligase (GIBCO/BRL) and is incubated at 14° C. for 4 hr. The ligation mixture then is phenol extracted and ethanol precipitated, and the precipitated DNA is dissolved in 20 μl TE buffer and electrophoresed on a 1.0% low melting agarose gel. Discrete bands in a ladder are visualized by ethidium bromide-staining and UV illumination and identified by size as insert (1), vector (v), v+I, v+2i, v+3i, etc. The portion of the gel containing v+I DNA is excised and the v+I DNA is recovered and resuspended into 20 μl TE. The v+I DNA then is blunt-ended by T4 polymerase treatment for 5 min. at 37° C. in a reaction mixture (50 ul) containing the v+I linears, 500 μM each of the 4 dNTPs, and 9 units of T4 polymerase (New England BioLabs), under recommended buffer conditions. After phenol extraction and ethanol precipitation the repaired v+I linears are dissolved in 20 μl TE. The final ligation to produce circles is carried out in a 50 μl reaction containing 5 μl of v+I linears and 5 units of T4 ligase at 14° C. overnight. After 10 min. at 70° C. the following day, the reaction mixture is stored at −20° C.

[0252] This two-stage procedure results in a molecularly random collection of single-insert plasmid recombinants with minimal contamination from double-insert chimeras (<1%) or free vector (<3%).

[0253] Since deviation from randomness can arise from propagation the DNA in the host, E. coli host cells deficient in all recombination and restriction functions (A. Greener, Strategies 3 (1):5 (1990)) are used to prevent rearrangements, deletions, and loss of clones by restriction. Furthermore, transformed cells are plated directly on antibiotic diffusion plates to avoid the usual broth recovery phase which allows multiplication and selection of the most rapidly growing cells.

[0254] Plating is carried out as follows. A 100 μl aliquot of Epicurian Coli SURE II Supercompetent Cells (Stratagene 200152) is thawed on ice and transferred to a chilled Falcon 2059 tube on ice. A 1.7 μl aliquot of 1.42 M beta-mercaptoethanol is added to the aliquot of cells to a final concentration of 25 mM. Cells are incubated on ice for 10 min. A 1 μl aliquot of the final ligation is added to the cells and incubated on ice for 30 min. The cells are heat pulsed for 30 sec. at 42° C. and placed back on ice for 2 min. The outgrowth period in liquid culture is eliminated from this protocol in order to minimize the preferential growth of any given transformed cell. Instead the transformation mixture is plated directly on a nutrient rich SOB plate containing a 5 ml bottom layer of SOB agar (5% SOB agar: 20 g tryptone, 5 g yeast extract, 0.5 g NaCl, 1.5% Difco Agar per liter of media). The 5 ml bottom layer is supplemented with 0.4 ml of 50 mg/ml ampicillin per 100 ml SOB agar. The 15 ml top layer of SOB agar is supplemented with 1 ml X-Gal (2%), 1 ml MgCl2 (1 M), and 1 ml MgSO4/100 ml SOB agar. The 15 μl top layer is poured just prior to plating. Our titer is approximately 100 colonies/10 μl aliquot of transformation.

[0255] All colonies are picked for template preparation regardless of size. Thus, only clones lost due to “poison” DNA or deleterious gene products are deleted from the library, resulting in a slight increase in gap number over that expected.

[0256] 3. Random DNA Sequencing

[0257] High quality double stranded DNA plasmid templates are prepared using a “boiling bead” method developed in collaboration with Advanced Genetic Technology Corp. (Gaithersburg, Md.) (Adams et al., Science 252:1651 (1991); Adams et al., Nature 355:632 (1992)). Plasmid preparation is performed in a 96-well format for all stages of DNA preparation from bacterial growth through final DNA purification. Template concentration is determined using Hoechst Dye and a Millipore Cytofluor. DNA concentrations are not adjusted, but low-yielding templates are identified where possible and not sequenced.

[0258] Templates are also prepared from an Enterococcus faecalis lambda genomic library in the vector DASH II (Stratagene). In particular, Enterococcus faecalis DNA (>100 kb) is partially digested in a reaction mixture (200 ul) containing 50 μg DNA, 1× Sau3AI buffer, 20 units Sau3AI for 6 min. at 23° C. The digested DNA was phenol-extracted and fractionated by sucrose density gradient centrifugation. Fractions of the sucrose gradient containing 15 to 25 kb are recovered in a final volume of 6 ul. One μl of fragments is used with 1 μl of lambda DASHII vector (Stratagene) in the recommended ligation reaction. One μl of the ligation mixture is used per packaging reaction following the recommended protocol with the Gigapack II XL Packaging Extract (Stratagene, #227711). Phage are plated directly without amplification from the packaging mixture (after dilution with 500 μl of recommended SM buffer and chloroform treatment). Yield is about 2.5×10³ pfu/ul. An amplified library is prepared by infecting restructure NM539 host E. coli cells eitn approximately 1×10⁴ phage particles and recovering the progeny phages particles. The recovered phage is stored frozen in 7% dimethylsulfoxide. The phage titer is approximately 1×10⁹ pfu/ml.

[0259] For high throughput sequencing of individual lambda phage clones, liquid lysates (100 μl) are prepared from randomly selected plaques (from the unamplified library) and template is prepared by long-range PCR using T7 and T3 vector-specific primers.

[0260] Sequencing reactions are carried out on plasmid and/or PCR templates using the AB Catalyst LabStation with Applied Biosystems PRISM Ready Reaction Dye Primer Cycle Sequencing Kits for the M13 forward (M13-21) and the M13 reverse (M13RP1) primers (Adams et al., Nature 368:474 (1994)). Dye terminator sequencing reactions are carried out on the lambda templates on a Perkin-Elmer 9600 Thermocycler using the Applied Biosystems Ready Reaction Dye Terminator Cycle Sequencing kits. T7 and T3 primers are used to sequence the ends of the inserts from the Lambda DASH II library. Sequencing reactions are performed by eight individuals using an average of fourteen AB 373 DNA Sequencers per day. All sequencing reactions are analyzed using the Stretch modification of the AB 373, primarily using a 34 cm well-to-read distance. The overall sequencing success rate very approximately is about 85% for M13-21 and M13RP1 sequences and 65% for dye-terminator reactions. The average usable read length is 485 bp for M13-21 sequences, 445 bp for M13RP1 sequences, and 375 bp for dye-terminator reactions.

[0261] Richards et al., Chapter 28 in AUTOMATED DNA SEQUENCING AND ANALYSIS, M. D. Adams, C. Fields, J. C. Venter, Eds., Academic Press, London, (1994) described the value of using sequence from both ends of sequencing templates to facilitate ordering of contigs in shotgun assembly projects of lambda and cosmid clones. We balance the desirability of both-end sequencing (including the reduced cost of lower total number of templates) against shorter read-lengths for sequencing reactions performed with the M13RP1 (reverse) primer compared to the M13-21 (forward) primer. Approximately one-half of the templates are sequenced from both ends. Random reverse sequencing reactions are done based on successful forward sequencing reactions. Some M13RP1 sequences are obtained in a semi-directed fashion: M13-21: sequences pointing outward at the ends of contigs are chosen for M13RP1 sequencing in an effort to specifically order contigs.

[0262] 4. Protocol for Automated Cycle Sequencing

[0263] The sequencing was carried out using ABI Catalyst robots and AB 373 Automated DNA Sequencers. The Catalyst robot is a publicly available sophisticated pipetting and temperature control robot which has been developed specifically for DNA sequencing reactions. The Catalyst combines pre-aliquoted templates and reaction mixes consisting of deoxy- and dideoxynucleotides, the thermostable Taq DNA polymerase, fluorescently-labelled sequencing primers, and reaction buffer. Reaction mixes and templates are combined in the wells of an aluminum 96-well thermocycling plate. Thirty consecutive cycles of linear amplification (i.e.., one primer synthesis) steps are performed including denaturation, annealing of primer and template, and extension; i.e., DNA synthesis. A heated lid with rubber gaskets on the thermocycling plate prevents evaporation without the need for an oil overlay.

[0264] Two sequencing protocols are used: one for (lye-labelled primers and a second for dye-labelled dideoxy chain terminators. The shotgun sequencing involves use of four dye-labelled sequencing primers, one for each of the four terminator nucleotide. Each dye-primer is labelled with a different fluorescent dye, permitting the four individual reactions to be combined into one lane of the 373 DNA Sequencer for electrophoresis, detection, and base-calling. ABI currently supplies pre-mixed reaction mixes in bulk packages containing all the necessary non-template reagents for sequencing. Sequencing can be done with both plasmid and PCR-generated templates with both dye-primers and dye-terminators with approximately equal fidelity, although plasmid templates generally give longer usable sequences.

[0265] Thirty-two reactions are loaded per AB373 Sequencer each day, for a total of 960 samples. Electrophoresis is run overnight following the manufacturer's protocols, and the data is collected for twelve hours. Following electrophoresis and fluorescence detection, the ABI 373 performs automatic lane tracking and base-calling. The lane-tracking is confirmed visually. Each sequence electropherogram (or fluorescence lane trace) is inspected visually and assessed for quality. Trailing sequences of low quality are removed and the sequence itself is loaded via software to a Sybase database (archived daily to 8 mm tape). Leading vector polylinker sequence is removed automatically by a software program. Average edited lengths of sequences from the standard ABI 373 are around 400 bp and depend mostly on the quality of the template used for the sequencing reaction. ABI 373 Sequencers converted to Stretch Liners provide a longer electrophoresis path prior to fluorescence detection and increase the average number of usable bases to 500-600 bp.

[0266] Informatics

[0267] 1. Data Management

[0268] A number of information management systems for a large-scale sequencing lab have been developed. (For review see, for instance, Kerlavage et al., Proceedings of the Twenty-Sixth Annual Hawaii International Conference on System Sciences, IEEE Computer Society Press, Washington D.C., 585 (1993)) The system used to collect and assemble the sequence data was developed using the Sybase relational database management system and was designed to automate data flow wherever possible and to reduce user error. The database stores and correlates all information collected during the entire operation from template preparation to final analysis of the genome. Because the raw output of the ABI 373 Sequencers was based on a Macintosh platform and the data management system chosen is based on a Unix platform, it was necessary to design and implement a variety of multi-user, client-server applications which allow the raw data as well as analysis results to flow seamlessly into the database with a minimum of user effort.

[0269] 2. Assembly

[0270] An assembly engine (TIGR Assembler) developed for the rapid and accurate assembly of thousands of sequence fragments is employed to generate contigs. The TIGR assembler simultaneously clusters and assembles fragments of the genome. In order to obtain the speed necessary to assemble more than 104 fragments, the algorithm builds a hash table of 10 bp oligonucleotide subsequences to generate a list of potential sequence fragment overlaps. The number of potential overlaps for each fragment determines which fragments are likely to fall into repetitive elements. Beginning with a single seed sequence fragment, TIGR Assembler extends the current contig by attempting to add the best matching fragment based on oligonucleotide content. The contig and candidate fragment are aligned using a modified version of the Smith-Waterman algorithm which provides for optimal gapped alignments (Waterman, M. S., Methods in Enzymology 164:765 (1988)). The contig is extended by the fragment only if strict criteria for the quality of the match are met. The match criteria include the minimum length of overlap, the maximum length of an unmatched end, and the minimum percentage match. These criteria are automatically lowered by the algorithm in regions of minimal coverage and raised in regions with a possible repetitive element. The number of potential overlaps for each fragment determines which fragments are likely to fall into repetitive elements. Fragments representing the boundaries of repetitive elements and potentially chimeric fragments are often rejected based on partial mismatches at the ends of alignments and excluded from the current contig. TIGR Assembler is; designed to take advantage of clone size information coupled with sequencing from both ends of each template. It enforces the constraint that sequence fragments from two ends of the same template point toward one another in the contig and are located within a certain range of base pairs (definable for each clone based on the known clone size range for a given library).

[0271] The process resulted in 982 contigs as represented by SEQ ID NOs:1-982.

[0272] 3. Identifying Genes

[0273] The predicted coding regions of the Enterococcus faecalis genome were initially defined with the program GeneMark, which finds ORFs using a probabilistic classification technique. The predicted coding region sequences were used in searches against a database of all Enterococcus faecali nucleotide sequences front GenBank (March, 1997), using the BLASTN search method to identify overlaps of 50 or more nucleotides with at least a 95% identity. Those ORFs with nucleotide sequence matches are shown in Table 1. The ORFs without such matches were translated to protein sequences and compared to a non-redundant database of known proteins generated by combining the Swiss-prot, PIR and GenPept databases. ORFs that matched a database protein with BLASTP probability less than or equal to 0.01 are shown in Table 2. The table also lists assigned functions based on the closest match in the databases. ORFs that did not match protein or nucleotide sequences in the databases at these levels are shown in Table 3.

[0274] Illustrative Applications

[0275] 1. Production of an Antibody to a Enterococcus faecalis Protein

[0276] Substantially pure protein or polypeptide is isolated from the transfected or transformed cells using any one of the methods known in the art. The protein can also be produced in a recombinant prokaryotic expression system, such as E. coli, or can be chemically synthesized. Concentration of protein in the final preparation is adjusted, for example, by concentration on an Amicon filter device, to the level of a few micrograms/ml. Monoclonal or polyclonal antibody to the protein can then be prepared as follows.

[0277] 2. Monoclonal Antibody Production by Hybridoma Fusion

[0278] Monoclonal antibody to epitopes of any of the peptides identified and isolated as described can be prepared from murine hybridomas according to the classical method of Kohler, G. and Milstein, C., Nature 256:495 (1975) or modifications of the methods thereof. Briefly, a mouse is repetitively inoculated with a few micrograms of the selected protein over a period of a few weeks. The mouse is then sacrificed, and the antibody producing cells of the spleen isolated. The spleen cells are fused by means of polyethylene glycol with mouse myeloma cells, and the excess unfused cells destroyed by growth of the system on selective media comprising aminopterin (HAT media). The successfully fused cells are diluted and aliquots of the dilution placed in wells of a microtiter plate where growth of the culture is continued. Antibody-producing clones are identified by detection of antibody in the supernatant fluid of the wells by immunoassay procedures, such as ELISA, as originally described by Engvall, E., Meth. Enzymol. 70:419 (1980), and modified methods thereof. Selected positive clones can be expanded and their monoclonal antibody product harvested for use. Detailed procedures for monoclonal antibody production are described in Davis, L. et al., Basic Methods in Molecular Biology, Elsevier, New York. Section 21-2 (1989).

[0279] 3. Polyclonal Antibody Production by Immunization

[0280] Polyclonal antiserum containing antibodies to heterogenous epitopes of a single protein can be prepared by immunizing suitable animals with the expressed protein described above, which can be unmodified or modified to enhance immunogenicity. Effective polyclonal antibody production is affected by many factors related both to the antigen and the host species. For example, small molecules tend to be less immunogenic than others and may require the use of carriers and adjuvant. Also, host animals vary in response to site of inoculations and dose, with both inadequate or excessive doses of antigen resulting in low titer antisera. Small doses (ng level) of antigen administered at multiple intradermal sites appears to be most reliable. An effective immunization protocol for rabbits can be found in Vaitukaitis, J. et al., J. Clin. Endocrinol. Metab. 33:988-991 (1971).

[0281] Booster injections can be given at regular intervals, and antiserum harvested when antibody titer thereof, as determined semi-quantitatively, for example, by double immunodiffusion in agar against known concentrations of the antigen, begins to fall. See, for example, Ouchterlony, O. et al., Chap. 19 in: Handbook of Experimental Immunology, Wier, D., ed, Blackwell (1973). Plateau concentration of antibody is usually in the range of 0.1 to 0.2 mg/ml of serum (about 12M). Affinity of the antisera for the antigen is determined by preparing competitive binding curves, as described, for example, by Fisher, D., Chap. 42 in: Manual of Clinical Immunology, second edition, Rose and Friedman, eds., Amer. Soc. For Microbiology, Washington, D.C. (1980)

[0282] Antibody preparations prepared according to either protocol are useful in quantitative immunoassays which determine concentrations of antigen-bearing substances in biological samples; they are also used semi-quantitatively or qualitatively to identify the presence of antigen in a biological sample. In addition, antibodies are useful in various animal models of enterococcal disease as a means of evaluating the protein used to make the antibody as a potential vaccine target or as a means of evaluating the antibody as a potential immunotherapeutic or immunoprophylactic reagent.

[0283] 4. Preparation of PCR Primers and Amplification of DNA

[0284] Various fragments of the Enterococcus faecalis genome, such as those of Tables 1-3 and SEQ ID NOS:1-982 can be used, in accordance with the present invention, to prepare PCR primers for a variety of uses. The PCR primers are preferably at least 15 bases, and more preferably at least 18 bases in length. When selecting a primer sequence, it is preferred that the primer pairs have approximately the same G/C ratio, so that melting temperatures are approximately the same. The PCR primers and amplified DNA of this Example find use in the Examples that follow.

[0285] 5. Isolation of a Selected DNA Clone From the Deposited Sample of E. faecalis

[0286] Three approaches can be used to isolate a E. faecalis clone comprising a polynucleotide of the present invention from any E. faecalis genomic DNA library. The E. faecalis strain V586 has been deposited as a convenient source for obtaining a E. faecalis strain although a wide varity of strains E. faecalis strains can be used which are known in the art.

[0287] E. faecalis genomic DNA is prepared using the following method. A 20 ml overnight bacterial culture grown in a rich medium (e.g., Trypticase Soy Broth, Brain Heart Infusion broth or Super broth), pelleted, ished two times with TES (30 mM Tris-pH 8.0, 25 mM EDTA, 50 mM NaCl), and resuspended in 5 ml high salt TES (2.5M NaCl). Lysostaphin is added to final concentration of approx 50 ug/ml and the mixture is rotated slowly 1 hour at 37 C. to make protoplast cells. The solution is then placed in incubator (or place in a shaking water bath) and warmed to 55 C. Five hundred micro liter of 20% sarcosyl in TES (final concentration 2%) is then added to lyse the cells. Next, guanidine HCl is added to a final concentration of 7M (3.69 g in 5.5 ml). The mixture is swirled slowly at 55 C. for 60-90 min (solution should clear). A CsCl gradient is then set up in SW41 ultra clear tubes using 2.0 ml 5.7M CsCl and overlaying with 2.85M CsCl. The gradient is carefully overlayed with the DNA-containing GuHCl solution. The gradient is spun at 30,000 rpm, 20 C. for 24 hr and the lower DNA band is collected. The volume is increased to 5 ml with TE buffer. The DNA is then treated with protease K (10 ug/ml) overnight at 37 C., and precipitated with ethanol. The precipitated DNA is resuspended in a desired buffer.

[0288] In the first method, a plasmid is directly isolated by screening a plasmid E. faecalis genomic DNA library using a polynucleotide probe corresponding to a polynucleotide of the present invention. Particularly, a specific polynucleotide with 30-40 nucleotides is synthesized using an Applied Biosystems DNA synthesizer according to the sequence reported. The oligonucleotide is labeled, for instance, with ³²P-γ-ATP using T4 polynucleotide kinase and purified according to routine methods. (See, e.g., Maniatis et al., Molecular Cloning: A Laboratory Manual, Cold Spring Harbor Press, Cold Spring, N.Y. (1982).) The library is transformed into a suitable host, as indicated above (such as XL-1 Blue (Stratagene)) using techniques known to those of skill in the art. See, e.g., Sambrook et al. MOLECULAR CLONING: A LABORATORY MANUAL (Cold Spring Harbor, N.Y. 2nd ed. 1989); Ausubel et al., CURRENT PROTOCALS IN MOLECULAR BIOLOGY (John Wiley and Sons, N.Y. 1989). The transformants are plated on 1.5% agar plates (containing the appropriate selection agent, e.g., ampicillin) to a density of about 150 transformants (colonies) per plate. These plates are screened using Nylon membranes according to routine methods for bacterial colony screening. See, e.g., Sambrook et al. MOLECULAR CLONING: A LABORATORY MANUAL (Cold Spring Harbor, N.Y. 2nd ed. 1989); Ausubel et al., CURRENT PROTOCALS IN MOLECULAR BIOLOGY (John Wiley and Sons, N.Y. 1989) or other techniques known to those of skill in the art.

[0289] Alternatively, two primers of 15-25 nucleotides derived from the 5′ and 3′ ends of a polynucleotide of SEQ ID NOS:1-982 arc synthesized and used to amplify the desired DNA by PCR using a E. faecalis genomic DNA prep as a template. PCR is carried out under routine conditions, for instance, in 25 μl of reaction mixture with 0.5 ug of the above DNA template. A convenient reaction mixture is 1.5-5 mM MgCl₂, 0.01% (w/v) gelatin, 20 μM each of dATP, dCTP, dGTP, dTTP, 25 pmol of each primer and 0.25 Unit of Taq polymerase. Thirty five cycles of PCR (denaturation at 94° C. for 1 min. annealing at 55° C. for 1 min; elongation at 72° C. for 1 min) are performed with a Perkin-Elmer Cetus automated thermal cycler. The amplified product is analyzed by agarose gel electrophoresis and the DNA band with expected molecular weight is excised and purified. The PCR product is verified to be the selected sequence by subcloning and sequencing the DNA product.

[0290] Finally, overlapping oligos of the DNA sequences of SEQ ID NOS:1-982 can be chemically synthesized and used to generate a nucleotide sequence of desired length using PCR methods known in the art.

[0291] 6(a). Expression and Purification Enterococcal polypeptides in E. coli

[0292] The bacterial expression vector pQE60 was used for bacterial expression of some of the polypeptide fragements of the present invention which were used in the soft tissue and systemic infection models discussed below. (QIAGEN, Inc., 9259 Eton Avenue, Chatsworth, Calif., 91311). pQE60 encodes ampicillin antibiotic resistance (“Ampr”) and contains a bacterial origin of replication (“ori”), an IPTG inducible promoter, a ribosome binding site (“RBS”), six codons encoding histidine residues that allow affinity purification using nickel-nitrilo-tri-acetic acid (“Ni-NTA”) affinity resin (QIAGEN, Inc., supra) and suitable single restriction enzyme cleavage sites. These elements are arranged such that an inserted DNA fragment encoding a polypeptide expresses that polypeptide with the six His residues (i.e., a “6× His tag”) covalently linked to the carboxyl terminus of that polypeptide.

[0293] The DNA sequence encoding the desired portion of a E. faecalis protein of the present invention was amplified from E. faecalis genomic DNA using PCR oligonucleotide primers which anneal to the 5′ and 3′ sequences coding for the portions of the E. faecalis polynucleotide shown in SEQ ID NOS:1-982. Additional nucleotides containing restriction sites to facilitate cloning in the pQE60 vector are added to the 5′ and 3′ sequences, respectively.

[0294] For cloning the mature protein, the 5′ primer has a sequence containing an appropriate restriction site followed by nucleotides of the amino terminal coding sequence of the desired E. faecalis polynucleotide sequence in SEQ ID NOS:1-982. One of ordinary skill in the art would appreciate that the point in the protein coding sequence where the 5′ and 3′ primers begin may be varied to amplify a DNA segment encoding any desired portion of the complete protein shorter or longer than the mature form. The 3′ primer has a sequence containing an appropriate restriction site followed by nucleotides complementary to the 3′ end of the polypeptide coding sequence of SEQ ID NOS:1-982, excluding a stop codon, with the coding sequence aligned with the restriction site so as to maintain its reading frame with that of the six His codons in the pQE60 vector.

[0295] The amplified E. faecalis DNA fragment and the vector pQE60 were digested with restriction enzymes which recognize the sites in the primers and the digested DNAs were then ligated together. The E. faecalis DNA was inserted into the restricted pQE60 vector in a manner which places the E. faecalis protein coding region downstream from the IPTG-inducible promoter and in-frame with an initiating AUG and the six histidine codons.

[0296] The ligation mixture was transformed into competent E. coli cells using standard procedures such as those described by Sambrook et al., supra.. E. coli strain M15/rep4, containing multiple copies of the plasmid pREP4, which expresses the lac repressor and confers kanamycin resistance (“Kanr”), was used in carrying out the illustrative example described herein. This strain, which was only one of many that are suitable for expressing a E. faecalis polypeptide, is available commercially (QIAGEN, Inc., supra). Transformants were identified by their ability to grow on LB agar plates in the presence of ampicillin and kanamycin. Plasmid DNA was isolated from resistant colonies and the identity of the cloned DNA confirmed by restriction analysis, PCR and DNA sequencing.

[0297] Clones containing the desired constructs were grown overnight (“O/N”) in liquid culture in LB media supplemented with both ampicillin (100 μg/ml) and kanamycin (25 μg/ml). The O/N culture was used to inoculate a large culture, at a dilution of approximately 1:25 to 1:250. The cells were grown to an optical density at 600 nm (“OD600”) of between 0.4 and 0.6. Isopropyl-β-D-thiogalactopyranoside (“IPTG”) was then added to a final concentration of 1 mM to induce transcription from the lac repressor sensitive promoter, by inactivating the lacI repressor. Cells subsequently were incubated further for 3 to 4 hours. Cells then were harvested by centrifugation.

[0298] The cells were then stirred for 3-4 hours at 4° C. in 6M guanidine-HCl, pH 8. The cell debris was removed by centrifugation, and the supernatant containing the E. faecalis polypeptide was loaded onto a nickel-nitrilo-tri-acetic acid (“Ni-NTA”) affinity resin column (QIAGEN, Inc., supra). Proteins with a 6× His tag bind to the Ni-NTA resin with high affinity were purified in a simple one-step procedure (for details see: The QIAexpressionist, 1995, QIAGEN, Inc., supra). Briefly the supernatant was loaded onto the column in 6 M guanidine-HCl, pH 8, the column was first washed with 10 volumes of 6 M guanidine-HCl, pH 8, then washed with 10 volumes of 6 M guanidine-HCl pH 6, and finally the E. faecalis polypeptide was eluted with 6 M guanidine-HCl, pH 5.

[0299] The purified protein was then renatured by dialyzing it against phosphate-buffered saline (PBS) or 50 mM Na-acetate, pH 6 buffer plus 200 mM NaCl. Alternatively, the protein could be successfully refolded while immobilized on the Ni-NTA column. The recommended conditions are as follows: renature using a linear 6M-1M urea gradient in 500 mM NaCl, 20% glycerol, 20 mM Tris/HCl pH 7.4, containing protease inhibitors. The renaturation should be performed over a period of 1.5 hours or more. After renaturation the proteins can be eluted by the addition of 250 mM immidazole. Immidazole was removed by a final dialyzing step against PBS or 50 mM sodium acetate pH 6 buffer plus 200 mM NaCl. The purified protein was stored at 4° C. or frozen at −80° C.

[0300] Some of the polypeptide of the present invention were prepared using a non-denaturing protein purification method. For these polypeptides, the cell pellet from each liter of culture was resuspended in 25 mls of Lysis Buffer A at 4° C. (Lysis Buffer A=50 mM Na-phosphate, 300 mM NaCl, 10 mM 2-mercaptoethanol, 10% Glycerol, pH 7.5 with 1 tablet of Complete EDTA-free protease inhibitor cocktail (Boehringer Mannheim #1873580) per 50 ml of buffer). Absorbance at 550 nm was approximately 10-20 O.D./ml. The suspension was then put through three freeze/thaw cycles from −70° C. (using a ethanol-dry ice bath) up to room temperature. The cells were lysed via sonication in short 10 sec bursts over 3 minutes at approximately 80 W while kept on ice. The sonicated sample was then centrifuged at 15,000 RPM for 30 minutes at 4° C. The supernatant was passed through a column containing 1.0 ml of CL-4B resin to pre-clear the sample of any proteins that may bind to agarose non-specifically, and the flow-through fraction was collected.

[0301] The pre-cleared flow-through was applied to a nickel-nitrilo-tri-acetic acid (“Ni-NTA”) affinity resin column (Quiagen, Inc., supra). Proteins with a 6× His tag bind to the Ni-NTA resin with high affinity and can be purified in a simple one-step procedure. Briefly, the supernatant was loaded onto the column in Lysis Buffer A at 4° C., the column was first washed with 10 volumes of Lysis Buffer A until the A280 of the eluate returns to the baseline. Then, the column was washed with 5 volumes of 40 mM Imidazole (92% Lysis Buffer A/8% Buffer B) (Buffer B=50 mM Na-Phosphate, 300 mM NaCl, 10% Glycerol, 10 mM 2-mercaptoethanol, 500 mM Imidazole, pH of the final buffer should be 7.5). The protein was eluted off of the column with a series of increasing Imidazole solutions made by adjusting the ratios of Lysis Buffer A to Buffer B. Three different concentrations were used: 3 volumes of 75 mM Imidazole, 3 volumes of 150 mM Imidazole, 5 volumes of 500 mM Imidazole. The fractions containing the purified protein were analyzed using 8%, 10% or 14% SDS-PAGE depending on the protein size. The purified protein was then dialyzed 2× against phosphate-buffered saline (PBS) in order to place it into an easily workable buffer. The purified protein was stored at 4° C. or frozen at −80°.

[0302] The following alternative method may be used to purify E. faecalis expressed in E coli when it is present in the form of inclusion bodies. Unless otherwise specified, all of the following steps are conducted at 4-10° C.

[0303] Upon completion of the production phase of the E. coli fermentation, the cell culture is cooled to 4-10° C. and the cells are harvested by continuous centrifugation at 15,000 rpm (Heraeus Sepatech). On the basis of the expected yield of protein per unit weight of cell paste and the amount of purified protein required, an appropriate amount of cell paste, by weight, is suspended in a buffer solution containing 100 mM Tris, 50 mM EDTA, pH 7.4. The cells are dispersed to a homogereous suspension using a high shear mixer.

[0304] The cells are then lysed by passing the solution through a microfluidizer (Microfuidics, Corp. or APV Gaulin, Inc.) twice at 4000-6000 psi. The homogenate is then mixed with NaCl solution to a final concentration of 0.5 M NaCl, followed by centrifugation at 7000×g for 15 min. The resultant pellet is washed again using 0.5M NaCl, 100 mM Tris, 50 mM EDTA, pH 7.4.

[0305] The resulting washed inclusion bodies are solubilized with 1.5 M guanidine hydrochloride (GuHCl) for 2-4 hours. After 7000×g centrifugation for 15 min., the pellet is discarded and the E. faecalis polypeptide-containing supernatant is incubated at 4° C. overnight to allow further GuHCl extraction.

[0306] Following high speed centrifugation (30,000×g) to remove insoluble particles, the GuHCl solubilized protein is refolded by quickly mixing the GuHCl extract with 20 volumes of buffer containing 50 mM sodium, pH 4.5, 150 mM NaCl, 2 mM EDTA by vigorous stirring. The refolded diluted protein solution is kept at 4° C. without mixing for 12 hours prior to further purification steps.

[0307] To clarify the refolded E. faecalis polypeptide solution, a previously prepared tangential filtration unit equipped with 0.16 μm membrane filter with appropriate surface area (e.g., Filtron), equilibrated with 40 mM sodium acetate, pH 6.0 is employed. The filtered sample is loaded onto a cation exchange resin (e.g., Poros HS-50, Perseptive Biosystems). The column is washed with 40 mM sodium acetate, pH 6.0 and eluted with 250 mM, 500 mM, 1000 mM, and 1500 mM NaCl in the same buffer, in a stepwise manner. The absorbance at 280 mm of the effluent is continuously monitored. Fractions are collected and further analyzed by SDS-PAGE.

[0308] Fractions containing the E. faecalis polypeptide are then pooled and mixed with 4 volumes of water. The diluted sample is then loaded onto a previously prepared set of tandem columns of strong anion (Poros HQ-50, Perseptive Biosystems) and weak anion (Poros CM-20, Perseptive Biosystems) exchange resins. The columns are equilibrated with 40 mM sodium acetate, pH 6.0. Both columns are washed with 40 mM sodium acetate, pH 6.0, 200 mM NaCl. The CM-20 column is then eluted using a 10 column volume linear gradient ranging from 0.2 M NaCl, 50 mM sodium acetate, pH 6.0 to 1.0 M NaCl, 50 mM sodium acetate, pH 6.5. Fractions are collected under constant A₂₈₀ monitoring of the effluent. Fractions containing the E. faecalis polypeptide (determined, for instance, by 16% SDS-PAGE) are then pooled.

[0309] The resultant E. faecalis polypeptide exhibits greater than 95% purity after the above refolding and purification steps. No major contaminant bands are observed from Commassie blue stained 16% SDS-PAGE gel when 5 μg of purified protein is loaded. The purified protein is also tested for endotoxin/LPS contamination, and typically the LPS content is less than 0.1 ng/ml according to LAL assays.

[0310] 6(b). Alternative Expression and Purification Enterococcal Polypeptides in E. coli

[0311] The vector pQE10 was alternatively used to clone and express some of the polypeptides of the present invention for use in the soft tissue and systemic infection models discussed below. The difference being such that an inserted DNA fragment encoding a polypeptide expresses that polypeptide with the six His residues (i.e., a “6× His tag”) covalently linked to the amino terminus of that polypeptide. The bacterial expression vector pQE10 (QIAGEN, Inc., 9259 Eton Avenue, Chatsworth, Calif., 91311) was used in this example. The components of the pQE10 plasmid are arranged such that the inserted DNA sequence encoding a polypeptide of the present invention expresses the polypeptide with the six His residues (i.e., a “6× His tag”)) covalently linked to the amino terminus.

[0312] The DNA sequences encoding the desired portions of a polypeptide of SEQ ID NOS:1-982 were amplified using PCR oligonucleotide primers from genomic E. faecalis DNA. The PCR primers anneal to the nucleotide sequences encoding the desired amino acid sequence of a polypeptide of the present invention. Additional nucleotides containing restriction sites to facilitate cloning in the pQE10 vector were added to the 5′ and 3′ primer sequences, respectively.

[0313] For cloning a polypeptide of the present invention, the 5′ and 3′ primers were selected to amplify their respective nucleotide coding sequences. One of ordinary skill in the art would appreciate that the point in the protein coding sequence where the 5′ and 3′ primers begins may be varied to amplify a DNA segment encoding any desired portion of a polypeptide of the present invention. The 5′ primer was designed so the coding sequence of the 6× His tag is aligned with the restriction site so as to maintain its reading frame with that of E. faecalis polypeptide. The 3′ was designed to include an stop codon. The amplified DNA fragment was then cloned, and the protein expressed, as described above for the pQE60 plasmid.

[0314] The DNA sequences encoding the amino acid sequences of SEQ ID NOS:1-982 may also be cloned and expressed as fusion proteins by a protocol similar to that described directly above, wherein the pET-32b(+) vector (Novagen, 601 Science Drive, Madison, Wis. 53711) is preferentially used in place of pQE10.

[0315] The above methods are not limited to the polypeptide fragements actually produced. The above method, like the methods below, can be used to produce either full length polypeptides or desired fragements therof.

[0316] 6(c). Alternative Expression and Purification of Enterococcal Polypeptides in E. coli

[0317] The bacterial expression vector pQE60 is used for bacterial expression in this example (QIAGEN, Inc., 9259 Eton Avenue, Chatsworth, Calif., 91311). However, in this example, the polypeptide coding sequence is inserted such that translation of the six His codons is prevented and, therefore, the polypeptide is produced with no 6× His tag.

[0318] The DNA sequence encoding the desired portion of the E. faecalis amino acid sequence is amplified from an E. faecalis genomic DNA prep the deposited DNA clones using PCR oligonucleotide primers which anneal to the 5′ and 3′ nucleotide sequences corresponding to the desired portion of the E. faecalis polypeptides. Additional nucleotides containing restriction sites to facilitate cloning in the pQE60 vector are added to the 5′ and 3′ primer sequences.

[0319] For cloning a E. faecalis polypeptides of the present invention, 5′ and 3′ primers are selected to amplify their respective nucleotide coding sequences. One of ordinary skill in the art would appreciate that the point in the protein coding sequence where the 5′ and 3′ primers begin may be varied to amplify a DNA segment encoding any desired portion of a polypeptide of the present invention. The 3′ and 5′ primers contain appropriate restriction sites followed by nucleotides complementary to the 5′ and 3′ ends of the coding sequence respectively. The 3′ primer is additionally designed to include an in-frame stop codon.

[0320] The amplified E. faecalis DNA fragments and the vector pQE60 are digested with restriction enzymes recognizing the sites in the primers and the digested DNAs are then ligated together. Insertion of the E. faecalis DNA into the restricted pQE60 vector places the E. faecalis protein coding region including its associated stop codon downstream from the IPTG-inducible promoter and in-frame with an initiating AUG. The associated stop codon prevents translation of the six histidine codons downstream of the insertion point.

[0321] The ligation mixture is transformed into competent E. coli cells using standard procedures such as those described by Sambrook et al. E. coli strain M15/rep4, containing multiple copies of the plasmid pREP4, which expresses the lac repressor and confers kanamycin resistance (“Kanr”), is used in carrying out the illustrative example described herein. This strain, which is only one of many that are suitable for expressing E. faecalis polypeptide, is available commercially (QIAGEN, Inc., supra). Transformants are identified by their ability to grow on LB plates in the presence of ampicillin and kanamycin. Plasmid DNA is isolated from resistant colonies and the identity of the cloned DNA confirmed by restriction analysis, PCR and DNA sequencing.

[0322] Clones containing the desired constructs are grown overnight (“O/N”) in liquid culture in LB media supplemented with both ampicillin (100 μg/ml) and kanamycin (25 μg/ml). The O/N culture is used to inoculate a large culture, at a dilution of approximately 1:25 to 1:250. The cells are grown to an optical density at 600 nm (“OD600”) of between 0.4 and 0.6. isopropyl-b-D-thiogalactopyranoside (“IPTG”) is then added to a final concentration of 1 mM to induce transcription from the lac repressor sensitive promoter, by inactivating the lacI repressor. Cells subsequently are incubated further for 3 to 4 hours. Cells then are harvested by centrifugation.

[0323] To purify the E. faecalis polypeptide, the cells are then stirred for 3-4 hours at 4° C. in 6M guanidine-HCl, pH 8. The cell debris is removed by centrifugation, and the supernatant containing the E. faecalis polypeptide is dialyzed against 50 mM Na-acetate buffer pH 6, supplemented with 200 mM NaCl. Alternatively, the protein can be successfully refolded by dialyzing it against 500 mM NaCl, 20% glycerol, 25 mM Tris/HCl pH 7.4, containing protease inhibitors. After renaturation the protein can be purified by ion exchange, hydrophobic interaction and size exclusion chromatography. Alternatively, an affinity chromatography step such as an antibody column can be used to obtain pure E. faecalis polypeptide. The purified protein is stored at 4° C. or frozen at −80° C.

[0324] The following alternative method may be used to purify E. faecalis polypeptides expressed in E coli when it is present in the form of inclusion bodies. Unless otherwise specified, all of the following steps are conducted at 4-10° C.

[0325] Upon completion of the production phase of the E. coli fermentation, the cell culture is cooled to 4-10 ° C. and the cells are harvested by continuous centrifugation at 15,000 rpm (Heracus Sepatech). On the basis of the expected yield of protein per unit weight of cell paste and the amount of purified protein required, an appropriate amount of cell paste, by weight, is suspended in a buffer solution containing 100 mM Tris, 50 mM EDTA, pH 7.4. The cells are dispersed to a homogeneous suspension using a high shear mixer.

[0326] The cells ware then lysed by passing the solution through a microfluidizer (Microfuidics, Corp. or APV Gaulin, Inc.) twice at 4000-6000 psi. The homogenate is then mixed with NaCl solution to a final concentration of 0.5 M NaCl, followed by centrifugation at 7000×g for 15 min. The resultant pellet is washed again using 0.5M NaCl, 100 mM Tris, 50 mM EDTA, pH 7.4.

[0327] The resulting washed inclusion bodies are solubilized with 1.5 M guanidine hydrochloride (GuHCl) for 2-4 hours. After 7000×g centrifugation for 15 min., the pellet is discarded and the E. faecalis polypeptide-containing supernatant is incubated at 4° C. overnight to allow further GuHCl extraction.

[0328] Following high speed centrifugation (30,000×g) to remove insoluble particles, the GuHCl solubilized protein is refolded by quickly mixing the GuHCl extract with 20 volumes of buffer containing 50 mM sodium, pH 4.5, 150 mM NaCl, 2 mM EDTA by vigorous stirring. The refolded diluted protein solution is kept at 4° C. without mixing for 12 hours prior to further purification steps.

[0329] To clarify the refolded E. faecalis polypeptide solution, a previously prepared tangential filtration unit equipped with 0.16 μm membrane filter with appropriate surface area (e.g., Filtron), equilibrated with 40 mM sodium acetate, pH 6.0 is employed. The filtered sample is loaded onto a cation exchange resin (e.g., Poros HS-50, Perseptive Biosystems). The column is washed with 40 mM sodium acetate, pH 6.0 and eluted with 250 mM, 500 mM, 1000 mM, and 1500 mM NaCl in the same buffer, in a stepwise manner. The absorbance at 280 mm of the effluent is continuously monitored. Fractions are collected and further analyzed by SDS-PAGE.

[0330] Fractions containing the E. faecalis polypeptide are then pooled and mixed with 4 volumes of water. The diluted sample is then loaded onto a previously prepared set of tandem columns of strong anion (Poros HQ-50, Perseptive Biosystems) and weak anion (Poros CM-20, Perseptive Biosystems) exchange resins. The columns are equilibrated with 40 mM sodium acetate, pH 6.0. Both columns are washed with 40 mM sodium acetate, pH 6.0, 200 mM NaCl. The CM-20 column is then eluted using a 10 column volume linear gradient ranging from 0.2 M NaCl, 50 mM sodium acetate, pH 6.0 to 1.0 M NaCl, 50 mM sodium acetate, pH 6.5. Fractions are collected under constant A₂₈₀ monitoring of the effluent. Fractions containing the E. faecalis polypeptide (determined, for instance, by 16% SDS-PAGE) are then pooled.

[0331] The resultant E. faecalis polypeptide exhibits greater than 95% purity after the above refolding and purification steps. No major contaminant bands are observed from Commassie blue stained 16% SDS-PAGE gel when 5 μg of purified protein is loaded. The purified protein is also tested for endotoxin/LPS contamination, and typically the LPS content is less than 0.1 ng/ml according to LAL assays.

[0332] 6(d). Cloning and Expression of E. faecalis in Other Bacteria

[0333] E. faecalis polypeptides can also be produced in: E. faecalis using the methods of S. Skinner et al., (1988) Mol. Microbiol. 2:289-297 or J. I. Moreno (1996) Protein Expr. Purif. 8(3):332-340; Lactobacillus using the methods of C. Rush et al., 1997 Appl. Microbiol. Biotechnol. 47(5):537-542; or in Bacillus subtilis using the methods Chang et al., U.S. Pat. No. 4,952,508.

[0334] 7. Cloning and Expression in COS Cells

[0335] A E. faecalis expression plasmid is made by cloning a portion of the DNA encoding a E. faecalis polypeptide into the expression vector pDNAI/Amp or pDNAIII (which can be obtained from Invitrogen, Inc.). The expression vector pDNAI/amp contains: (1) an E. coli origin of replication effective for propagation in E. coli and other prokaryotic cells; (2) an ampicillin resistance gene for selection of plasmid-containing prokaryotic cells; (3) an SV40 origin of replication for propagation in eukaryotic cells; (4) a CMV promoter, a polylinker, an SV40 intron; (5) several codons encoding a hemagglutinin fragment (i.e., an “HA” tag to facilitate purification) followed by a termination codon and polyadenylation signal arranged so that a DNA can be conveniently placed under expression control of the CMV promoter and operably linked to the SV40 intron and the polyadenylation signal by means of restriction sites in the polylinker. The HA tag corresponds to an epitope derived from the influenza hemagglutinin protein described by Wilson et al. 1984 Cell 37:767. The fusion of the HA tag to the target protein allows easy detection and recovery of the recombinant protein with an antibody that recognizes the HA epitope. pDNAIII contains, in addition, the selectable neomycin marker.

[0336] A DNA fragment encoding a E. faecalis polypeptide is cloned into the polylinker region of the vector so that recombinant protein expression is directed by the CMV promoter. The plasmid construction strategy is as follows. The DNA from a E. faecalis genomic DNA prep is amplified using primers that contain convenient restriction sites, much as described above for construction of vectors for expression of E. faecalis in E. coli. The 5′ primer contains a Kozak sequence, an AUG start codon, and nucleotides of the 5′ coding region of the E. faecalis polypeptide. The 3′ primer, contains nucleotides complementary to the 3′ coding sequence of the E. faecalis DNA, a stop codon, and a convenient restriction site.

[0337] The PCR amplified DNA fragment and the vector, pDNAI/Amp, are digested with appropriate restriction enzymes and then ligated. The ligation mixture is transformed into an appropriate E. coli strain such as SURE™ (Stratagene Cloning Systems, La Jolla, Calif. 92037), and the transformed culture is plated on ampicillin media plates which then are incubated to allow growth of ampicillin resistant colonies. Plasmid DNA is isolated from resistant colonies and examined by restriction analysis or other means for the presence of the fragment encoding the E. faecalis polypeptide

[0338] For expression of a recombinant E. faecalis polypeptide, COS cells are transfected with an expression vector, as described above, using DEAE-dextran, as described, for instance, by Sambrook et al. (supra). Cells are incubated under conditions for expression of E. faecalis by the vector.

[0339] Expression of the E. faecalis-HA fusion protein is detected by radiolabeling and immunoprecipitation, using methods described in, for example Harlow et al., supra.. To this end, two days after transfection, the cells are labeled by incubation in media containing ³⁵S-cysteine for 8 hours. The cells and the media are collected, and the cells are washed and the lysed with detergent-containing RIPA buffer: 150 mM NaCl, 1% NP-40, 0.1% SDS, 1% NP-40, 0.5% DOC, 50 mM TRIS, pH 7.5, as described by Wilson et al. (supra ). Proteins are precipitated from the cell lysate and from the culture media using an HA-specific monoclonal antibody. The precipitated proteins then are analyzed by SDS-PAGE and autoradiography. An expression product of the expected size is seen in the cell lysate, which is not seen in negative controls.

[0340] 8. Cloning and Expression in CHO Cells

[0341] The vector pC4 is used for the expression of E. faecalis polypeptide in this example. Plasmid pC4 is a derivative of the plasmid pSV2-dhfr (ATCC Accession No. 37146). The plasmid contains the mouse DHFR gene under control of the SV40 early promoter. Chinese hamster ovary cells or other cells lacking dihydrofolate activity that are transfected with these plasmids can be selected by growing the cells in a selective medium (alpha minus MEM, Life Technologies) supplemented with the chemotherapeutic agent methotrexate. The amplification of the DHFR genes in cells resistant to methotrexate (MTX) has been well documented. See, e.g., Alt et al., 1978, J. Biol. Chem. 253:1357-1370; Hamlin et al., 1990, Biochem. et Biophys. Acta, 1097:107-143; Page et al., 1991, Biotechnology 9:64-68. Cells grown in increasing concentrations of MTX develop resistance to the drug by overproducing the target enzyme, DHFR, as a result of amplification of the DHFR gene. If a second gene is linked to the DHFR gene, it is usually co-amplified and over-expressed. It is known in the art that this approach may be used to develop cell lines carrying more than 1,000 copies of the amplified gene(s). Subsequently, when the methotrexate is withdrawn, cell lines are obtained which contain the amplified gene integrated into one or more chromosome(s) of the host cell.

[0342] Plasmid pC4 contains the strong promoter of the long terminal repeat (LTR) of the Rouse Sarcoma Virus, for expressing a polypeptide of interest, Cullen, et al. (1985) Mol. Cell. Biol. 5:438-447; plus a fragment isolated from the enhancer of the immediate early gene of human cytomegalovirus (CMV), Boshart, et al., 1985, Cell 41:521-530. Downstream of the promoter are the following single restriction enzyme cleavage sites that allow the integration of the genes: Bam HI, Xba I, and Asp 718. Behind these cloning sites the plasmid contains the 3′ intron and polyadenylation site of the rat preproinsulin gene. Other high efficiency promoters can also be used for the expression, e.g., the human β-actin promoter, the SV40 early or late promoters or the long terminal repeats from other retroviruses, e.g., HIV and HTLVI. Clontech's Tet-Off and Tet-On gene expression systems and similar systems can be used to express the E. faecalis polypeptide in a regulated way in mammalian cells (Gossen et al., 1992, Proc. Natl. Acad. Sci. USA 89:5547-5551. For the polyadenylation of the mRNA other signals, e.g., from the human growth hormone or globin genes can be used as well. Stable cell lines carrying a gene of interest integrated into the chromosomes can also be selected upon co-transfection with a selectable marker such as gpt, G418 or hygromycin. It is advantageous to use more than one selectable marker in the beginning, e.g., G418 plus methotrexate.

[0343] The plasmid pC4 is digested with the restriction enzymes and then dephosphorylated using calf intestinal phosphates by procedures known in the art. The vector is then isolated from a 1% agarose gel. The DNA sequence encoding the E. faecalis polypeptide is amplified using PCR oligonucleotide primers corresponding to the 5′ and 3′ sequences of the desired portion of the gene. A 5′ primer containing a restriction site, a Kozak sequence, an AUG start codon, and nucleotides of the 5′ coding region of the E. faecalis polypeptide is synthesized and used. A 3′ primer, containing a restriction site, stop codon, and nucleotides complementary to the 3′ coding sequence of the E. faecalis polypeptides is synthesized and used. The amplified fragment is digested with the restriction endonucleases and then purified again on a 1% agarose gel. The isolated fragment and the dephosphorylated vector are then ligated with T4 DNA ligase. E. coli HB101 or XL-1 Blue cells are then transformed and bacteria are identified that contain the fragment inserted into plasmid pC4 using, for instance, restriction enzyme analysis.

[0344] Chinese hamster ovary cells lacking an active DHFR gene are used for transfection. Five μg of the expression plasmid pC4 is cotransfected with 0.5 μg of the plasmid pSVneo using a lipid-mediated transfection agent such as Lipofectin™ or LipofectAMINE.™ (LifeTechnologies Gaithersburg, Md.). The plasmid pSV2-neo contains a dominant selectable marker, the neo gene from Tn5 encoding an enzyme that confers resistance to a group of antibiotics including G418. The cells are seeded in alpha minus MEM supplemented with 1 mg/ml G418. After 2 days, the cells are trypsinized and seeded in hybridoma cloning plates (Greiner, Germany) in alpha minus MEM supplemented with 10, 25, or 50 ng/ml of methotrexate plus 1 mg/ml G418. After about 10-14 days single clones are trypsinized and then seeded in 6-well petri dishes or 10 ml flasks using different concentrations of methotrexate (50 nM, 100 nM, 200 nM, 400 nM, 800 nM). Clones growing at the highest concentrations of methotrexate are then transferred to new 6-well plates containing even higher concentrations of methotrexate (1 μM, 2 μM, 5 μM, 10 mM, 20 mM). The same procedure is repeated until clones are obtained which grow at a concentration of 100-200 μM. Expression of the desired gene product is analyzed, for instance, by SDS-PAGE and Western blot or by reversed phase HPLC analysis.

[0345] 9. Quantitative Murine Soft Tissue Infection Model for E. faecalis

[0346] Compositions of the present invention, including polypeptides and peptides, are assayed for their ability to function as vaccines or to enhance/stimulate an immune response to a bacterial species (e.g., E. faecalis) using the following quantitative murine soft tissue infection model. Mice (e.g., NIH Swiss female mice, approximately 7 weeks old) are first treated with a biologically protective effective amount, or immune enhancing/stimulating effective amount of a composition of the present invention using methods known in the art, such as those discussed above. See, e.g., Harlow et al., ANTIBODIES: A LABORATORY MANUAL, (Cold Spring Harbor Laboratory Press, 2nd ed. 1988). An example of an appropriate starting dose is 20 ug per animal.

[0347] The desired bacterial species used to challenge the mice, such as E. faecalis, is grown as an overnight culture. The culture is diluted to a concentration of 5×10⁸ cfu/ml, in an appropriate media, mixed well, serially diluted, and titered. The desired doses are further diliuted 1:2 with sterilized Cytodex 3 microcarrier beads preswollen in sterile PBS (3 g/100 ml). Mice are anesthetize briefly until docile, but still mobile and injected with 0.2 ml of the Cytodex 3 bead/bacterial mixture into each animal subcutaneously in the inguinal region. After four days, counting the day of injection as day one, mice are sacrificed and the contents of the abscess is excised and placed in a 15 ml conical tube containing 1.0 ml of sterile PBS. The contents of the abscess is then enzymatically treated and plated as follows.

[0348] The abscess is first disrupted by vortexing with sterilized glass beads placed in the tubes. 3.0 mls of prepared enzyme mixture (1.0 ml Collagenase D (4.0 mg/ml), 1.0 ml Trypsin (6.0 mg/ml) and 8.0 mls PBS) is then added to each tube followed by a 20 min. incubation at 37 C. The solution is then centrifuged and the supernatant drawn off. 0.5 ml dH20 is then added and the tubes are vortexed and then incubated for 10 min. at room temperature. 0.5 ml media is then added and samples are serially diluted and plated onto agar plates, and grown overnight at 37 C. Plates with distinct and separate colonies are then counted, compared to positive and negative control samples, and quantified. The method can be used to identify composition and determine appropriate and effective doses for humans and other animals by comparing the effective doses of compositions of the present invention with compositions known in the art to be effective in both mice and humans. Doses for the effective treatment of humans and other animals, using compositions of the present invention, are extrapolated using the data from the above experiments of mice. It is appreciated that further studies in humans and other animals may be needed to determine the most effective doses using methods of clinical practice known in the art.

[0349] 10. Murine Systemic Neutropenic Model for E. faecalis Infection Compositions of the present invention, including polypeptides and peptides, are assayed for their ability to function as vaccines or to enhance/stimulate an immune response to a bacterial species (e.g., E. faecalis) using the following qualitative murine systemic neutropenic model. Mice (e.g., NIH Swiss female mice, approximately 7 weeks old) are first treated with a biologically protective effective amount, or immune enhancing/stimulating effective amount of a composition of the present invention using methods known in the art, such as those discussed above. See, e.g., Harlow et al., ANTIBODIES: A LABORATORY MANUAL, (Cold Spring Harbor Laboratory Press, 2nd ed. 1988). An example of an appropriate starting dose is 20 ug per animal. Mice are then injected with 250-300 mg/kg cyclophosphamide intraperitonially. Counting the day of C.P. injection as day one, the mice are left untreated for 5 days to begin recovery of PMNL'S.

[0350] The desired bacterial species used to challenge the mice, such as E. faecalis, is grown as an overnight culture. The culture is diluted to a concentration of 5×10⁸ cfu/ml, in an appropriate media, mixed well, serially diluted, and titered. The desired doses are further diliuted 1:2 in 4% Brewer's yeast in media. Mice are injected with the bacteria/brewer's yeast challenge intraperitonially. The Brewer's yeast solution alone is used as a control. The mice are then monitered twice daily for the first week following challenge, and once a day for the next week to ascertain morbidity and mortality. Mice remaining at the end of the experiment are sacrificed. The method can be used to identify compositions and determine appropriate and effective doses for humans and other animals by comparing the effective doses of compositions of the present invention with compositions known in the art to be effective in both mice and humans. Doses for the effective treatment of humans and other animals, using compositions of the present invention, are extrapolated using the data from the above experiments of mice. It is appreciated that further studies in humans and other animals may be needed to determine the most effective doses using methods of clinical practice known in the art.

[0351] The disclosure of all publications (including patents, patent applications, journal articles, laboratory manuals, books, or other documents) cited herein are hereby incorporated by reference in their entireties.

[0352] The present invention is not to be limited in scope by the specific embodiments described herein, which are intended as single illustrations of individual aspects of the invention. Functionally equivalent methods and components are within the scope of the invention, in addition to those shown and described herein and will become apparant to those skilled in the art from the foregoing description and accompanying drawings. Such modifications are intended to fall within the scope of the appended claims.

TABLE 1
E. faecalis-Coding regions containing known sequences

| Contig | Orf | Start | Stop | | | Percent | HSP nt |
|---|---|---|---|---|---|---|---|
| ID | ID | (nt) | (nt) | Match Accession | Match Gene Name | Indent | length |
| 3 | 2 | 423 | 1226 | gb\|U24692\| | “Enterococcus faecalis pyrimidine | 99 | 229 |
| | | | | | biosynthesis D (pyrD) gene, complete cds” | | |
| 47 | 14 | 17085 | 16216 | gb\|M81466\| | “Enterococcus faecalis RecA protein (recA) | 98 | 308 |
| | | | | | gene, partial cds” | | |
| 52 | 1 | 50 | 1441 | emb\|X62755\|SFNPRG | S.faecalis npr gene for NADH peroxidase | 98 | 1374 |
| 52 | 2 | 2456 | 1494 | emb\|X62755\|SFNPRG | S.faecalis npr gene for NADH peroxidase | 100 | 209 |
| 61 | 1 | 2 | 358 | gb\|U35369\| | “Enterococcus faecalis vancomycin | 99 | 318 |
| | | | | | resistance genes, response regulator | | |
| | | | | | (vanRB), protein histidine kinase (vanSB), | | |
| | | | | | D,D-carboxypeptidase (vanYB), putative D- | | |
| | | | | | 2-hydroxyacid dehydrogenase (vanHB), D- | | |
| | | | | | Ala:D-Lac ligase (vanB), and putative D,D- | | |
| | | | | | dipeptidase (vanX>” | | |
| 61 | 2 | 467 | 1975 | gb\|U35369\| | “Enterococcus faecalis vancomycin | 98 | 1297 |
| | | | | | resistance genes, response regulator | | |
| | | | | | (vanRB), protein histidine kinase (vanSB), | | |
| | | | | | D,D-carboxypeptidase (vanYB), putative D- | | |
| | | | | | 2-hydroxyacid dehydrogenase (vanHB), D- | | |
| | | | | | Ala:D-Lac ligase (vanB), and putative D,D- | | |
| | | | | | dipeptidase (vanX>” | | |
| 61 | 3 | 1749 | 1967 | gb\|U35369\| | “Enterococcus faecalis vancomycin | 100 | 136 |
| | | | | | resistance genes, response regulator | | |
| | | | | | (vanRB), protein histidine kinase (vanSB), | | |
| | | | | | D,D-carboxypeptidase (vanYB), putative D- | | |
| | | | | | 2-hydroxyacid dehydrogenase (vanHB), | | |
| | | | | | Ala:D-Lac ligase (vanB), and putative D,D- | | |
| | | | | | dipeptidase (vanX>” | | |
| 61 | 4 | 1990 | 2949 | gb\|U35369\| | “Enterococcus faecalis vancomycin | 100 | 960 |
| | | | | | resistance genes, response regulator | | |
| | | | | | (vanRB), protein histidine kinase (vanSB), | | |
| | | | | | D,D-carboxypeptidase (vanYB), putative D- | | |
| | | | | | 2-hydroxyacid dehydrogenase (vanHB), D | | |
| | | | | | Ala:D-Lac ligase (vanB), and putative D,D- | | |
| | | | | | dipeptidase (vanX>” | | |
| 61 | 5 | 2112 | 2399 | gb\|U35369\| | “Enterococcus faecalis vancomycin | 100 | 288 |
| | | | | | resistance genes, response regulator | | |
| | | | | | (vanRB), protein histidine kinase (vanSB), | | |
| | | | | | D,D-carboxypeptidase (vanYB), putative D- | | |
| | | | | | 2-hydroxyacid dehydrogenase (vanHB), D- | | |
| | | | | | Ala:D-Lac ligase (vanB), and putative D,D- | | |
| | | | | | dipeptidase (vanX>” | | |
| 61 | 6 | 2922 | 3794 | gb\|U35369\| | “Enterococcus faecalis vancomycin | 100 | 873 |
| | | | | | resistance genes, response regulator | | |
| | | | | | (vanRB), protein histidine kinase (vanSB), | | |
| | | | | | D,D-carboxypeptidase (vanYB), putative D- | | |
| | | | | | 2-hydroxyacid dehydrogenase (vanHB), D- | | |
| | | | | | Ala:D-Lac ligase (vanB), and putative D,D- | | |
| | | | | | dipeptidase (vanX>” | | |
| 61 | 7 | 3671 | 4762 | gb\|U35369\| | “Enterococcus faecalis vancomycin | 99 | 1092 |
| | | | | | resistance genes, response regulator | | |
| | | | | | (vanRB), protein histidine kinase (vanSB), | | |
| | | | | | D,D-carboxypeptidase (vanYB), putative D- | | |
| | | | | | 2-hydroxyacid dehydrogenase (vanHB), D- | | |
| | | | | | Ala:D-Lac ligase (vanB), and putative D,D- | | |
| | | | | | dipeptidase (vanX>” | | |
| 61 | 8 | 4312 | 3860 | gb\|U35369\| | “Enterococcus faecalis vancomycin | 100 | 453 |
| | | | | | resistance genes, response regulator | | |
| | | | | | (vanRB), protein histidine kinase (vanSB), | | |
| | | | | | D,D-carboxypeptidase (vanYB), putative D- | | |
| | | | | | 2-hydroxyacid dehydrogenase (vanHB), D- | | |
| | | | | | Ala:D-Lac ligase (vanB), and putative D,D- | | |
| | | | | | dipeptidase (vanX>” | | |
| 61 | 9 | 4653 | 5783 | gb\|U35369\| | “Enterococcus faecalis vancomycin | 100 | 1131 |
| | | | | | resistance genes, response regulator | | |
| | | | | | (vanRB), protein histidine kinase (vanSB), | | |
| | | | | | D,D-carboxypeptidase (vanYB), putative D- | | |
| | | | | | 2-hydroxyacid dehydrogenase (vanHB), D- | | |
| | | | | | Ala:D-Lac ligase (vanB), and putative D,D- | | |
| | | | | | dipeptidase (vanX>” | | |
| 61 | 10 | 5750 | 6397 | gb\|U35369\| | “Enterococcus faecalis vancomyc2-fl | 99 | 648 |
| | | | | | resistance genes, response regulator | | |
| | | | | | (vanRB), protein histidine kinase (vanSB), | | |
| | | | | | D,D-carboxypeptidase (vanYB), putative D- | | |
| | | | | | 2-hydroxyacid dehydrogenase (vanHB), D- | | |
| | | | | | Ala:D-Lac ligase (vanB), and putative D,D- | | |
| | | | | | dipeptidase (vanX>” | | |
| 61 | 11 | 7158 | 6784 | gb\|U35369\| | “Enterococcus faecalis vancomycin | 100 | 161 |
| | | | | | resistance genes, response regulator | | |
| | | | | | (vanRB), protein histidine kinase (vanSB), | | |
| | | | | | D,D-carboxypeptidase (vanYB), putative D- | | |
| | | | | | 2-hydroxyacid dehydrogenase (vanHB), D- | | |
| | | | | | Ala:D-Lac ligase (vanB), and putative D,D- | | |
| | | | | | dipeptidase (vanX>” | | |
| 67 | 1 | 3 | 809 | gb\|U24692” | “Enterococcus faecalis pyrimidine | 98 | 807 |
| | | | | | biosynthesis D (pyrD) gene, complete cds” | | |
| 67 | 2 | 781 | 1512 | gb\|U24692\| | “Enterococcus faecalis pyrimidine | 93 | 92 |
| | | | | | biosynthesis D (pyrD) gene, complete cds” | | |
| 69 | 1 | 1 | 228 | gb\|U60038\| | “Enterococcus faecalis major cold-shock | 100 | 136 |
| | | | | | protein (cspA) gene, partial cds” | | |
| 72 | 15 | 15814 | 19737 | emb\|X62656\|EFASP1 | “E.faecalis plasmid pPD1 aspl and URFs | 92 | 2504 |
| | | | | | pd57, pd125 and pd113 genes” | | |
| 72 | 16 | 19739 | 20155 | emb\|X62657\|EFORF3 | E.faecalis plasmid pAD1 DNA for orf3 | 96 | 341 |
| 75 | 1 | 3 | 365 | emb\|Z19137\|EFPTSHGN | E.faecalis of ptsH gene encoding HPr | 100 | 267 |
| 83 | 12 | 8766 | 7432 | emb\|X78425\|EFPBP5 | E.faecalis pbp5 gene | 98 | 416 |
| 83 | 13 | 8869 | 9699 | emb\|X78425\|EFPBP5 | E.faecalis pbp5 gene | 99 | 819 |
| 83 | 14 | 9612 | 10913 | emb\|X78425\|EFPBP5 | E.faecalis pbp5 gene | 99 | 1203 |
| 83 | 15 | 10943 | 11746 | emb\|X78425\|EFPBP5 | E.faecalis pbp5 gene | 97 | 286 |
| 84 | 2 | 1657 | 3558 | emb\|X86176\|EFRPODDNE | E.faecalis dnaE and rpoD gene | 99 | 797 |
| 84 | 3 | 3649 | 4773 | emb\|X86176\|EFRPODDNE | E.faecalis dnaE and rpoD gene | 99 | 1125 |
| 84 | 4 | 4913 | 7000 | emb\|X86176\|EFRPODDNE | E.faecalis dnaE and rpoD gene | 99 | 301 |
| 104 | 2 | 4018 | 2900 | gb\|U36195\| | “Enterococcus faecalis pyrAa gene, partial | 93 | 310 |
| | | | | | cds” | | |
| 108 | 7 | 5875 | 5183 | gb\|M58002\| | “Streptococcus faecalis bacterial cell | 98 | 252 |
| | | | | | wall hydrolase gene, complete cds” | | |
| 145 | 8 | 8193 | 7234 | gb\|U03756\| | “Enterococcus faecalis endocarditis | 99 | 960 |
| | | | | | specific antigen gene, complete cds” | | |
| 145 | 9 | 8836 | 8147 | gb\|U03756\| | “Enterococcus faecalis endocarditis | 100 | 132 |
| | | | | | specific antigen gene, complete cds” | | |
| 147 | 3 | 2096 | 3418 | emb\|X68847\|SFNOXAA | S.faecalis nox gene for NADH oxidase | 99 | 1301 |
| 154 | 4 | 2160 | 2492 | emb\|X17O92\|PPRRA | Plasmid pAM-beta-1 (from S.faecalis) | 93 | 294 |
| | | | | | replication region DNA | | |
| 154 | 10 | 5935 | 6294 | gb\|U17153\| | “Enterococcus faecalis plasmid pjh1 | 99 | 355 |
| | | | | | tetracycline resistant (tetL) gene, | | |
| | | | | | complete cds” | | |
| 154 | 11 | 6279 | 6584 | gb\|U17153\| | “Enterococcus faecalis plasmid pjh1 | 98 | 89 |
| | | | | | tetracycline resistant (tetL) gene, | | |
| | | | | | complete cds” | | |
| 154 | 12 | 7882 | 7097 | gb\|U86375\| | “Enterococcus faecalis ermB regulator and | 99 | 736 |
| | | | | | adenine methylase (ermB) genes, complete | | |
| | | | | | cds” | | |
| 154 | 13 | 8750 | 8043 | gb\|U17153\| | “Enterococcus faecalis plasmid pjh1 | 99 | 498 |
| | | | | | tetracycline resistant (tetL) gene, | | |
| | | | | | complete cds” | | |
| 159 | 1 | 158 | 1483 | gb\|M58002\| | “Streptococcus faecalis bacterial cell | 98 | 1323 |
| | | | | | wall hydrolase gene, complete cds” | | |
| 159 | 2 | 807 | 157 | gb\|M58002\| | “Streptococcus faecalis bacterial cell | 99 | 651 |
| | | | | | wall hydrolase gene, complete cds” | | |
| 159 | 3 | 1395 | 2192 | gb\|M58002\| | “Streptococcus faecalis bacterial cell | 93 | 350 |
| | | | | | wall hydrolase gene, complete cds” | | |
| 216 | 2 | 282 | 1841 | gb\|M90060\| | “Streptococcus faecalis H+ ATPase a | 81 | 1558 |
| | | | | | (atpB),b (atpF),c (atpE),alpha (atpA), | | |
| | | | | | beta (atpD),gamma (atpG),delta (atpH),and | | |
| | | | | | epsilon (atpC) subunits, complete cds” | | |
| 216 | 4 | 2809 | 2967 | gb\|M90060\| | “Streptococcus faecalis H+ATPase a | 86 | 132 |
| | | | | | (atpB),b (atpF),c (atpE),alpha (atpA), | | |
| | | | | | beta (atpD) ,gamma (atpG) ,delta (atpH) ,and | | |
| | | | | | epsilon (atpC) subunits, complete cds” | | |
| 216 | 5 | 2940 | 4244 | gb\|M90060\| | “Streptococcus faecalis H+ ATPase a | 83 | 1293 |
| | | | | | (atpB),b (atpF),c (atpE),alpha (atpA), | | |
| | | | | | beta (atpD) ,gamma (atpG) ,delta (atpH) ,and | | |
| | | | | | epsilon (atpC) subunits, complete cds” | | |
| 238 | 3 | 1814 | 2218 | gb\|M38386\| | “Streptococcus faecalis mtlF enzymeIII, | 96 | 302 |
| | | | | | mannitol-mtlD-phosphate- dehydrogenase” | | |
| 238 | 4 | 2182 | 2670 | gb\|M38386\| | “Streptococcus faecalis mtlF enzymeIII, | 98 | 480 |
| | | | | | mannitol-mtlD-phosphate- dehydrogenase” | | |
| 238 | 5 | 2634 | 3839 | gb\|M38386\| | “Streptococcus faecalis mtlF enzymeIII, | 96 | 459 |
| | | | | | mannitol-mtlD-phosphate- dehydrogenase” | | |
| 261 | 2 | 1397 | 510 | emb\|Z12296\|EFSPREG | E.faecalis sprE gene for serine proteinase | 98 | 888 |
| | | | | | homologue | | |
| 261 | 3 | 2474 | 1413 | dbj\|D85393\|ENEGE1E | “Enterococcus faecalis DNA for gelatinase, | 98 | 1051 |
| | | | | | complete cds” | | |
| 261 | 4 | 2974 | 2417 | dbj\|D85393\|ENEGE1E | “Enterococcus faecalis DNA for gelatinase, | 97 | 516 |
| | | | | | complete cds” | | |
| 275 | 3 | 1472 | 1044 | gb\|L23802\| | “Enterococcus faecalis pore forming, cell | 98 | 422 |
| | | | | | wall enzyme, regulatory, and | | |
| | | | | | dehydroquinase homologue proteins | | |
| | | | | | (ebsA,ebsB,ebsC,and ebsD) genes, complete | | |
| | | | | | cds with repeat region” | | |
| 275 | 4 | 1581 | 2018 | gb\|L23802\| | “Enterococcus faecalis pore forming, cell | 97 | 438 |
| | | | | | wall enzyme, regulatory, and | | |
| | | | | | dehydroguinase homologue proteins | | |
| | | | | | (ebsA, ebsB, ebsC, and ebsD) genes, complete | | |
| | | | | | cds with repeat region” | | |
| 275 | | 5 2789 | 2148 | gb\|L23802\| | “Enterococcus faecalis pore forming, cell | 98 | 642 |
| | | | | | wall enzyme, regulatory, and | | |
| | | | | | dehydroquinase homologue proteins | | |
| | | | | | (ebsA, ebsB, ebsC, and ebsD) genes, complete | | |
| | | | | | cds with repeat region” | | |
| 275 | 6 | 3475 | 2660 | gb\|L23802\| | “Enterococcus faecalis pore forming, cell | 98 | 790 |
| | | | | | wall enzyme, regulatory, and | | |
| | | | | | dehydroquinase homologue proteins | | |
| | | | | | (ebsA, ebsB, ebsC, and ebsD) genes, complete | | |
| | | | | | cds with repeat region” | | |
| 287 | 2 | 1565 | 558 | emb\|X17092\|PPRRA | Plasmid pAM-beta-1 (from S.faecalis) | 97 | 991 |
| | | | | | replication region DNA | | |
| 287 | 3 | 2049 | 1582 | emb\|X17092\|PPRRA | Plasmid pAM-beta-1 (from S.faecalis) | 97 | 461 |
| | | | | | replication region DNA | | |
| 287 | 6 | 2639 | 3346 | gb\|U17153\| | “Enterococcus faecalis plasmid pjh1 | 99 | 498 |
| | | | | | tetracycline resistant (tetL) gene, | | |
| | | | | | complete cds” | | |
| 294 | 11 | 4519 | 4211 | gb\|U17153\| | “Enterococcus faecalis plasmid pjh1 | 100 | 50 |
| | | | | | tetracycline resistant (tetL) gene, | | |
| | | | | | complete cds” | | |
| 302 | 1 | 1 | 1755 | emb\|X62658\|EFSEA1 | E.faecalis plasmid pAD1 seal gene and orfy | 83 | 1755 |
| 302 | 2 | 2310 | 2687 | emb\|X17214\|SFPASA1 | S. faecalis plasmid pAD1 asal gene for | 100 | 378 |
| | | | | | aggregation substance and ORF 1 | | |
| 302 | 3 | 2865 | 3329 | emb\|X17214\|SPPASA1 | S. faecalis plasmid pAD1 asal gene for | 99 | 463 |
| | | | | | aggregation substance and ORF 1 | | |
| 316 | 4 | 2724 | 2110 | gb\|M13771\| | “Streptococcus faecalis 6′-aminoglycoside | 100 | 248 |
| | | | | | acetyltransferase phosphotransferase | | |
| | | | | | (AAC(6′)-APH(2′)) bifunctional resistance | | |
| | | | | | protein, complete cds” | | |
| 346 | 5 | 2224 | 2880 | emb\|X62755\|SFNPRG | S.faecalis npr gene for NADH peroxidase | 98 | 351 |
| 349 | 2 | 686 | 907 | dbj\|D78257\|D78257 | “Enterococcus faecalis plasmid pYI17 genes | 83 | 200 |
| | | | | | for BacA, BacB, ORF3, ORF4, ORF5, ORF6, | | |
| | | | | | ORF7, ORF8, ORF9, ORF10, ORF11,partial | | |
| | | | | | cds” | | |
| 355 | 1 | 3 | 1166 | emb\|X17214\|SFPASA1 | S. faecalis plasmid pAD1 asal gene for | 97 | 1100 |
| | | | | | aggregation substance and ORF 1 | | |
| 355 | 2 | 1102 | 1548 | emb\|X17214\|SFPASA1 | S. faecalis plasmid pAD1 asal gene for | 94 | 432 |
| | | | | | aggregation substance and ORF 1 | | |
| 355 | 3 | 1663 | 2037 | emb\|X62657\|EFORF3 | E.faecalis plasmid pAD1 DNA for orf3 | 99 | 337 |
| 355 | 4 | 2035 | 2445 | emb\|X96977\|EFPAD1ORF | “E.faecalis plasmid pAD1, open reading | 99 | 411 |
| | | | | | frames” | | |
| 355 | 5 | 2558 | 2851 | emb\|X96977\|EFPAD1ORF | “E.faecalis plasmid pAD1, open reading | 96 | 280 |
| | | | | | frames” | | |
| 355 | 6 | 2838 | 3299 | emb\|X96977\|EFPAD1ORF | “E.faecalis plasmid pAD1, open reading | 97 | 430 |
| | | | | | frames” | | |
| 355 | 7 | 3236 | 3739 | emb\|X96977\|EFPAD1ORF | “E.faecalis plasmid pAD1, open reading | 97 | 279 |
| | | | | | frames” | | |
| 355 | 8 | 3696 | 4529 | emb\|X96977\|EFPAD1ORF | “E.faecalis plasmid pAD1, open reading | 97 | 537 |
| | | | | | frames” | | |
| 355 | 9 | 4587 | 5870 | emb\|X96977\|EFPAD1ORF | “E.faecalis plasmid pAD1, open reading | 98 | 718 |
| | | | | | frames” | | |
| 355 | 10 | 5843 | 6490 | emb\|X96977\|EFPAD1OR9 | “E.faecalis plasmid pAD1, open reading | 99 | 224 |
| | | | | | frames” | | |
| 355 | 11 | 6471 | 6890 | emb\|X96977\|EFPAD1ORF | “E.faecalis plasmid pAD1, open reading | 96 | 361 |
| | | | | frames” | | | |
| 355 | 12 | 6881 | 7204 | emb\|X96977\|EFPAD1ORF | “E.faecalis plasmid pAD1, open reading | 98 | 324 |
| | | | | | frames” | | |
| 355 | 13 | 7191 | 8231 | emb\|X96977\|EFPAD1ORF | “E.faecalis plasmid pAD1, open reading | 98 | 984 |
| | | | | | frames” | | |
| 355 | 14 | 8218 | 8496 | emb\|X96977\|EFPAD1ORF | “E.faecalis plasmid pAD1, open reading | 99 | 279 |
| | | | | | frames” | | |
| 355 | 15 | 8412 | 8885 | emb\|X96977\|EFPAD1ORF | “E.faecalis plasmid pAD1, open reading | 100 | 474 |
| | | | | | frames” | | |
| 355 | 17 | 9479 | 9952 | emb\|X96977\|EFPAD1ORF | “E.faecalis plasmid pADl, open reading | 98 | 417 |
| | | | | | frames” | | |
| 365 | 1 | 3 | 380 | gb\|M13771\| | “Streptococcus faecalis 6′-aminoglycoside | 100 | 248 |
| | | | | | acetyltransferase phosphotransferase | | |
| | | | | | (AAC(6′)-APH(2′)) bifunctional resistance | | |
| | | | | | protein, complete cds” | | |
| 370 | 1 | 1 | 1299 | dbj\|D78016\|ENEPPD1A | “Enterococcus faecalis Plasmid pPD1 genes | 73 | 1267 |
| | | | | | for REPB, REPA, TRAC, TRAB, TRAA, iPD1, | | |
| | | | | | TRAE, TRAF, complete cds and partial cds” | | |
| 407 | 3 | 963 | 2162 | gb\|U38590\| | “Enterococcus faecalis plasmid pCF10 PrgN, | 98 | 257 |
| | | | | | PrgO, and PrgP genes, complete cds” | | |
| 407 | 5 | 3811 | 4131 | gb\|U38590\| | “Enterococcus faecalis plasmid pCF10 PrgN, | 86 | 317 |
| | | | | | PrgO, and PrgP genes, complete cds” | | |
| 417 | 1 | 42 | 419 | gb\|UOO681\| | “Enterococcus faecalis plasmid pADi TraB | 98 | 304 |
| | | | | | (traB) gene, complete cds (traC) and | | |
| | | | | | (repA) genes, partial cds” | | |
| 417 | 2 | 313 | 41 | gb\|U00681\| | “Enterococcus faecalis plasmid pADl TraB | 97 | 198 |
| | | | | | (traB) gene, complete cds (traC) and | | |
| | | | | | (repA) genes, partial cds” | | |
| 417 | 3 | 440 | 754 | gb\|U00681\| | “Enterococcus faecalis plasmid pAD1 TraB | 100 | 219 |
| | | | | | (traB) gene, complete cds (traC) and | | |
| | | | | | (repA) genes, partial cds” | | |
| 426 | 1 | 112 | 462 | emb\|Z49243\|EF4110SOD | E.faecalis partial sod gene for superoxide | 98 | 291 |
| | | | | | dismutase (strain = BM4110) | | |
| 426 | 2 | 628 | 419 | emb\|Z49243\|EF4110SOD | E.faecalis partial sod gene for superoxide | 100 | 148 |
| | | | | | dismutase (strain = BM4110) | | |
| 426 | 3 | 456 | 725 | emb\|Z49243\|EF4110SOD | E.faecalis partial sod gene for superoxide | 100 | 148 |
| | | | | | dismutase (strain = BM4110) | | |
| 429 | 1 | 840 | 79 | emb\|X62658\|EFSEA1 | E.faecalis plasmid pADl seal gene and orfy | 98 | 737 |
| 429 | 2 | 1087 | 767 | emb\|X62658\|EFSEA1 | E.faecalis plasmid pAD1 seal gene and orfy | 99 | 321 |
| 429 | 4 | 2765 | 2460 | gb\|U17153\| | “Enterococcus faecalis plasmid pjh1 | 98 | 89 |
| | | | | | tetracycline resistant (tetL) gene, | | |
| | | | | | complete cds” | | |
| 429 | 5 | 3166 | 2750 | gb\|U17153\| | “Enterococcus faecalis plasmid pjhl | 99 | 413 |
| | | | | | tetracycline resistant (tetL) gene, | | |
| | | | | | complete cds” | | |
| 435 | 5 | 2731 | 2324 | gb\|M38052\| | “Enterococcus faecalis cytolysin B | 97 | 97 |
| | | | | | transport protein gene, complete cds” | | |
| 459 | 2 | 1330 | 1067 | gb\|M1377\| | “Streptococcus faecalis 6′-aminoglycoside | 99 | 248 |
| | | | | | acetyltransferase phosphotransferase | | |
| | | | | | (AAC(6′)-APH(2′)) bifunctional resistance | | |
| | | | | | protein, complete cds” | | |
| 506 | 1 | 1242 | 4 | emb\|X17214\|SFPASA1 | S. faecalis plasmid pADi asal gene for | 99 | 1144 |
| | | | | | aggregation substance and ORF 1 | | |
| 514 | 3 | 1496 | 1113 | gb\|M13771\| | “Streptococcus faecalis 6′-aminoglycoside | 100 | 248 |
| | | | | | acetyltransferase phosphotransferase | | |
| | | | | | (AAC(6′)-APH(2′)) bifunctional resistance | | |
| | | | | | protein, complete cds” | | |
| 527 | 2 | 1733 | 1371 | gb\|U17153\| | “Enterococcus faecalis plasmid pjhl | 98 | 153 |
| | | | | | tetracycline resistant (tetL) gene, | | |
| | | | | | complete cds” | | |
| 544 | 1 | 309 | 4 | gb\|U38590\| | “Enterococcus faecalis plasmid pCF10 PrgN, | 95 | 306 |
| | | | | | PrgO, and PrgP genes, complete cds” | | |
| 561 | 1 | 3 | 761 | dbj\|D78016\|ENEPPD1A | “Enterococcus faecalis Plasmid pPD1 genes | 77 | 528 |
| | | | | | for REPB, REPA, TRAC, TRAB, TRAA, iPD1, | | |
| | | | | | TRAE, TRAF, complete cds and partial cds” | | |
| 561 | 2 | 772 | 1566 | gb\|U00681\| | “Enterococcus faecalis plasmid pAD1 TraB | 99 | 795 |
| | | | | | (traB) gene, complete cds (traC) and | | |
| | | | | | (repA) genes, partial cds” | | |
| 566 | 3 | 874 | 2037 | dbj\|D78016\|ENEPPD1A | “Enterococcus faecalis Plasmid pPD1 genes | 90 | 1160 |
| | | | | | for REPB, REPA, TRAC, TRAB, TRAA, iPD1, | | |
| | | | | | TRAE, TPAF, complete cds and partial cds” | | |
| 581 | 1 | 398 | 3 | emb\|X96977\|EFPAD1ORF | “E.faecalis plasmid pAD1, open reading | 100 | 393 |
| | | | | | frames” | | |
| 581 | 2 | 908 | 540 | emb\|X96977\|EFPAD1ORF | “E.faecalis plasmid pAD1, open reading | 100 | 369 |
| | | | | | frames” | | |
| 597 | 1 | 573 | 7 | gb\|M38052\| | “Enterococcus faecalis cytolysin B | 99 | 566 |
| | | | | | transport protein gene, complete cds” | | |
| 597 | 2 | 1247 | 516 | gb\|M38052\| | “Enterococcus faecalis cytolysin B | 97 | 701 |
| | | | | | transport protein gene, complete cds” | | |
| 604 | 7 | 3265 | 2903 | gb\|U17153\| | “Enterococcus faecalis plasmid pjhl | 100 | 143 |
| | | | | | tetracycline resistant (tetL) gene, | | |
| | | | | | complete cds” | | |
| 618 | 1 | 1 | 534 | gb\|M13771\| | “Streptococcus faecalis 6′-aminoglycoside | 99 | 470 |
| | | | | | acetyltransferase phosphotransferase | | |
| | | | | | (AAC(6′)-APH(2′)) bifunctional resistance | | |
| | | | | | protein, complete cds” | | |
| 622 | 1 | 864 | 16 | gb\|M13771\| | “Streptococcus faecalis 6′-aminoglycoside | 99 | 849 |
| | | | | | acetyltransferase phosphotransferase | | |
| | | | | | (AAC(6′)-APH(2′)) bifunctional resistance | | |
| | | | | | protein, complete cds” | | |
| 622 | 2 | 1317 | 862 | gb\|M13771\| | “Streptococcus faecalis 6′-aminoglycoside | 99 | 256 |
| | | | | | acetyltransferase phosphotransferase | | |
| | | | | | (AAC(6′)-APH(2′)) bifunctional resistance | | |
| | | | | | protein, complete cds” | | |
| 622 | 3 | 1586 | 1311 | gb\|M13771\| | “Streptococcus faecalis l 6′-aminoglycoside | 99 | 248 |
| | | | | | acetyltransferase phosphotransferase | | |
| | | | | | (AAC(6′)-APH(2′)) bifunctional resistance | | |
| | | | | | protein, complete cds” | | |
| 624 | 6 | 5641 | 8001 | gb\|U66286\| | “Enterococcus faecalis gyrase A (gyrA) | 98 | 219 |
| | | | | | gene, partial cds” | | |
| 635 | 1 | 516 | 953 | dbj\|D78257\|D78257 | “Enterococcus faecalis plasmid pYI17 genes | 94 | 404 |
| | | | | | for BacA, BacB, ORF3, ORF4, ORF5, ORF6, | | |
| | | | | | ORF7, ORF8, ORF9, ORF10, ORF11,partial | | |
| | | | | | cds38 | | |
| 635 | 2 | 920 | 1222 | dbj\|D78257\|D78257 | “Enterococcus faecalis plasmid pYI17 genes | 83 | 299 |
| | | | | | for BacA, BacB, ORF3, ORF4, ORF5, ORF6, | | |
| | | | | | ORF7, ORF8, ORF9, ORF10, ORF11,partial | | |
| | | | | | cds” | | |
| 637 | 1 | 3 | 545 | emb\|X62656\|EFASP1 | “E.faecalis plasmid pPD1 asp1 and URFs | 92 | 506 |
| | | | | | pd57, pd125 and pd113 genes | | |
| 658 | 2 | 1198 | 365 | gb\|M38052\| | “Enterococcus faecalis cytolysin B | 100 | 819 |
| | | | | | transport protein gene, complete ods” | | |
| 658 | 3 | 1446 | 1189 | gb\|M38052\| | “Enterococcus faecaliscytolysin B | 98 | 258 |
| | | | | | transport protein gene, complete cds” | | |
| 664 | 1 | 490 | 65 | emb\|X62658\|EFSEA1 | E.faecalis plasmid pAD1 seal gene and orfy | 88 | 423 |
| 664 | 2 | 737 | 417 | emb\|X62658\|EFSEA1 | E.faecalis plasmid pAD1 seal gene and orfy | 94 | 321 |
| 743 | 1 | 561 | 4 | dbj\|78016\|ENEPPD1A | “Enterococcus faecalis Plasmid pPD1 genes | 87 | 305 |
| | | | | | for REPB, REPA, TRAC, TRAB, TRAA, iPD1, | | |
| | | | | | TRAE, TRAF, complete cds and partial cds” | | |
| 747 | 2 | 1139 | 324 | gb\|M38052\| | “Enterococcus faecalis cytolysin B | 99 | 691 |
| | | | | | transport protein gene, complete cds” | | |
| 747 | 3 | 577 | 783 | gb\|M38052\| | “Enterococcus faecalis cytolysin B | 100 | 207 |
| | | | | | transport protein gene, complete cds” | | |
| 747 | 4 | 1474 | 1133 | gb\|M13771\| | “Streptococcus faecalis 6′-aminoglycoside | 99 | 248 |
| | | | | | acetyltransferase phosphotransferase | | |
| | | | | | (AAC(6′)-APH(2′)) bifunctional resistance | | |
| | | | | | protein, complete cds” | | |
| 777 | 1 | 401 | 3 | gb\|M38052\| | Enterococcus faecalis cytolysin B | 100 | 335 |
| | | | | | transport protein gene, complete cds” | | |
| 816 | 1 | 793 | 512 | gb\|M13771\| | “Streptococcus faecalis 6-aminoglycoside | 100 | 243 |
| | | | | | acetyltransferase phosphotransferase | | |
| | | | | | (AAC(6′)-APH(2′)) bifunctional resistance | | |
| | | | | | protein, complete cds“ | | |
| 842 | 1 | 418 | 89 | emb\|X17214\|SFPASA1 | S. faecalis plasmid pAD1 asal gene for | 91 | 303 |
| | | | | | aggregation substance and ORF 1 | | |
| 842 | 2 | 856 | 605 | emb\|X62658\|EFSEA1 | E.faecalis plasmid pAD1 seal gene and orfy | 92 | 246 |
| 847 | 1 | 1481 | 3 | emb\|X62658\|EFSEA1 | E.faecalis plasmid pAD1 seal gene and orfy | 92 | 1479 |
| 864 | 1 | 36 | 1106 | emb\|X62658\|EFSEA1 | E.faecalis plasmid pAD1 seal gene and orfy | 93 | 945 |
| 864 | 2 | 1571 | 3550 | emb\|X62656\|EFASP1 | “E.faecalisplasmid pPD1 asp1 and URFs | 96 | 1979 |
| | | | | | pd57, pd125 and pd113 genes” | | |
| 872 | 1 | 263 | 3 | gb\|U17153\| | “Enterococcus faecalis plasmid pjh1 | 98 | 261 |
| | | | | | tetracycline resistant (tetL) gene, | | |
| | | | | | complete cds” | | |
| 874 | 1 | 833 | 693 | dbj\|D31675\|ENE16RNA8 | “Enterococcus faecalis 16S ribosomal RNA, | 100 | 98 |
| | | | | | partial sequence” | _________ | |
| 878 | 1 | 302 | 30 | gb\|U17153\| | “Enterococcus faecalis plasmid pjh1 | 94 | 94 |
| | | | | | tetracycline resistant (tetL) gene, | | |
| | | | | | complete cds” | | |
| 878 | 2 | 263 | 445 | gb\|U17153\| | “Enterococcus faecalis plasmid pjh1 | 99 | 181 |
| | | | | | tetracycline resistant (tetL) gene, | | |
| | | | | | complete cds” | | |
| 921 | 1 | 748 | 26 | emb\|X62658\|EFSEA1 | E.faecalis plasmid pAD1 seal gene and orfy | 95 | 612 |
| 929 | 1 | 484 | 2 | emb\|X62658\|EFSEA1 | E.faecalis plasmid pAD1 seal gene and orfy | 99 | 409 |
| 946 | 1 | 3 | 422 | emb\|X62657\|EFORF3 | E.faecalis plasmid pAD1 DNA for orf3 | 99 | 341 |
| 946 | 2 | 420 | 830 | emb\|X96977\|EFPAD1ORF | “E.faecalis plasmid pAD1, open reading | 98 | 411 |
| | | | | | frames” | | |
| 946 | 3 | 866 | 1123 | emb\|X96977\|EFPAD1ORF | “E.faecalis plasmid pAD1, open reading | 96 | 230 |
| | | | | | frames” | | |
| 947 | 1 | 112 | 498 | emb\|X62656\|EFASP1 | “E.faecalis plasmid pPD1 asp1 and URFs | 96 | 378 |
| | | | | | pd57, pd125 and pd113 genes” | | |
| 951 | 1 | 484 | 26 | emb\|X62658\|EFSEA1 | E.faecalis plasmid pAD1 seal gene and orfy | 95 | 353 |
| 956 | 1 | 3 | 545 | emb\|X62656\|EFASP1 | “E.faecalis plasmid pPD1 asp1 and URFs | 96 | 543 |
| | | | | | pd57, pd125 and pd113 genes” | | |
| 956 | 2 | 524 | 721 | emb\|X62656\|EFASP1 | “E.faecalis plasmid pPD1 asp1 and URFs | 94 | 161 |
| | | | | | pd57, pd125 and pd113 genes” | | |
| 957 | 1 | 616 | 2 | emb\|X96977\|EFPAD1ORF | “E.faecalis plasmid pAD1, open reading | 99 | 615 |
| | | | | | frames” | | |
| 957 | 2 | 42 | 686 | emb\|X96977\|EFPAD1ORF | “E.facalis plasmid pAD1, open reading | 99 | 595 |
| | | | | | frames” | | |
| 968 | 1 | 1 | 456 | emb\|X62656\|EFASP1 | “E.faecalis plasmid pPD1 asp1 and URFs | 96 | 366 |
| | | | | | pd57, pd125 and pd113 genes” | | |
| 968 | 2 | 339 | 641 | emb\|X62656\|EFASP1 | “E.faecalis plasmid pPD1 asp1 and URFs | 95 | 158 |
| | | | | | pd57, pd125 and pd113 genes | | |
| 968 | 3 | 395 | 658 | emb\|X62656\|EFASP1 | “E.faecalis plasmid pPD1 asp1 and URFs | 94 | 126 |
| | | | | | pd57, pd125 and pd113 genes” | | |
| 977 | 1 | 5 | 943 | emb\|X17214\|SFPASA1 | S. faecalis plasmid pAD1 asal gene for | 99 | 847 |
| | | | | | aggregation substance and ORF 1 | | |
| 982 | 1 | 376 | 2 | emb\|X62658\|EFSEA1 | E.faecalis plasmid pAD1 seal gene and orfy | 95 | 365 |
| 985 | 1 | 85 | 471 | emb\|X62656\|EFASP1 | “E.faecalis plasmid pPD1 asp1 and URFs | 91 | 362 |
| | | | | | pd57, pd125 and pd113 genes” | | |

[0353] TABLE 2
E. faecalis - Putative coding regions of novel proteins similar to known proteins

| | | | | | | | |
|---|---|---|---|---|---|---|---|
| Contig | ORF | Start | Stop | | | | |
| ID | ID | (nt) | (nt) | Match accession | Match gene name | % Sim | % Ident |

| | | | | | | | | |
|---|---|---|---|---|---|---|---|---|
| 137 | 3 | 3208 | 2003 | gi\|152947 | transposase [Staphylococcus aureus] | 100 | 100 | |
| 154 | 14 | 9166 | 9750 | gi\|141861 | traA gene product [Plasmid pAD1] | 100 | 100 | |
| 276 | 16 | 11268 | 11047 | gnl\|PID\|e284733 | C34B7.1 [Caenorhabditis elegans] | 100 | 71 | |
| 287 | 1 | 485 | 234 | gi\|152947 | transposase [Staphylococcus aureus] | 100 | 100 | |
| 287 | 7 | 3454 | 3765 | gi\|152947 | transposase [Staphylococcus aureus] | 100 | 100 | |
| 292 | 6 | 3001 | 4185 | gi\|488330 | alpha-amylase [unidentified cloning | 100 | 100 | |
| | | | | | vector] | | | |
| 429 | 3 | 2013 | 1654 | gi\|141863 | regulatory protein [Plasmid pAD1] | 100 | 100 | |
| 604 | 3 | 1243 | 1043 | gi\|559860 | clyLs [Plasmid pAD1] | 100 | 98 | |
| 604 | 4 | 1492 | 1268 | gi\|559859 | clyL1 [PLasmid pAD1] | 100 | 100 | |
| 656 | 7 | 7592 | 6834 | gi\|488339 | alpha-amylase [unidentified cloning | 100 | 100 | |
| | | | | | vector] | | | |
| 658 | 1 | 312 | 4 | gi\|152947 | transposase [Staphylococcus aureus] | 100 | 100 | |
| 674 | 3 | 1236 | 1589 | gi\|1196996 | unknown protein [Transposon Tn10] | 100 | 98 | |
| 700 | 1 | 375 | 4 | gi\|152947 | transposase [Staphylococcus aureus] | 100 | 100 | |
| 961 | 1 | 1 | 450 | gi\|152947 | transposase [Staphylococcus aureus] | 100 | 100 | |
| 72 | 17 | 20153 | 21040 | gi\|150556 | surface protein [Plasmid pCF10] | 99 | 99 | |
| 99 | 5 | 3117 | 1933 | gi\|1006839 | malic enzyme [Streptococcus bovis] | 99 | 99 | |
| 154 | 3 | 1995 | 1491 | gi\|149482 | transposase [Lactococcus lactis] | 99 | 99 | |
| 326 | 3 | 3030 | 1714 | pir\|S16989\|S16989 | dihydrolipaomide S-acetyltransferase (EC | 99 | 98 | |
| | | | | | 2.3.1.12)-Enterococcus faecalis | | | |
| 407 | 6 | 4636 | 4235 | gi\|141859 | replication-associated protein [Plasmid | 99 | 99 | |
| | | | | | pAD1] | | | |
| 692 | 1 | 3 | 485 | gi\|559861 | clyM [Plasmid pAD1] | 99 | 99 | |
| 99 | 6 | 3904 | 3134 | gi\|1146122 | L-malate permease [Streptococcus bovis] | 98 | 98 | |
| 326 | 4 | 3358 | 3002 | pir\|S16989\|S16989 | dihydrolipoamide S-acetyltransferase (EC | 98 | 97 | |
| | | | | | 2.3.1.12)-Enterococcus faecalis | | | |
| 346 | 1 | 606 | 4 | gi\|1146122 | L-malate permease [Streptococcus bovis] | 98 | 98 | |
| 367 | 31 | 14415 | 13999 | gi\|1644226 | ribosomal protein S10 [Bacillus subtilis] | 98 | 88 | |
| 367 | 6 | 2797 | 2495 | gi\|142459 | initiation factor 1 [Bacillus subtilis] | 97 | 88 | |
| 407 | 9 | 5454 | 4894 | gi\|141858 | replication-associated protein [Plasmid | 97 | 97 | |
| | | | | | pAD1] | | | |
| 497 | 6 | 3514 | 3762 | gi\|532552 | ORF19 [Enterococcus faecalis] | 97 | 87 | |
| 558 | 1 | 1 | 399 | gi\|46638 | ORF 2 (AA 1-236) [Staphylococcus aureus] | 97 | 97 | |
| 829 | 1 | 169 | 2 | gnl\|PID\|e283110 | femD [Staphylococcus aureus] | 97 | 86 | |
| 407 | 8 | 4970 | 4599 | gi\|141858 | replication-associated protein [Plasmid | 96 | 96 | |
| | | | | | pAD1] | | | |
| 777 | 2 | 1102 | 380 | gi\|559861 | clyM [Plasmid pAD1] | 96 | 96 | |
| 23 | 33 | 20797 | 21126 | gnl\|PID\|e223402 | DNA topoisomerase IV C submit | 95 | 80 | |
| | | | | | [Streptococcus pneumoniae] | | | |
| 32 | 5 | 3454 | 3071 | gi\|147194 | phnA protein [Escherichia coli] | 95 | 87 | |
| 95 | 8 | 5493 | 6875 | gi\|391682 | Na+ −ATPase beta subunit [Enterococcus | 95 | 89 | |
| | | | | | hirae] | | | |
| 138 | 25 | 16587 | 16745 | gi\|143136 | L-lactate dehydrogenase [Bacillus | 95 | 70 | |
| | | | | | megaterium] | | | |
| 367 | 20 | 9198 | 8797 | gi\|40150 | L14 protein (AA 1-122) [Bacillus subtilis] | 95 | 90 | |
| 367 | 21 | 9519 | 9223 | gi\|1044973 | ribosomal protein L17 [Bacillus subtilis] | 95 | 89 | |
| 439 | 2 | 846 | 1241 | gi\|488334 | alpha-amylase [unidentified cloning | 95 | 94 | |
| | | | | | vector] | | | |
| 604 | 1 | 792 | 4 | gi\|559861 | clyM [Plasmid pAD1] | 95 | 93 | |
| 722 | 1 | 1 | 504 | gi\|47453 | ribosomal protein S12 [Streptococcus | 95 | 94 | |
| | | | | | pneumoniae] | | | |
| 17 | 8 | 7317 | 7676 | gi\|532554 | ORF21 [Enterococcus faecalis] | 94 | 86 | |
| 95 | 2 | 1288 | 1791 | gi\|416405 | Na+−ATPase K subunit [Enterococcus hirae] | 94 | 88 | |
| 97 | 3 | 2481 | 1432 | gi\|1750264 | heat shock protein 70 [Streptococcus | 94 | 90 | |
| | | | | | pneumoniae] | | | |
| 117 | 5 | 2700 | 3842 | gi\|467376 | unknown [Bacillus subtilis] | 94 | 89 | |
| 327 | 3 | 3283 | 3762 | gi\|153566 | ORF (19K protein) [Enterococcus faecalis] | 94 | 87 | |
| 327 | 5 | 4782 | 5054 | gi\|153568 | H+ ATPase [Enterococcus faecalis] | 94 | 82 | |
| 387 | 4 | 3608 | 1728 | gi\|153661 | translational initiation factor IF2 | 94 | 88 | |
| | | | | | [Enterococcus faecium] sp\|P18311\|IF2_ENTFC | | | |
| | | | | | INITIATION FACTOR IF-2. | | | |
| 455 | 1 | 2 | 259 | gi\|532549 | ORF16 [Enterococcus faecali] | 94 | 82 | |
| 97 | 2 | 1444 | 677 | gi\|450684 | dnaK gene product [Lactococcus lactis] | 93 | 83 | |
| 188 | 2 | 1690 | 1911 | gi\|43865 | nifJ gene product [Klebsiella pneumoniae] | 93 | 78 | |
| 216 | 6 | 4234 | 4680 | gi\|153574 | H+ ATPase [Enterococcus faecalis] | 93 | 86 | |
| 298 | 2 | 2798 | 1221 | gi\|143012 | GMP synthetase [Bacillus subtilis] | 93 | 86 | |
| 329 | 2 | 1538 | 771 | gi\|153826 | adhesin B [Streptococcus sanguis] | 93 | 83 | |
| 367 | 15 | 7675 | 7247 | gi\|1044978 | ribosomal protein S8 [Bacillus subtilis] | 93 | 82 | |
| 722 | 2 | 527 | 1030 | gi\|1644222 | ribosomal protein S7 [Bacillus subtilis] | 93 | 83 | |
| 803 | 1 | 657 | 151 | gi\|1196998 | unknown protein [Transposon Tn10] | 93 | 93 | |
| 962 | 1 | 130 | 636 | gi\|152947 | transposase [Staphylococcus aureus] | 93 | 92 | |
| 237 | 12 | 6056 | 6385 | gi\|963038 | Arpυ [Enterococcus hirae] | 92 | 76 | |
| 309 | 4 | 8218 | 4541 | gi\|402363 | RNA polymerase beta-subunit [Bacillus | 92 | 82 | |
| | | | | | subtilis] sp \|P37870\| RPOB_BACSU DNA- | | | |
| | | | | | DIRECTED RNA POLYMERASE BETA CHAIN (EC | | | |
| | | | | | .7.7.6) (TRANSCRIPTASE BETA CHAIN) (RNA | | | |
| | | | | | POLYMERASE BETA SUBUNIT). | | | |
| 329 | 4 | 2529 | 1717 | gi\|310632 | hydrophobic membrane protein | 92 | 78 | |
| | | | | | [Streptococcus gordonii] | | | |
| | | | | | sp\|P42361\|P29K_STRGC 29 KD MEMBRANE | | | |
| | | | | | PROTEIN IN PSAA 5′REGION ORF1). | | | |
| 367 | 4 | 1942 | 1544 | gi\|142462 | ribosomal protein S11 [Bacillus subtilis] | 92 | 82 | |
| 367 | 8 | 3648 | 3457 | pir\|C44859\|C44859 | adenylate kinase - Bacillus sp. (fragment) | 92 | 88 | |
| 367 | 12 | 6183 | 5641 | gi\|1044981 | ribosomal protein S5 [Bacillus subtilis] | 92 | 81 | |
| 367 | 17 | 8427 | 7885 | pir51 A29102\|R5BS5F | ribosomal protein L5 - Bacillus | 92 | 83 | |
| | | | | | stearothermophilus | | | |
| 527 | 1 | 1404 | 373 | gi\|153092 | replication protein [Staphylococcus | 92 | 81 | |
| | | | | | aureus] | | | |
| 701 | 1 | 2 | 352 | gi\|143793 | tyrosyl-tRNA synthetase [Bacillus | 92 | 74 | |
| | | | | | caldotenax] | | | |
| 23 | 28 | 17420 | 17566 | sp\|P45692\|EUTX_SAL | ETHANOLAMINE UTILIZATION PROTEIN EUTX | 91 | 73 | |
| | | | | TY | (FRAGMENT). | | | |
| 57 | 5 | 4129 | 4701 | gi\|15958l0 | type-I signal peptidase SpsB | 91 | 67 | |
| | | | | | [Staphylococcus aureus] | | | |
| 57 | 12 | 13281 | 13970 | gnl\|PID\|e254999 | phenylalany-tRNA synthetase beta subunit | 91 | 75 | |
| | | | | | [Bacillus subtilis] | | | |
| 156 | 5 | 4609 | 6474 | gi\|1303804 | YqeQ [Bacillus subtilis] | 91 | 79 | |
| 216 | 3 | 1848 | 2765 | gi\|153572 | H+ ATPase [Enterococcus faecalis] | 91 | 81 | |
| 367 | 24 | 10802 | 10128 | gi\|1165309 | S3 [Bacillus subtilis] | 91 | 78 | |
| 415 | 1 | 452 | 883 | pir\|B56272\|B56272 | probable pheromone-responsive regulatory | 91 | 90 | |
| | | | | | protein R - Enterococcus faecalis plasmid | | | |
| | | | | | pCF10 | | | |
| 466 | 2 | 1313 | 2065 | gi\|142443 | adenylosuccinate synthetase [Bacillus | 91 | 79 | |
| | | | | | subtilis]sp\|P29726\|PURA_BACSU | | | |
| | | | | | ADENYLOSUCCINATE SYNTHETASE (EC 6.3.4.4) | | | |
| | | | | | IMP--ASPARTATE LIGASE). | | | |
| 545 | 1 | 1 | 345 | gi\|532549 | ORF16 [Enterococcus faecalis] | 91 | 80 | |
| 572 | | 1 8 | 652 | gi\|347998 | uracil phosphoribosyltransferase | 91 | 78 | |
| | | | | | [Streptococcus salivarius] | | | |
| | | | | | sp\|P36399\|UPP_STRSL PROBABLE URACIL | | | |
| | | | | | PHOSPHORIBOSYLTRANSFERASE (EC .4.2.9) (UMP | | | |
| | | | | | PYROPHOSPHORYLASE) (UPRTASE). | | | |
| 599 | 1 | 8 | 343 | gi\|42029 | ORF1 gene product [Escherichia coli] | 91 | 75 | |
| 600 | 2 | 585 | 779 | pir\|B48396\|B48396 | ribosomal protein L33 - Bacillus | 91 | 81 | |
| | | | | | stearothermophilus | | | |
| 652 | 1 | 394 | 2 | gi\|535662 | transposase [Insertion sequence IS1251] | 91 | 81 | |
| 1 | 4 | 3465 | 2557 | gi\|1644224 | elongation factor Tu [Bacillus subtilis] | 90 | 83 | |
| 17 | 19 | 14844 | 17297 | gi\|532549 | ORF16 [Enterococcus faecalis] | 90 | 77 | |
| 52 | 3 | 2650 | 2811 | gi\|473902 | alpha-acetolactate synthase [Lactococcus | 90 | 68 | |
| | | | | | lactis] | | | |
| 74 | 9 | 5870 | 5469 | gi\|1653508 | hypothetical protein [Synechocystis sp.] | 90 | 52 | |
| 75 | 3 | 1177 | 2091 | gi\|153615 | phosphoenolpyruvate:sugar | 90 | 83 | |
| | | | | | phosphotransferase system enzyme I | | | |
| | | | | | Streptococcus salivarius] | | | |
| 117 | 10 | 6591 | 8126 | gi\|924848 | inosine monophosphate dehydrogenase | 90 | 80 | |
| | | | | | [Streptococcus pyogenes] pir\|JC4372 \|JC4372 | | | |
| | | | | | IMP dehydrogenase (EC 1.1.1.205) - | | | |
| | | | | | Streptococcus yogenes | | | |
| 276 | 1 | 577 | 95 | gi\|530798 | LysB [Bacteriophage phi-LC3] | 90 | 72 | |
| 287 | 5 | 2611 | 2441 | gi\|1333835 | copS gene product [Streptococcus pyogenes] | 90 | 78 | |
| 290 | 1 | 1 | 708 | gi\|897795 | 30S ribosomal protein [Pediococcus | 90 | 75 | |
| | | | | | acidilactici] sp\|P49668\|RS2_PEDAC 30S | | | |
| | | | | | RIBOSOMAL PROTEIN S2. | | | |
| 309 | 3 | 4401 | 1093 | gnl\|PID\|e187579 | DNA-directed RNA polymerase [Listeria | 90 | 81 | |
| | | | | | innocua] | | | |
| 367 | 22 | 9731 | 9513 | pir\|A02825\|R5BS29 | ribosomal protein L29 - Bacillus | 90 | 76 | |
| | | | | | stearothermophilus | | | |
| 452 | 4 | 2224 | 2508 | gi\|434759 | ORF [Homo sapiens] | 90 | 54 | |
| 455 | 2 | 2776 | 323 | gi\|532549 | ORF16 [Enterococcus faecalis] | 90 | 77 | |
| 623 | 1 | 3 | 221 | gi\|460259 | enolase [Bacillus subtilis] | 90 | 80 | |
| 624 | 5 | 3612 | 5615 | gnl\|PID\|e2O8213 | DNA gyrase [Streptococcus pneumoniae] | 90 | 81 | |
| 853 | 2 | 752 | 282 | gnl\|PID\|e13389 | translation initiation factor IF3 (AA 1- | 90 | 82 | |
| | | | | | 172) [Bacillus stearothermophilus] | | | |
| 966 | 1 | 1 | 462 | gi\|532549 | ORF16 [Enterococcus faccalis] | 90 | 83 | |
| 1 | 3 | 2596 | 2219 | gi\|1661195 | elongation factor-Tu [Streptococcus | 89 | 78 | |
| | | | | | mutans] | | | |
| 1 | 5 | 4314 | 3556 | gi\|1644223 | elongation factor G [Bacillus subtilis] | 89 | 79 | |
| 23 | 21 | 13990 | 14295 | gi\|466518 | pduA [Salmonella typhimurium] | 89 | 75 | |
| 23 | 32 | 19927 | 20799 | gnl\|PID\|e208211 | DNA topoisomerase IV [Streptococcus | 89 | 83 | |
| | | | | | pneumoniae] | | | |
| 42 | 2 | 349 | 1989 | gi\|287871 | groEL gene product [Lactococcus lactis] | 89 | 79 | |
| 45 | 15 | 11835 | 12167 | gi\|150554 | surface exclusion protein [Plasmid pCF10] | 89 | 68 | |
| 53 | 2 | 685 | 1797 | gnl\|PID\|e221213 | ClpX protein [Bacillus subtilis] | 89 | 81 | |
| 86 | 4 | 3374 | 4024 | gi\|537286 | triosephosphate isomerase [Lactococcus | 89 | 78 | |
| | | | | | lactis] | | | |
| 95 | 7 | 3677 | 5506 | gi\|912449 | Na+ −ATPase alpha subunit [Enterococcus | 89 | 80 | |
| | | | | | hirae] | | | |
| 128 | 18 | 11348 | 11013 | gi\|466473 | cellobiose phosphotransferase enzyme II′ | 89 | 60 | |
| | | | | | [Bacillus tearothermophilus] | | | |
| 132 | 1 | 180 | 2180 | gi\|153854 | uvs402 protein [Streptococcus pneumoniae] | 89 | 78 | |
| 342 | 1 | 783 | 4 | gi\|1041115 | TRAC [Plasmid pPD1] | 89 | 79 | |
| 367 | 23 10146 | 9691 | sp\|P14577\|RL16_{—BAC} | 50S RIBOSOMAL PROTEIN L16. | 89 | 80 | | |
| | | | | SU | | | | |
| 367 | 27 | 12377 | 11541 | gi\|1165306 | L2 [Bacillus subtilis] | 89 | 79 | |
| 435 | 4 | 2424 | 2215 | gi\|559863 | clyA [Plasmid pA1] | 89 | 89 | |
| 466 | 3 | 1972 | 2736 | gi\|467328 | adenylosuccinate synthetase [Bacillus | 89 | 75 | |
| | | | | | subtilis] | | | |
| 512 | 3 | 999 | 1607 | gi\|1477776 | ClpP [Bacillus subtilis] | 89 | 73 | |
| 518 | 1 | 1 | 174 | gi\|786163 | Ribosomal Protein L10 [Bacillus subtilis] | 89 | 76 | |
| 604 | 2 | 1000 | 713 | gi\|559861 | clyM [Plasmid pAD1] | 89 | 89 | |
| 615 | 2 | 888 | 691 | gi\|467469 | unknown [Bacillus subtilis] | 89 | 75 | |
| 677 | 2 | 992 | 429 | gi\|1389732 | S-adenosylmethionine synthetase [Bacillus | 89 | 76 | |
| | | | | | subtilis] | | | |
| 677 | 3 | 1315 | 950 | gi\|1020317 | S-adenosylmethionine synthetase | 89 | 73 | |
| | | | | | [Staphylococcus aureus] | | | |
| 722 | 3 | 1102 | 1278 | pir\|PW0010\|PW0010 | translation elongation factor G - Bacillus | 89 | 72 | |
| | | | | | stearothermophilus (fragment) | | | |
| 850 | 1 | 464 | 3 | gi\|142521 | deoxyribodipyrimidine photolyase [Bacillus | 89 | 72 | |
| | | | | | subtilis]gnl\|PID\|e255102 | | | |
| | | | | | deoxyribodipyrimidine photolyase [Bacillus | | | |
| | | | | | ubtilis] | | | |
| 17 | 5 | 3711 | 4751 | gi\|532554 | ORF21 [Enterococcus faecalis] | 88 | 72 | |
| 37 | 5 | 3322 | 3717 | gi\|1216488 | uncharacterized open reading frame; | 88 | 75 | |
| | | | | | hypothetical protein displaying similarity | | | |
| | | | | | to a Bacillus subtilis hypothetical | | | |
| | | | | | protein (Ylm [Streptococcus mutans] | | | |
| 39 | 6 | 2454 | 2630 | sp\|P49865\|NTPR_ENT | NTPR PROTEIN (FRAGMENT). | 88 | 77 | |
| | | | | HR | | | | |
| 48 | 3 | 1740 | 2666 | gi\|557492 | dihydroxynapthoic acid (DHNA) synthetase | 88 | 75 | |
| | | | | | [Bacillus subtilis] gi\|143186 | | | |
| | | | | | dihydroxynapthoic acid (DHNA) synthetase | | | |
| | | | | | [Bacillus ubtilis] | | | |
| 63 | 5 | 2753 | 3607 | gi\|1064814 | homologous to sp:PHOP_BACSUB [Bacillus | 88 | 77 | |
| | | | | | subtilis] | | | |
| 86 | 2 | 1004 | 2047 | gi\|153763 | plasmin receptor [Streptococcus pyogenes] | 88 | 79 | |
| 104 | 6 | 6431 | 6213 | gi\|431231 | uracil permease [Bacillus caldolyticus] | 88 | 60 | |
| 110 | 19 | 18174 | 16891 | gi\|217040 | acid glycoprotein [Streptococcus pyogenes] | 88 | 72 | |
| 145 | 10 | 9040 | 8834 | gi\|393268 | 29-kiloDalton protein [Streptococcus | 88 | 71 | |
| | | | | | pneumoniae]sp\|P42362\|P29K_STRPN 29 KD | | | |
| | | | | | MEMBRANE PROTEIN IN PSAA 5′REGION ORF1). | | | |
| 151 | 1 | 1620 | 316 | gi\|143366 | adenylosuccinate lyase (PUR-B) [Bacillus | 88 | 78 | |
| | | | | | subtilis] pir\|C29326\|WZBSDS | | | |
| | | | | | adenylosuccinate lyase (EC 4.3.2.2) - | | | |
| | | | | | Bacillus ubtilis | | | |
| 171 | 10 | 9676 | 10119 | gi\|1591672 | phosphate transport system ATP-binding | 88 | 63 | |
| | | | | | protein [Methanococcus jannaschii] | | | |
| 190 | 3 | 1997 | 975 | gi\|532554 | ORF21 [Enterococcus faecalis] | 88 | 76 | |
| 229 | 6 | 5712 | 5954 | gi\|143648 | ribosomal protein L28 [Bacillus subtilis] | 88 | 70 | |
| 270 | 2 | 895 | 1869 | gi\|1303828 | YqfJ p8 Bacillus subtilis] | 88 | 75 | |
| 275 | 7 | 3761 | 3552 | gi\|425474 | SMDR1 [Schistosoma mansoni] | 88 | 72 | |
| 293 | 1 | 614 | 3 | gi\|1783246 | highly homologous to many ATP-binding | 88 | 80 | |
| | | | | | transport proteins; hypothetical [Bacillus | | | |
| | | | | | subtilis] | | | |
| 367 | 1 | 485 | 72 | gi\|142464 | ribosomal protein L17 [Bacillus subtilis] | 88 | 76 | |
| 367 | 5 | 2335 | 1961 | gi\|1044989 | ribosomal protein S13 [Bacillus subtilis] | 88 | 80 | |
| 367 | 16 | 7887 | 7681 | pir\|S48688\|S48688 | ribosomal protein S14 - Bacillus | 88 | 83 | |
| | | | | | stearothermophilus | | | |
| 598 | 1 | 1006 | 23 | gi\|565287 | transposase-like protein of PS3IS | 88 | 66 | |
| | | | | | [thermophilic bacterium PS3] | | | |
| | | | | | pir\|JC4292\|JC4292 insertion sequence | | | |
| | | | | | element 1341 - thermophilic acterium PS-3 | | | |
| 600 | 3 | 1640 | 882 | gi\|763052 | integrase [Bacteriophage T270] | 88 | 68 | |
| 669 | 1 | 2 | 514 | gi\|153801 | enzyme scr-II [Streptococcus mutans] | 88 | 75 | |
| 808 | 2 | 624 | 394 | gi\|1574781 | exodeoxyribonuclease V (recB) [Haemophilus | 88 | 77 | |
| | | | | | influenzae] | | | |
| 871 | 1 | 714 | 229 | gi\|1574120 | branched-chain-amino-acid transaminase | 88 | 79 | |
| | | | | | [Haemophilus influenzae] | | | |
| 979 | 1 | 1 | 384 | gnl\|PID\|e187579 | DNA-directed RNA polymerase [Listeria | 88 | 78 | |
| | | | | | innocua] | | | |
| 983 | 1 | 34 | 282 | gi\|40026 | homologous to E.coli gidA [Bacillus | 88 | 78 | |
| | | | | | subtilis] | | | |
| 47 | 5 | 6799 | 5810 | gi\|532204 | prs [Listeria monocytogenes] | 87 | 79 | |
| 69 | 3 | 2033 | 750 | gi\|1377831 | unknown [Bacillus subtilis] | 87 | 74 | |
| 73 | 2 | 1432 | 167 | gi\|143434 | Rho Factor [Bacillus subtilis] | 87 | 76 | |
| 76 | 5 | 2412 | 3740 | gi\|496283 | lysin [Bacteriophage Tuc2009] | 87 | 75 | |
| 88 | 3 | 1600 | 2016 | gnl\|PID\|e137596 | heat shock induced protein HtpO | 87 | 75 | |
| | | | | | [Lactobacillus leichmannii] | | | |
| 89 | 7 | 6003 | 5608 | gi\|1695686 | pyruvate carboxylase [Bacillus | 87 | 77 | |
| | | | | | stearothermophilus] | | | |
| 93 | 1 | 283 | 119 | gi\|1124825 | unknown protein [Chlamydia trachomatis] | 87 56 | | |
| 104 | 1 | 2945 | 3 | gnl\|PID\|e199387 | carbamoyl-phosphate synthase | 87 | 75 | |
| | | | | | [Lactobacillus plantarum] | | | |
| 124 | 4 | 3191 | 2274 | gi\|995767 | UDP-glucose pyrophosphorylase | 87 | 76 | |
| | | | | | [Streptococcus pyogenes] | | | |
| 273 | 2 | 608 | 1108 | gi\|1184680 | polynucleotide phosphorylase [Bacillus | 87 | 76 | |
| | | | | | subtilis] | | | |
| 293 | 2 | 1020 | 532 | gi\|153741 | ATP-binding protein [Streptococcus mutans] | 87 | 74 | |
| 326 | 5 | 4534 | 3533 | gi\|143378 | pyruvate decarboxylase (E-1) beta subunit | 87 | 74 | |
| | | | | | [Bacillus subtilis] gi\|1377836 pyruvate | | | |
| | | | | | decarboxylase E-1 beta subunit [Bacillus | | | |
| | | | | | ubtilis] | | | |
| 334 | 3 | 3182 | 3340 | pir\|A36324\|A36324 | growth arrest-specific protein - mouse | 87 | 50 | |
| 337 | 1 | 1382 | 186 | gi\|308861 | GTG start codon [Lactococcus lactis] | 87 | 75 | |
| 338 | 8 | 6925 | 5723 | gi\|149575 | L(+)-lactate dehydrogenase [Lactobacillus | 87 | 73 | |
| | | | | | casei] sp\|P00343\|LDH_LACCA L-LACTATE | | | |
| | | | | | DEHYDROGENASE (EC 1.1.1.27). (SUB −326) | | | |
| 367 | 18 | 8782 | 8450 | pir\|A02819\|R5BS24 | ribosomal protein L24 - Bacillus | 87 | 70 | |
| | | | | | stearothermophilus | | | |
| 388 | 2 | 410 | 183 | gnl\|PID\|e225674 | unknown [Schizosaccharomyces pombe] | 87 | 75 | |
| 440 | 1 | 466 | 1797 | gi\|520754 | putative [Bacillus subtilis] | 87 | 75 | |
| 508 | 1 | 694 | 137 | gi\|496558 | orfX [Bacillus subtilis] | 87 | 73 | |
| 654 | 3 | 530 | 802 | pir\|A47079\|A47079 | heat shock protein DnaJ - Lactococcus | 87 | 70 | |
| | | | | | lactis | | | |
| 18 | 1 | 3 | 413 | gi\|46912 | ribosomal protein L13 [Staphylococcus | 86 | 70 | |
| | | | | | carnosus] | | | |
| 18 | 2 | 406 | 819 | pir\|S08564\|R3BS9 | ribosomal protein S9 - Bacillus | 86 | 73 | |
| | | | | | stearothermophilus | | | |
| 50 | 1 | 84 | 1148 | gi\|452398 | threonine synthase [Bacillus sp.] | 86 | 74 | |
| 74 | 14 | 10547 | 10080 | gi\|1314299 | ORF6; putative glutamyl-tRNA-transferase; | 86 | 74 | |
| | | | | | similar to glutamyl-tRNA-transferase from | | | |
| | | | | | Bacillus subtilis [Listeria monocytogenes] | | | |
| 95 | 5 | 3176 | 3406 | gi\|487276 | Na+ −ATPase subunit C [Enterococcus hirae] | 86 | 62 | |
| 114 | 8 | 9216 | 10313 | gi\|853776 | peptide chain release factor 1 [Bacillus | 86 | 69 | |
| | | | | | subtilis] pir\|S55437\|S55437 peptide chain | | | |
| | | | | | release factor 1 - Bacillus ubtilis | | | |
| 115 | 2 | 501 | 899 | gi\|551879 | ORF 1 [Lactococcus lactis] | 86 | 70 | |
| 164 | 26 | 25639 | 25842 | pir\|S34762\|S34762 | L-serine dehydratase beta chain - | 86 | 81 | |
| | | | | | Clostridium sp | | | |
| 243 | 2 | 2143 | 1082 | gi\|143607 | sporulation protein [Bacillus subtilis] | 86 | 70 | |
| 255 | 1 | 2 | 196 | gi\|755604 | unknown [Bacillus subtilis] | 86 | 64 | |
| 257 | 3 | 3565 | 983 | gi\|928832 | 0RF259; putative [Lactococcus lactis phage | 86 | 66 | |
| | | | | | BK5-T] | | | |
| 273 | 3 | 943 | 1314 | gi\|1184680 | polynucleotide phosphorylase [Bacillus | 86 | 65 | |
| | | | | | subtilis] | | | |
| 288 | 2 | 554 | 1087 | gi\|153033 | tagatose 6-phosphate isomerase | 86 | 74 | |
| | | | | | [Staphylococcus aureus] pir\|B38158\|B38158 | | | |
| | | | | | galactose-6-phosphate isomerase 19K chain | | | |
| | | | | | - taphylococcus aureus | | | |
| 327 | 7 | 5183 | 5722 | gi\|153569 | H+ ATPase [Enterococcus faecalis] | 86 | 71 | |
| 345 | 7 | 5111 | 5620 | gi\|1314294 | ORF1; putative 17 kDa protein [Listeria | 86 | 63 | |
| | | | | | monocytogenes) | | | |
| 350 | 3 | 1900 | 2781 | gi\|511015 | dihydroorotate dehydrogenase A | 86 | 73 | |
| | | | | | [Lactococcus lactis] sp\|P54321\|PYDA_LACLC | | | |
| | | | | | DIHYDROOROTATE DEHYDROCENASE A (EC | | | |
| | | | | | 1.3.3.1) DIHYDROOROTATE OXIDASE A) | | | |
| | | | | | (DHODEHASE A). | | | |
| 383 | 3 | 3328 | 4233 | gi\|1657517 | hypothetical protein [Escherichia coli] | 86 | 59 | |
| 367 | 25 | 11216 | 10851 | gi\|116538 | L22 [Bacillus subtilis] | 86 | 68 | |
| 367 | 26 | 11534 | 11220 | gi\|1165307 | S19 [Bacillus subtilis] | 86 | 77 | |
| 367 | 30 | 13995 | 13453 | gi\|1165303 | L3 [Bacillus subtilis] | 86 | 75 | |
| 393 | 1 | 1 | 660 | sp\|P33898\|G3P3_ECO | GLYCERALDEHYDE 3-PHOSPHATE DEHYDROGENASE C | 86 | 77 | |
| | | | | LI | (EC 1.2.1.12) (GAPDH-C). | | | |
| 396 | 1 | 1 | 192 | gi\|944942 | RipX [Bacillus subtilis] | 86 | 77 | |
| 438 | 3 | 1279 | 1560 | gi\|1001878 | CspL protein [Listeria monocytogenes] | 86 | 75 | |
| 510 | 1 | 1008 | 199 | gi\|473795 | ‘ORF’ [Escherichia coli] | 86 | 71 | |
| 510 | 2 | 1912 | 962 | gi\|473794 | ‘ORF’ [Escherichia coli] | 86 | 76 | |
| 539 | 1 | 705 | 4 | gi\|467477 | unknown [Bacillus subtilis] | 86 | 79 | |
| 570 | 2 | 2069 | 1023 | gi\|881511 | Ccpa protein [Lactobacillus casei] | 86 | 72 | |
| 654 | 2 | 240 | 575 | pir\|A47079\|A47079 | heat shock protein DnaJ - Lactococcus | 86 | 77 | |
| | | | | | lactis | | | |
| 677 | 1 | 431 | 102 | gi\|1389732 | S-adenosylmethionine synthetase [Bacillus | 86 | 80 | |
| | | | | | subtilis] | | | |
| 984 | 1 | 1 | 147 | pir\|A56922\|A56922 | transcription factor shn - fruit fly | 86 | 73 | |
| | | | | | (Drosophila melanogaster) | | | |
| 5 | 11 | 7720 | 8487 | gi\|41015 | aspartate-tRNA ligase [Escherichia coli] | 85 | 71 | |
| 34 | 2 | 2133 | 1711 | gi\|47828 | pyruvate kinase [Bacillus | 85 | 75 | |
| | | | | | stearothermophilus] | | | |
| 97 | 4 | 2666 | 2517 | pir\|S39341\|S3934l | grpE protein - Lactococcus lactis | 85 | 66 | |
| 103 | 2 | 1263 | 946 | gi\|143364 | phosphoribosyl aminoimidazole carboxylase | 85 | 68 | |
| | | | | | I (PUR-E) [Bacillus ubtilis] | | | |
| 103 | 3 | 1465 | 1169 | gi\|143364 | phosphoribosyl aminoimidazole carboxylase | 85 | 67 | |
| | | | | | I (PUR-E) [Bacillus ubtilis] | | | |
| 129 | 3 | 2395 | 3258 | gi\|143766 | (thrSv) (EC 6.1.1.3) [Bacillus subtilis] | 85 | 67 | |
| 129 | 4 | 3240 | 4445 | gi\|143766 | (thrSv) (EC 6.1.1.3) [Bacillus subtilis] | 85 | 78 | |
| 188 | 1 | 86 | 1447 | gnl\|PID\|e214721 | glutamine synthetase [Staphylococcus | 85 | 71 | |
| | | | | | aureus] | | | |
| 217 | 3 | 673 | 1086 | gi\|520540 | unknown [Bacillus subtilis] | 85 | 72 | |
| 241 | 2 | 1715 | 1086 | gi\|495089 | recombinase [Staphylococcus aureus] | 85 | 68 | |
| 285 | 2 | 712 | 993 | gi\|40014 | pot. ORF 446 (aa 1-446) [Bacillus | 85 | 77 | |
| | | | | | subtilis] | | | |
| 293 | 3 | 1149 | 1595 | gi\|755604 | unknown [Bacillus subtilis] | 85 | 66 | |
| 300 | 2 | 2738 | 2220 | gi\|289261 | comE ORF2 [Bacillus subtilis] | 85 | 72 | |
| 305 | 2 | 1853 | 2695 | pir\|S09411\|S09411 | spoIIIE protein - Bacillus subtilis | 85 | 70 | |
| 322 | 1 | 1 | 171 | gi\|153562 | aspartate beta-semialdehyde dehydrogenase | 85 | 67 | |
| | | | | | (EC 1.2.1.11) Streptococcus mutans] | | | |
| 327 | 4 | 4056 | 4784 | gi\|153567 | H+ ATPase [Enterococcus faecalis] | 85 | 66 | |
| 367 | 10 | 5417 | 4959 | pir\|A02795\|R5BS15 | ribosomal protein L15 - Bacillus | 85 | 76 | |
| | | | | | stearothermophilus | | | |
| 383 | 3 | 3168 | 2953 | gnl\|PID\|e274577 | csp [Lactobacillus plantarum] | 85 | 79 | |
| 404 | 3 | 3069 | 2101 | gi\|143402 | recombination protein (ttg start codon) | 85 | 72 | |
| | | | | | [Bacillus subtilis] gi\|1303923 RecN | | | |
| | | | | | [Bacillus subtilis] | | | |
| 469 | 1 | 2 | 724 | gi\|508979 | GTP-binding protein [Bacillus subtilis] | 85 | 78 | |
| 488 | 1 | 1 | 996 | gi\|532548 | ORF15 [Enterococcus faecalis] | 85 | 67 | |
| 535 | 5 | 6468 | 4849 | gi\|634107 | kdpB [Escherichia coli] | 85 | 68 | |
| 584 | 3 | 732 | 562 | gi\|467374 | single strand DNA binding protein | 85 | 75 | |
| | | | | | [Bacillus subtilis]sp\|P37455\|SSB_BACSU | | | |
| | | | | | SINGLE-STRAND BINDING PROTEIN (SSB) HELIX- | | | |
| | | | | | DESTABILIZING PROTEIN). | | | |
| 695 | 1 | 78 | 500 | gi\|499384 | orf189 [Bacillus subtilis] | 85 | 75 | |
| 836 | 1 | 1 | 357 | gi\|153801 | enzyme scr-II [Streptococcus mutans] | 85 | 69 | |
| 17 | 20 | 17212 | 18813 | gi\|532548 | ORF15 [Enterococcus faecalis] | 84 | 68 | |
| 23 | 31 | 18728 | 19987 | gnl\|PID\|e208211 | DNA topoisomerase IV [Streptococcus | 84 | 68 | |
| | | | | | pneumoniae] | | | |
| 34 | 3 | 3112 | 2144 | gi\|143312 | 6-phospho-1-fructokinase (gtg start codon; | 84 | 69 | |
| | | | | | EC 2.7.1.11) [Bacillus tearothermophilus] | | | |
| 36 | 1 | 1 | 1152 | gi\|1644223 | elongation factor G [Bacillus subtilis] | 84 | 73 | |
| 49 | 12 | 6730 | 8190 | gi\|456319 | 74kDa protein [Bacteriophage FC1] | 84 | 65 | |
| 51 | 2 | 1379 | 1663 | gi\|468207 | Submitter comments: A Mg2+ transporting P- | 84 | 71 | |
| | | | | | type ATPase highly omologous with mgtB | | | |
| | | | | | ATPase at 80 min on Salmonella chromosome. | | | |
| | | | | | ediates the influx of Mg2+ only. | | | |
| | | | | | Transcription regulated by xtracellular | | | |
| | | | | | Mg2+ [Salmonella typhimurium] | | | |
| 95 | 6 | 3330 | 3707 | gi\|487277 | Na+ −ATPase subunit C [Enterococcus hirae] | 84 | 64 | |
| 104 | 5 | 6250 | 5459 | gnl\|PID\|e199440 | aspartate carbamoyltransferase, aspartate | 84 | 65 | |
| | | | | | transcarbamylase, | | | |
| | | | | | carbamylaspartotranskinase [Lactobacillus | | | |
| | | | | | plantarum] | | | |
| 105 | 6 | 4605 | 5273 | gi\|467411 | recombination protein [Bacillus subtilis] | 84 | 65 | |
| 114 | 11 | 12278 | 12997 | gi\|556886 | serine hydroxymethyltransferase [Bacillus | 84 | 74 | |
| | | | | | subtilis]pir\|S49363\|S49363 serine | | | |
| | | | | | hydroxymethyltransferase - Bacillus | | | |
| | | | | | ubtilis | | | |
| 117 | 2 | 705 | 1484 | gi\|580906 | B.subtilis genes rpmH, rnpA, 50kd, gidA | 84 | 70 | |
| | | | | | and gidB [Bacillus subtilis] gi\|467381 | | | |
| | | | | | regulation of SpoOJ and 0rf283 (probable) | | | |
| | | | | | [Bacillus ubtilis] | | | |
| 121 | 2 | 1274 | 2119 | gi\|290643 | ATPase [Enterococcus hirae] | 84 | 67 | |
| 121 | 6 | 5016 | 5219 | gi\|153765 | DNA polymerase I [Streptococcus | 84 | 66 | |
| | | | | | pneumoniae] | | | |
| 128 | 27 | 22456 | 20453 | gi\|437916 | isoleucyl-tRNA synthetase [Staphylococcus | 84 | 71 | |
| | | | | | aureus] | | | |
| 130 | 1 | 2 | 133 | gi\|1237013 | ORF2 [Bacillus subtilis] | 84 | 74 | |
| 138 | 35 | 26712 | 25777 | gi\|143795 | transfer RNA-Tyr synthetase [Bacillus | 84 | 69 | |
| | | | | | subtilis] | | | |
| 164 | 28 | 26378 | 27277 | gnl\|PID\|e247026 | orf6 [Lactobacillus sake] | 84 | 72 | |
| 171 | 1 | 158 | 2719 | gi\|499335 | secA protein [Staphylococcus carnosus] | 84 | 68 | |
| 210 | 5 | 4870 | 3884 | gi\|950062 | hypothetical yeast protein 1 [Mycoplasma | 84 | 75 | |
| | | | | | capricolum] pir\|S48578\|S48578 hypothetical | | | |
| | | | | | protein - Mycoplasma capricolum SGC3) | | | |
| | | | | | (fragment) | | | |
| 217 | 7 | 5222 | 3546 | gi\|143597 | CTP synthetase [Bacillus subtilis] | 84 | 68 | |
| 243 | 1 | 1088 | 126 | gi\|143608 | sporulation protein [Bacillus subtilis] | 84 | 70 | |
| 275 | 1 | 578 | 48 | gi\|1103865 | formyl-tetrahydrofolate synthetase | 84 | 72 | |
| | | | | | [Streptococcus mutans] | | | |
| 281 | 1 | 333 | 698 | gi\|1303962 | YqjK [Bacillus subtilis] | 84 | 68 | |
| 292 | 23 | 18340 | 18038 | gi\|142988 | membrane transport protein [Bacillus | 84 | 61 | |
| | | | | | stearothermophilus] pir\|A42478\|A42478 | | | |
| | | | | | glutamine transport protein glnQ - | | | |
| | | | | | [Bacillus tearothermophilus] | | | |
| 309 | 2 | 1114 | 722 | gi\|1644219 | RNA polymerase beta′ subunit [Bacillus | 84 | 72 | |
| | | | | | subtilis] | | | |
| 315 | 1 | 668 | 3 | gi\|149601 | thymidylate synthase (EC 2.1.1.45) | 84 | 72 | |
| | | | | | [Lactobacillus casei] | | | |
| 334 | 6 | 5375 | 6862 | gi\|1354211 | PET112-like protein [Bacillus subtilis] | 84 | 71 | |
| 338 | 10 | 7585 | 10479 | gi\|467444 | transcription-repair coupling factor | 84 | 68 | |
| | | | | | [Bacillus subtilis] sp\|P37474\|MFD_BACSU | | | |
| | | | | | TRANSCRIPTION-REPAIR COUPLING FACTOR | | | |
| | | | | | (TRCF). | | | |
| 338 | 14 | 12713 | 13018 | gi\|467448 | unknown [Bacillus subtilis] | 84 | 64 | |
| 340 | 3 | 1068 | 2273 | gi\|40046 | phosphoglucose isomerase A (AA 1-449) | 84 | 69 | |
| | | | | | [Bacillus stearothermophilus] | | | |
| | | | | | ir\|S15936\|NUBSSA glucose-6-phosphate | | | |
| | | | | | isornerase (EC 5.3.1.9) A - cillus | | | |
| | | | | | stearothermophilus | | | |
| 375 | 2 | 1430 | 1780 | gi\|1402531 | ORE10 [Enterococcus faecalis] | 84 | 64 | |
| 381 | 1 | 2 | 1279 | gnl\|PID\|e208212 | DNA topoisomerase IV [Streptococcus | 84 | 67 | |
| | | | | | pneumoniae] | | | |
| 421 | 1 | 5 | 151 | gi\|710632 | beta-glucosidase [Bacillus subtilis] | 84 | 73 | |
| 421 | 3 | 1229 | 1465 | gi\|710632 | beta-glucosidase [Bacillus subtilis] | 84 | 65 | |
| 445 | 1 | 1080 | 190 | gi\|46985 | glucose-1-phosphate thymidylyltransferase | 84 | 71 | |
| | | | | | [Salmonella enterica] ir\|S23342\|S23342 | | | |
| | | | | | hypothetical protein 6.1 - Salmonella | | | |
| | | | | | choleraesuis p\|P55254\|RFBA_SALAN GLUCOSE- | | | |
| | | | | | 1-PHOSPHATE THYMIDYLYLTRANSFERASE (EC | | | |
| | | | | | 7.7.24) (DTDP-GLUCOSE SYNTHASE) (DTDP- | | | |
| | | | | | GLUCOSE PYROPHOSPHO | | | |
| 466 | 9 | 10467 | 11006 | gi\|147403 | mannose permease subunit II-P-Man | 84 | 61 | |
| | | | | | [Escherichia coli] | | | |
| 497 | 2 | 469 | 1680 | gi\|1220529 | methyl transferase [Streptococcus | 84 | 72 | |
| | | | | | pneumoniae] | | | |
| 545 | 2 | 309 | 2171 | gi\|532548 | ORF15 [Enterococcus faecalis] | 84 | 68 | |
| 550 | 5 | 2744 | 2265 | gi\|455528 | ORF2 [Streptococcus thermophilus | 84 | 54 | |
| | | | | | bacteriophage] | | | |
| 637 | 5 | 2679 | 3545 | gnl\|PID\|e236571 | cell wall anchoring signal [Enterococcus | 84 | 72 | |
| | | | | | faecalis] | | | |
| 653 | 3 | 1023 | 736 | gi\|1408584 | LtrC [Lactococcus lactis lactis] | 84 | 72 | |
| 674 | 1 | 763 | 254 | gi\|467452 | unknown [Bacillus subtilis] | 84 | 66 | |
| 788 | 1 | 165 | 500 | gi\|1196907 | daunorubicin resistance protein | 84 | 66 | |
| | | | | | [Streptomyces peucetius] | | | |
| 675 | 1 | 1 | 621 | gi\|467470 | lysyl-tRNA thynthetase [Bacillus subtilis] | 83 | 71 | |
| 763 | 2 | 374 | 640 | gi\|145851 | envM [Escherichia coli] | 83 | 61 | |
| 774 | 1 | 658 | 2 | gi\|1256145 | YbbP [Bacillus subtilis] | 83 | 60 | |
| 3 | 1 | 58 | 327 | gi\|312443 | carbamoyl-phosphate synthase (glutamine- | 82 | 70 | |
| | | | | | hydrolysing) [Bacillus aldolyticus] | | | |
| 5 | 10 | 6389 | 7708 | sp\|P30053\|SY_STREQ | HISTIDYL-TRNA SYNTHETASE (EC 6.1.1.21) | 82 | 71 | |
| | | | | | (HISTIDINE--TRNA LIGASE) (HISRS). | | | |
| 27 | 4 | 1906 | 1145 | gi\|1303960 | YgjI [Bacillus subtilis] | 82 | 71 | |
| 32 | 2 | 1333 | 965 | gi\|1303839 | YqfR [Bacillus subtilis] | 82 | 60 | |
| 34 | 1 | 1643 | 324 | gnl\|PID\|e218042 | pyruvate kinase [Lactobacillus | 82 | 68 | |
| | | | | | delbrueckii] | | | |
| 55 | 9 | 4182 | 5054 | gi\|1685110 | tetrahydrofolate | 82 | 70 | |
| | | | | | dehydrogenase/cyclohydrolase | | | |
| | | | | | [Streptococcus thermophilus] | | | |
| 62 | 7 | 4644 | 4210 | gi\|143723 | putative [Bacillus subtilis] | 82 | 66 | |
| 88 | 2 | 995 | 1624 | gi\|535349 | CodW [Bacillus subtilis] | 82 | 66 | |
| 94 | 7 | 4790 | 3432 | gi\|1146247 | asparaginyl-tRNA synthetase [Bacillus | 82 | 67 | |
| | | | | | subtilis] | | | |
| 110 | 23 | 21590 | 20742 | gi\|467403 | seryl-tRNA synthetase [Bacillus subtilis] | 82 | 69 | |
| 114 | 7 | 8623 | 9228 | gi\|703442 | thyrmidine kinase [Streptococcus gordonii] | 82 | 68 | |
| 123 | 6 | 4499 | 4996 | gi\|467356 | unknown [Bacillus subtilis] | 82 | 68 | |
| 130 | 3 | 1413 | 2381 | gi\|308851 | ATP binding protein [Lactococcus lactis] | 82 | 64 | |
| 144 | 3 | 3292 | 2339 | gnl\|PID\|e183449 | putative ATP-binding protein of ABC-type | 82 | 62 | |
| | | | | | [Bacillus subtilis] | | | |
| 144 | 7 | 5331 | 5110 | gi\|335495 | A23R; putative [Vaccinia virus] | 82 | 47 | |
| 159 | 4 | 2533 | 5010 | gi\|143148 | transfer RNA-Leu synthetase [Bacillus | 82 | 71 | |
| | | | | | subtilis] | | | |
| 159 | 6 | 5845 | 5387 | gi\|467354 | unknown [Bacillus subtilis] | 82 | 55 | |
| 171 | 8 | 8510 | 9349 | gi\|1591672 | phosphate transgport system ATP-binding | 82 | 61 | |
| | | | | | protein [Methanococcus jannaschii] | | | |
| 222 | 5 | 2158 | 3402 | gi\|143444 | RNase PH [Bacillus subtilis] | 82 | 66 | |
| 254 | 6 | 1621 | 1112 | gi\|49316 | ORF2 gene product [Bacillus subtilis] | 82 | 61 | |
| 279 | 12 | 9839 | 8442 | gi\|1237019 | Srb [Bacillus subtilis] | 82 | 67 | |
| 288 | 1 | 22 | 546 | gi\|149393 | lacA [Lactococcus lactis] | 82 | 73 | |
| 345 | 8 | 5608 | 8118 | gi\|442360 | ClpC adenosine triphosphatase [Bacillus | 82 | 63 | |
| | | | | | subtilis] | | | |
| 367 | 3 | 1472 | 1110 | gi\|142463 | RNA polymerase alpha-core-subunit | 82 | 75 | |
| | | | | | [Bacillus subtilis] | | | |
| 367 | 9 | 4961 | 3660 | gi\|44073 | SecY protein [Lactococcus lactis] | 82 | 65 | |
| 367 | 28 | 12719 | 12411 | pir\|A02815\|R5BS23 | ribosomal protein L23 - Bacillus | 82 | 66 | |
| | | | | | stearothermophilus | | | |
| 367 | 29 | 13330 | 12701 | gi\|1165304 | L4 [Bacillus subtilis] | 82 | 67 | |
| 379 | 5 | 4396 | 3107 | gi\|887820 | UUG start; possible frameshift at end? | 82 | 71 | |
| | | | | | [Escherichia coli] | | | |
| 393 | 2 | 1145 | 711 | gi\|1303993 | YqkL [Bacillus subtilis] | 82 | 67 | |
| 416 | 1 | 3 | 650 | gi\|475113 | sucrase [Pediococcus pentosaceus] | 82 | 69 | |
| 477 | 1 | 1 | 1209 | gi\|309663 | signaling protein [Plasmid pCF10] | 82 | 62 | |
| 497 | 7 | 3760 | 4275 | gi\|532551 | ORF18 [Enterococcus faecalis] | 82 | 67 | |
| 535 | 3 | 4275 | 1666 | gi\|1747434 | KdpD [Clostridium acetobutylicum] | 82 | 62 | |
| 587 | 1 | 488 | 108 | gi\|1303840 | YgfS [Bacillus subtilis] | 82 | 71 | |
| 623 | 2 | 122 | 1348 | gi\|460259 | enolase [Bacillus subtilis] | 82 | 67 | |
| 656 | 1 | 1 | 1908 | gi\|1184680 | polynucleotide phosphorylase [Bacillus | 82 | 69 | |
| | | | | | subtilis] | | | |
| 687 | 1 | 227 | 1252 | gi\|40218 | PRPP synthetase (AA 1-317) [Bacillus | 82 | 64 | |
| | | | | | subtilis] | | | |
| 728 | 1 | 3 | 527 | gi\|1146183 | putative [Bacillus subtilis] | 82 | 65 | |
| 741 | 1 | 3 | 704 | gi\|153804 | sucrose-6-phosphate hydrolase | 82 | 66 | |
| | | | | | [Streptococcus mutans] | | | |
| 846 | 1 | 458 | 3 | gnl\|PID\|e221400 | tex gene product [Bordetella pertussis] | 82 | 76 | |
| 865 | 1 | 18 | 308 | gi\|416006 | orf CJ01.2 [Campylobacter jejuni] | 82 | 57 | |
| 876 | 1 | 207 | 689 | gi\|1064795 | function unknown [Bacillus subtilis] | 82 | 62 | |
| 925 | 1 | 436 | 128 | gi\|1773195 | hypothetical [Escherichia coli] | 82 | 74 | |
| 983 | 2 | 280 | 474 | gi\|40026 | homologous to E.coli gidA [Bacillus | 82 | 78 | |
| | | | | | subtilis] | | | |
| 12 | 3 | 4778 | 5788 | gi\|1100074 | tryptophanyl-tRNA synthetase [Clostridium | 81 | 68 | |
| | | | | | longisporum] | | | |
| 31 | 4 | 2984 | 4456 | gi\|849026 | hypothetical 54.6-kDa protein [Bacillus | 81 | 68 | |
| | | | | | subtilis] | | | |
| 34 | 6 | 6707 | 6910 | gi\|606067 | ORF_f444 [Escherichia coli] | 81 | 54 | |
| 37 | 1 | 1 | 144 | gi\|1303854 | YggG [Bacillus subtilis] | 81 | 59 | |
| 37 | 3 | 2671 | 1958 | gi\|40056 | phoP gene product [Bacillus subtilis]81 | 61 | | |
| 57 | 3 | 1733 | 3220 | gi\|1657506 | hypothetical protein [Escherichia coli] | 81 | 66 | |
| 60 | 5 | 5564 | 4440 | gi\|143370 | phosphoribosylpyrophosphate | 81 | 63 | |
| | | | | | amidotransferase (PUR-F; EC 2.4.2.14) | | | |
| | | | | | Bacillus subtilis] | | | |
| 73 | 3 | 2706 | 1450 | gi\|853767 | UDP-N-acetylglucosamine 1- | 81 | 61 | |
| | | | | | carboxyvinyltransferase [Bacillus ubtilis] | | | |
| 88 | 4 | 1977 | 2732 | gnl\|PID\|e137596 | heat shock induced protein HtpO | 81 | 67 | |
| | | | | | [Lactobacillus leichniannii] | | | |
| 88 | 5 | 2723 | 3040 | gi\|535350 | CodX [Bacillus subtilis] | 81 | 65 | |
| 101 | 4 | 3091 | 2435 | gi\|1109687 | ProZ [Bacillus subtilis] | 81 | 60 | |
| 101 | 7 | 5884 | 4661 | gi\|1109684 | ProV [Bacillus subtilis] | 81 | 64 | |
| 101 | 9 | 7501 | 7965 | gi\|1001768 | queuosine biosynthesis protein QueA | 81 | 47 | |
| | | | | | [Synechocystis sp.] | | | |
| 116 | 5 | 2766 | 3395 | gi\|1146234 | dihydrodipicolinate reductase [Bacillus | 81 | 66 | |
| | | | | | subtilis] | | | |
| 121 | 5 | 4811 | 5074 | gi\|153765 | DNA polymerase I [Streptococcus | 81 | 64 | |
| | | | | | pneumoniae] | | | |
| 121 | 7 | 5203 | 7488 | gi\|153765 | DNA polymerase I [Streptococcus | 81 | 70 | |
| | | | | | pneumoniae] | | | |
| 127 | 5 | 5103 | 3826 | gi\|290561 | o188 [Escherichia coli] | 81 | 48 | |
| 147 | 1 | 299 | 1279 | gi\|467462 | cysteine synthetase A [Bacillus subtilis] | 81 | 65 | |
| 147 | 2 | 1370 | 1861 | gnl\|PID\|e281583 | hypothetical 16.4 kd protein [Bacillus | 81 | 63 | |
| | | | | | subtilis] | | | |
| 154 | 1 | 168 | 638 | gi\|149533 | coniugated bile acid hydrolase | 81 | 66 | |
| | | | | | [Lactobacillus plantarum] | | | |
| 154 | 2 | 1074 | 1277 | gnl\|PID\|e242898 | aBIR [Lactococcus lactis] | 81 | 59 | |
| 158 | 14 | 13790 | 12324 | gi\|558559 | pyrimidine nucleoside phosphorylase | 81 | 71 | |
| | | | | | [Bacillus subtilis] | | | |
| 164 | 5 | 2469 | 3035 | gi\|727436 | putative 20-kDa protein [Lactococcus | 81 | 61 | |
| | | | | | lactis] | | | |
| 223 | 8 | 5293 | 6153 | gn1\|PID\|e254976 | hypothetical protein [Bacillus subtilis] | 81 | 66 | |
| 238 | 1 | 185 | 937 | gi\|622991 | mannitol transport protein [Bacillus | 81 | 68 | |
| | | | | | stearotherinophilus]sp\|P50852 PTMB_BACST | | | |
| | | | | PTS SYSTEM, MANNITOL-SPECIFIC IIBC | | | | |
| | | | | | COMPONENT EIIBC-MTL) (MANNITOL-PERMEASE | | | |
| | | | | | IIBC COMPONENT) (PHOSPHOTRANSFERASE NZYME | | | |
| | | | | | II, BC COMPONENT) (EC 2.7.1.69) (EII-MTL). | | | |
| 276 | 7 | 3109 | 2819 | pir\|A41207\|A41207 | collagen 13, nonfibrillar - freshwater | 81 | 77 | |
| | | | | | sponge (Ephvdatia muelleri) (fragrnent) | | | |
| 307 | 2 | 1983 | 3617 | gi\|153742 | dextran glucosidase [Streptococcus mutans] | 81 | 69 | |
| 322 | 2 | 122 | 286 | gi\|296147 | Asd protein [Bacillus subtilis] | 81 | 63 | |
| 326 | 6 | 5352 | 4513 | gi\|40041 | pyruvate dehydrogenase (lipoamide) | 81 | 69 | |
| | | | | | [Bacillus stearothermophilus] | | | |
| | | | | | ir\|S10798 DEBSPF pyruvate dehydrogenase | | | |
| | | | | | (lipoamide) (EC 1.2.4.1) pha chain - | | | |
| | | | | | Bacillus stearothermophilus | | | |
| 329 | 3 | 1774 | 1448 | gi\|1117994 | surface antigen A variant precursor | 81 | 72 | |
| | | | | | [Streptococcus pneumoniae] | | | |
| 346 | 3 | 1056 | 1199 | gi\|536970 | ORF_fS43 [Escherichia coli] | 81 | 43 | |
| 362 | 4 | 1131 | 2213 | gi\|1001826 | cadmium-transporting ATPase [Synechocystis | 81 | 64 | |
| | | | | | sp.] | | | |
| 391 | 3 | 1345 | 575 | gi\|1184967 | ScrR [Streptococcus mutans] | 81 | 66 | |
| 441 | 3 | 1873 | 3447 | gi\|1742675 | Phosphotransferase system enzyme II (EC | 81 | 64 | |
| | | | | | 2.7.1.69) MalX [Escherichia coli] | | | |
| 556 | 2 | 1062 | 493 | gi\|1553037 | RecN [Bacillus subtilis] | 81 | 66 | |
| 710 | 2 | 361 | 816 | gi\|1303840 | YgfS [Bacillus subtilis] | 81 | 68 | |
| 804 | 1 | 403 | 2 | gi\|149533 | conjugated bile acid hydrolase | 81 | 68 | |
| | | | | | [Lactobacillus_plantarum] | | | |
| 5 | 7 | 3311 | 4255 | gi\|407881 | stringent response-like protein | 80 | 62 | |
| | | | | | [Streptococcus equisimilis] | | | |
| | | | | | pir\|S39975\|S39975 stringent response-like | | | |
| | | | | | protein - Streptococcus quisimilis | | | |
| 17 | 10 | 8283 | 8438 | gi\|1326394 | B0218.7 gene product [Caenorhabditis | 80 | 53 | |
| | | | | | elegans] | | | |
| 17 | 15 | 12258 | 12776 | gi\|532551 | ORF18 [Enterococcus faecalis] | 80 | 63 | |
| 22 | 1 | 3 | 2180 | gi\|44027 | Tma protein [Lactococcus lactis] | 80 | 70 | |
| 37 | 6 | 3707 | 5140 | pir\|B47154\|B47154 | signal recognition particle 54K chain | 80 | 64 | |
| | | | | | homolog Ffh - Bacillus subtilis | | | |
| 42 | 1 | 2 | 259 | gi\|1066157 | chaperonin-10 [Thermus aquaticus | 80 | 66 | |
| | | | | | thermophilus] | | | |
| 49 | 16 | 11106 | 11309 | gi\|1136430 | similar to hypothetical protein YM49959.11C | 80 | 53 | |
| | | | | | of S.cerevisiae. [Homo sapiens] | | | |
| 60 | 4 | 4465 | 3407 | gi\|143371 | phosphoribosyl aminoimidazole synthetase | 80 | 62 | |
| | | | | | (PUR-M) [Bacillus subtilis] | | | |
| | | | | | pir\|H29326\|AJBSCL | | | |
| | | | | | phosphoribosylformyiglycinamidine cyclo- | | | |
| | | | | | ligase EC 6.3.3.1) Bacillus subtilis | | | |
| 60 | 9 | 9023 | 8745 | pir\|E29326\|E29326 | hypothetical protein (pur operon) - | 80 | 50 | |
| | | | | | Bacillus subtilis | | | |
| 66 | 1 | 1 | 783 | gi\|520753 | DNA topoisornerase I [Bacillus subtilis] | 80 | 66 | |
| 80 | 3 | 2519 | 1821 | gnl\|PID\|e236074 | beta-phosphoglucomutase [Lactococcus | 80 | 62 | |
| | | | | | lactis] | | | |
| 83 | 9 | 6268 | 5378 | gi\|1070079 | R08B4.1 [Caenorhabditis elegans] | 80 | 72 | |
| 89 | 18 | 19093 | 18845 | gi\|39451 | type III restriction endonuclease | 80 | 72 | |
| | | | | | [Bacillus cereus] ir\|S15518\|JC1116 type | | | |
| | | | | | III site-specific deoxyribonuclease (EC | | | |
| | | | | | 1.21.5) - Bacillus cereus (fragment) | | | |
| 97 | 1 | 366 | 4 | gi\|148506 | dnaJ [Erysipelothrix rhusiopathiae] | 80 | 70 | |
| 107 | 2 | 1094 | 591 | sp\|P37214\|ERA_STRM | GTP-BINDING PROTEIN ERA HOMOLOG. | 80 | 64 | |
| | | | | U | | | | |
| 114 | 3 | 1474 | 5076 | gi\|43863 | pyruvate-flavodoxin oxidoreductase | 80 | 62 | |
| | | | | | [Kiebsiella pneumoniae] ir\|S01997\|QQKBFP | | | |
| | | | | | pyruvate (flavodoxin) dehydrogenase (EC | | | |
| | | | | | 1.2.99.-) Klebsiella pneumoniae | | | |
| 117 | 3 | 1456 | 2367 | gi\|40031 | spoOJ93 gene product [Bacillus subtilis] | 80 | 56 | |
| 126 | 3 | 1857 | 709 | gi\|551854 | ORF2 [Erwinia herbicola] | 80 | 68 | |
| 128 | 28 | 23265 | 22447 | gi\|437916 | isoleucyl-tRNA synthetase [Staphylococcus | 80 | 63 | |
| | | | | | aureus] | | | |
| 133 | 10 | 9128 | 9856 | gi\|520844 | orf4 [Bacillus subtilis] | 80 | 63 | |
| 158 | 4 | 3926 | 2703 | gi\|944943 | phosphopentomutase [Bacillus subtilis] | 80 | 64 | |
| 172 | 5 | 3732 | 3920 | sp\|P20182\|YT14_STR | HYPOTHETICAL 29.1 KD PROTEIN IN TRANSPOSON 80 63 | | | |
| | | | | FR | TN4556. | | | |
| 180 | 16 | 15548 | 16393 | gi\|1773200 | hypothotical protein [Escherichia coli] | 80 | 66 | |
| 181 | 10 | 8597 | 7407 | gi\|143806 | AroF [Bacillus subtilis] | 80 | 64 | |
| 194 | 4 | 1580 | 1957 | gi\|47394 | 5-oxoprolyl-peptidase [Streptococcus | 80 | 66 | |
| | | | | | pyogenes] | | | |
| 213 | 5 | 3515 | 4078 | gnl\|PID\|e199384 | pyrR gene product [Lactobacillus | 80 | 65 | |
| | | | | | plantarum] | | | |
| 217 | 11 | 7724 | 8395 | gi\|1561567 | Unknown [Bacillus subtilis] | 80 | 65 | |
| 218 | 6 | 4843 | 5331 | gi\|1574120 | branched-chain-amino-acid transaminase | 80 | 64 | |
| | | | | | [Haemophilus influenzae] | | | |
| 225 | 8 | 6092 | 5829 | gi\|530459 | similar to phosphotransferase EII | 80 | 52 | |
| | | | | | [Mycoplasma capricolum] | | | |
| 229 | 2 | 1170 | 178 | gi\|1502419 | P1sX [Bacillus subtilis] | 80 | 59 | |
| 243 | 3 | 2545 | 2150 | gi\|1732315 | transport system permease homolog | 80 | 64 | |
| | | | | | [Listeria monocytogenes] | | | |
| 275 | 2 | 694 | 939 | gi\|1256629 | cold-shock protein [Bacillus subtilis] | 80 | 65 | |
| 307 | 3 | 3607 | 3888 | gi\|1321625 | exo-alpha-1, 4-glucosidase [Bacillus | 80 | 73 | |
| | | | | | stearothermophilus | | | |
| 322 | 3 | 284 | 1090 | gi\|142828 | aspartate semialdehyde dehydrogenase | 80 | 62 | |
| | | | | | [Bacillus subtilis] sp\|Q04797\|DHAS_BACSU | | | |
| | | | | | ASPARTATE- SEMIALDEHYDE DEHYDROGENASE (EC | | | |
| | | | | | .2.1.11) | (ASA DEHYDROGENASE). | | |
| 349 | 1 | 2 | 616 | gi\|495089 | recombinase [Staphylococcus aureus] | 80 | 65 | |
| 367 | 7 | 3511 | 2924 | gi\|44074 | adenylate kinase [Lactococcus lactis] | 80 | 64 | |
| 386 | 7 | 4305 | 5306 | gi\|149396 | lacD [Lactococcus lactis] | 80 | 64 | |
| 394 | 3 | 2642 | 3757 | pir\|B39096\|B39096 | alkaline phosphatase (EC 3.1.3.1) III | 80 | 64 | |
| | | | | | precursor - Bacillus subtilis | | | |
| 399 | 17 | 12070 | 13488 | gi\|1591862 | oxaloacetate decarboxylase, alpha subunit | 80 | 61 | |
| | | | | | [Methanococcus jannaschii] | | | |
| 399 | 24 | 22979 | 24907 | gi\|40026 | homologous to E.coli gidA [Bacillus | 80 | 67 | |
| | | | | | subtilis] | | | |
| 435 | 3 | 2217 | 2032 | gi\|559863 | clyA [Plasmid pAD1] | 80 | 78 | |
| 466 | 1 | 3 | 1208 | gi\|467330 | replicativo DNA helicaso [Bacillus | 80 | 61 | |
| | | | | | subtilis] | | | |
| 475 | 4 | 3402 | 2947 | gi\|532547 | ORF14 [Enterococcus faecalis] | 80 | 68 | |
| 491 | 4 | 3844 | 4392 | gi\|473892 | large-conductance mechanosensitive channel | 80 | 56 | |
| | | | | | [Escherichia coli] gi\|473420 yhdC | | | |
| | | | | | [Escherichia coli] | | | |
| 605 | 2 | 1252 | 338 | gi\|580875 | ipa-57d gene product [Bacillus subtilis] | 80 | 69 | |
| 615 | 1 | 760 | 14 | gi\|467469 | unknown [Bacillus subtilis] | 80 | 66 | |
| 668 | 1 | 117 | 587 | pir\|S16974\|R5BS7F | ribosomal protein L9 - Bacillus | 80 | 71 | |
| | | | | | stearothermophilus | | | |
| 684 | 2 | 694 | 464 | gi\|786314 | Highly similar to Glycogen debranching | 80 | 33 | |
| | | | | | enzyme 4-alpha-glucanotransferase, Swiss | | | |
| | | | | | Prot. accession number P35573) | | | |
| | | | | | Saccharomyces cerevisiae] | | | |
| 767 | 1 | 1 | 480 | gi\|41828 | istB gene product [Escherichia coli] | 80 | 52 | |
| 818 | 1 | 1 | 357 | gi\|743856 | intrageneric coaggregation-relevant | 80 | 66 | |
| | | | | | adhesin [Streptococcus gordonii] | | | |
| 833 | 1 | 325 | 95 | gi\|1561567 | Unknown [Bacillus subtilis] | 80 | 68 | |
| 934 | 1 | 394 | 56 | gi\|1001706 | ABC transporter subunit [Synechocystis | 80 | 63 | |
| | | | | | sp.] | | | |
| 948 | 1 | 465 | 4 | gi\|1773196 | similar to B. stearothermophilus N- | 80 | 59 | |
| | | | | | carbamyl-L-amino acid amidohydrolase | | | |
| | | | | | [Escherichia coli] | | | |
| 949 | 1 | 61 | 411 | gi\|1330380 | Similar to cystathionine gamma-lyase | 80 | 61 | |
| | | | | | [Caenorhabditis elegans] | | | |
| 20 | 2 | 468 | 1262 | gi\|1256698 | chitinase [Serratia marcescens] | 79 | 67 | |
| 22 | 3 | 2420 | 3238 | gi\|467460 | unknown [Bacillus subtilis] | 79 | 59 | |
| 24 | 1 | 39 | 1109 | gi\|1303821 | YgfE [Bacillus subtilis] | 79 | 61 | |
| 26 | 1 | 214 | 873 | gi\|403984 | deoxyguanosine kinase/deoxyadenosine | 79 | 68 | |
| | | | | | kinase(I) subunit Lactobacillus | | | |
| | | | | | acidophilus] | | | |
| 47 | 8 | 10268 | 8106 | gi\|153657 | mismatch repair protein [Streptococcus | 79 | 63 | |
| | | | | | pneumoniae] pir\|A33589\|A33589 mismatch | | | |
| | | | | | repair protein hexB - Streptococcus | | | |
| | | | | | neumoniae | | | |
| 48 | 9 | 9905 | 9198 | gi\|290566 | f213 [Escherichia coli] | 79 | 53 | |
| 58 | 4 | 4677 | 3694 | gi\|1653179 | hydrogenase subunit [Synechocystis sp.] | 79 | 52 | |
| 63 | 6 | 3605 | 5443 | gi\|1064813 | homologous to sp:PHOR_BACSU [Bacillus | 79 | 55 | |
| | | | | | subtilis] | | | |
| 88 | 8 | 5493 | 4771 | gnl\|PID\|e208252 | unidentified [Streptococcus pneumoniae] | 79 | 57 | |
| 146 | 8 | 6649 | 5609 | gi\|153676 | tagatose 1,6-aldolase [Streptococcus | 79 | 63 | |
| | | | | | mutans] | | | |
| 149 | 4 | 2554 | 1976 | gi\|1216490 | DNA/pantothenate metabolism flavoprotein | 79 | 64 | |
| | | | | | [Streptococcus mutans] | | | |
| 158 | 2 | 1859 | 1143 | gi\|1276873 | DeoD [Streptococcus thermophilus] | 79 | 67 | |
| 179 | 19 | 19022 | 18417 | gi\|467372 | 3′-exo-deoxyribonuclease [Bacillus | 79 | 61 | |
| | | | | | subtilis] | | | |
| 222 | 2 | 982 | 230 | gi\|142988 | membrane transport protein [Bacillus | 79 | 59 | |
| | | | | | stearothemophilus] pir\|A42478\|A42478 | | | |
| | | | | | glutamine transport protein glnQ - | | | |
| | | | | | Bacillus tearothermophilus | | | |
| 228 | 6 | 4060 | 3401 | gi\|413950 | ipa-26d gene product [Bacillus subtilis] | 79 | 55 | |
| 229 | 3 | 3270 | 1219 | gnl\|PID\|e186699 | MmsA [Streptococcus pneumoniae] | 79 | 62 | |
| 238 | 7 | 5750 | 5100 | gi\|596046 | L8003.16 gene product [Saccharomyces | 79 | 55 | |
| | | | | | cerevisiae] | | | |
| 269 | 10 | 6664 | 5489 | gi\|1303788 | YgeH [Bacillus subtilis] | 79 | 63 | |
| 274 | 1 | 1 | 1143 | gi\|153062 | helicase [Staphylococcus aureus] | 79 | 65 | |
| 290 | 9 | 7364 | 8779 | gi\|466882 | pps1; B1496_c2_189 [Mycobacterium leprae] | 79 | 64 | |
| 292 | 22 | 18122 | 17595 | gi\|1303951 | YgiZ [Bacillus subtilis] | 79 | 61 | |
| 316 | 3 | 864 | 2003 | gi\|1146207 | putative [Bacillus subtilis] | 79 | 58 | |
| 326 | 2 | 1772 | 360 | gi\|40044 | dihydrolipoamide dehydrogenase [Bacillus | 79 | 65 | |
| | | | | | stearothermophilus] ir\|S13839\|813839 | | | |
| | | | | | dihydrolipoamide dehydrogenase (EC | | | |
| | | | | | 1.8.1.4) - cillus stearothermophilus | | | |
| 363 | 5 | 5738 | 7180 | gi\|1657519 | hypothetical protein [Eseherichia coli] | 79 | 63 | |
| 367 | 11 | 5668 | 5447 | gi\|216337 | ORE for L30 ribosmnal protein [Bacillus | 79 | 63 | |
| | | | | | subtilis] | | | |
| 375 | 5 | 4346 | 3393 | gi\|1644203 | unknown [Bacillus subtilis] | 79 | 62 | |
| 406 | 2 | 666 | 1481 | gi\|49316 | ORF2 gene product [Bacillus subtilis] | 79 | 58 | |
| 460 | 7 | 4973 | 5860 | gi\|1276664 | acetyl-CoA carboxylase carboxytransferase | 79 | 62 | |
| | | | | | beta subunit [Porphyra purpurea] | | | |
| 486 | 1 | 380 | 3 | gi\|1256618 | transport protein [Bacillus subtilis] | 79 | 63 | |
| 488 | 3 | 987 | 1997 | gi\|532547 | ORE14 [Enterococcus faecalis] | 79 | 69 | |
| 500 | 2 | 1358 | 681 | gi\|535662 | transposase [Insertion sequence IS1251] | 79 | 75 | |
| 523 | 3 | 1803 | 820 | gi\|142981 | ORF5; This ORF includes a region (aa23- | 79 | 62 | |
| | | | | | 103) containing a potential ron-sulphur | | | |
| | | | | | centre homologous to a region of | | | |
| | | | | | Rhodospirillum rubrum nd Chromatium | | | |
| | | | | | vinosum; putative [Bacillus | | | |
| | | | | | stearothermophilus] pir\|PQ0299\|PQ0299 | | | |
| | | | | | hypothetical protein 5 (gidA 3′ region) - | | | |
| 552 | 2 | 2401 | 902 | gi\|887851 | ORF_o479 [Escherichia coli] | 79 | 63 | |
| 587 | 2 | 622 | 434 | gi\|1303840 | YgfS [Bacillus subtilis] | 79 | 66 | |
| 612 | 1 | 1 | 378 | gi\|1064791 | function unknown [Bacillus subtilis] | 79 | 56 | |
| 654 | 1 | 2 | 286 | pir\|A47079\|A47079 | heat shock protein DnaJ - Lactococcus | 79 | 75 | |
| | | | | | lactis | | | |
| 701 | 2 | 325 | 534 | gi\|143793 | tyrosyl-tRNA synthetase [Bacillus | 79 | 63 | |
| | | | | | caldotenax] | | | |
| 708 | 2 | 369 | 566 | gi\|488430 | alcohol dehydrogenase 2 [Entamoeba | 79 66 | | |
| | | | | | histolytica] | | | |
| 840 | 1 | 140 | 1078 | gi\|1573250 | aspartate aminotransferase (aspC) | 79 | 65 | |
| | | | | | [Haemophilus influenzae] | | | |
| 5 | 9 | 5555 | 6049 | gi\|407880 | ORF1 [Streptococcus equisimilis] | 78 | 58 | |
| 33 | 4 | 3755 | 4597 | gi\|1742846 | NH(3)-dependent NAD(+) synthetase (EC | 78 | 64 | |
| | | | | | 6.3.5.1) (Nitrogen-regulatory protein) | | | |
| | | | | | [Escherichia coli] | | | |
| 60 | 7 | 8100 | 5854 | gi\|143369 | phosphoribosylformyl glycinamidine | 78 | 62 | |
| | | | | | synthetase II (PUR-Q) [Bacillus ubtilis] | | | |
| 65 | 4 | 3407 | 2625 | gi\|1661179 | high affinity branched chain amino acid | 78 | 67 | |
| | | | | | transport protein [Streptococcus mutans] | | | |
| 76 | 7 | 5760 | 4747 | gi\|1161061 | dioxygenase [Methylobacterium extorguens] | 78 | 62 | |
| 81 | 11 | 7141 | 6824 | gi\|1072380 | ORF3 [Lactococcus lactis] | 78 | 67 | |
| 83 | 5 | 2559 | 2843 | gi\|1256896 | L9606.1 gene product [Saccharomyces | 78 | 52 | |
| | | | | | cerevisiae] | | | |
| 85 | 4 | 4298 | 3288 | gi\|142612 | branched chain alpha-keto acid | 78 | 61 | |
| | | | | | dehydrogenase El-beta [Bacillus ubtilis] | | | |
| 85 | 8 | 6723 | 6307 | gi\|1303941 | YqiV [Bacillus subtilis] | 78 | 62 | |
| 88 | 10 | 6477 | 6689 | gi\|222585 | nucleocapsid protein [Sialodacryoadenitis | 78 | 57 | |
| | | | | | virus] | | | |
| 93 | 5 | 1838 | 2641 | gi\|405133 | putative [Bacillus subtilis] | 78 | 51 | |
| 117 | 1 | 3 | 707 | gi\|40027 | homologous to E.coli gidB [Bacillus | 78 | 64 | |
| | | | | | subtilis] | | | |
| 117 | 11 | 9624 | 8338 | gi\|467403 | seryl-tRNA synthetase [Bacillus subtilis] | 78 | 63 | |
| 132 | 2 | 2323 | 2024 | gi\|683484 | fusion protein [Mumps virus] | 78 | 63 | |
| 133 | 3 | 2241 | 3413 | gi\|405622 | unknown [Bacillus subtilis] | 78 | 63 | |
| 150 | 2 | 568 | 1425 | gnl\|PID\|e185373 | ceuD gene product [Campylobacter coil] | 78 | 52 | |
| 155 | 2 | 604 | 1182 | gi\|285628 | transcription antitermination factor NusG | 78 | 61 | |
| | | | | | [Bacillus subtilis] pir\|S39859\|539859 | | | |
| | | | | | transcription antitermination factor NusG | | | |
| | | | | | - acillus subtilis | | | |
| 156 | 2 | 308 | 2629 | gi\|1573874 | ATP-dependent protease binding subunit | 78 | 59 | |
| | | | | | (clpB) [Haemophilus influenzae] | | | |
| 158 | 3 | 2719 | 1868 | gi\|1638804 | purine nucleoside phosphorylase [Bacillus | 78 | 64 | |
| | | | | | stearothermophilus] | | | |
| 160 | 5 | 2058 | 3050 | gi\|1161061 | dioxygenase [Methylobacterium extorguens] | 78 | 60 | |
| 161 | 3 | 1466 | 3295 | gnl\|PID\|e280490 | unknown [Streptococcus pneumoniae] | 78 | 62 | |
| 169 | 1 | 2 | 2206 | gi\|1072361 | pyruvate-formate-lyase [Clostridium | 78 | 61 | |
| | | | | | pasteurianum] | | | |
| 171 | 2 | 2833 | 3897 | sp\|P28367\| | PROBABLE PEPTIDE CHAIN RELEASE FACTOR 2 | 78 | 64 | |
| | | | | RF2_BACS | (RF-2) (FRAGMENT). | | | |
| | | | | U | | | | |
| 180 | 15 | 14851 | 15567 | gi\|1773199 | hypothetical proteinh [Escherichia coli] | 78 | 67 | |
| 185 | 1 | 1142 | 3 | pir\|C33496\|C33496 | hisC homolog - Bacillus subtilis | 78 | 59 | |
| 188 | 3 | 1863 | 4178 | gnl\|PID\|e256969 | nifJ gene product [Enterobacter | 78 | 62 | |
| | | | | | agglomerans] | | | |
| 216 | 7 | 5136 | 5600 | gnl\|PID\|e276830 | UDP-N-acetylglucosamine 1- | 78 | 60 | |
| | | | | | carboxyvinyltransferase [Bacillus | | | |
| | | | | | subtilis] | | | |
| 216 | 8 | 5531 | 6508 | gnl\|PID\|e276830 | UDP-N-acetylglucosamine 1- | 78 | 63 | |
| | | | | | carboxyvinyltransferase [Bacillus | | | |
| | | | | | subtilis] | | | |
| 238 | 26 | 24515 | 25387 | gi\|396681 | rhamnulose-1-phosphate aldolase | 78 | 56 | |
| | | | | | [Escherichia coli] | | | |
| 256 | 6 | 4189 | 6237 | gi\|467427 | methionyl-tRNA synthetase [Bacillus | 78 | 67 | |
| | | | | | subtills] | | | |
| 292 | 4 | 2063 | 2353 | gi\|1742823 | Proton/sodium-glutamate symport protein | 78 | 62 | |
| | | | | | (Glutamate-aspartate carrier protein) | | | |
| | | | | | [Escherichia coli] | | | |
| 305 | 1 | 268 | 1872 | gi\|143582 | spoIIIEA protein [Bacillus subtilis] | 78 | 58 | |
| 337 | 2 | 2332 | 1448 | gi\|308861 | GTG start codon [Lactococcus lactis] | 78 | 63 | |
| 338 | 2 | 606 | 1466 | gi\|1773142 | similar to the 20.2kd protein in TETB-EXOA | 78 | 66 | |
| | | | | | region of B. subtilis [Escherichia coli] | | | |
| 362 | 1 | 109 | 429 | gi\|150719 | cadmium resistance protein [Plasmid pI258] | 78 | 51 | |
| 379 | 3 | 2878 | 1922 | gi\|887824 | ORF_o310 [Escherichia coli] | 78 | 60 | |
| 446 | 2 | 962 | 1636 | gi\|537235 | Kenn Rudd identifies as gpmB [Escherichia | 78 | 43 | |
| | | | | | coli] | | | |
| 495 | 5 | 3038 | 3502 | gi\|634107 | kdpB [Escherichia coli] | 78 | 58 | |
| 502 | 3 | 3077 | 1470 | gi\|1652592 | peptide-chain-release factor 3 | 78 | 58 | |
| | | | | | [Synechocystis sp.] | | | |
| 523 | 1 | 2 | 616 | gi\|289288 | lexA [Bacillus subtilis] | 78 | 59 | |
| 571 | 1 | 99 | 365 | gnl\|PID\|e249644 | YneP [Bacillus subtilis] | 78 | 65 | |
| 573 | 3 | 1258 | 1971 | gi\|1731683 | component II of heptaprenyl diphosphate | 78 | 50 | |
| | | | | | synthase [Bacillus stearothermophilus] | | | |
| 575 | 2 | 434 | 168 | gi\|58831 | The experimental evidence that this | 78 | 47 | |
| | | | | | sequence codes for a complete gag otein is | | | |
| | | | | | that transfection of the viral genome | | | |
| | | | | | results in oduction of infectious virus | | | |
| | | | | | [Cas-Br-E murine leukemia virus] | | | |
| | | | | | p\|P27460\|GAG_MLVCB GAG POLYPROTEIN | | | |
| | | | | | (CONTAINS: CORE PROTEIN P15; N | | | |
| 607 | 1 | 148 | 708 | gi\|530410 | Ala-tRNA synthetase [Mycoplasma | 78 | 63 | |
| | | | | | capricolum] | | | |
| 655 | 2 | 300 | 899 | gi\|147404 | mannose permease subunit II-M-Man | 78 | 60 | |
| | | | | | [Escherichia coli] | | | |
| 704 | 1 | 181 | 2 | gi\|467430 | unknown [Bacillus subtilis] | 78 | 63 | |
| 708 | 1 | 1 | 378 | gi\|443985 | alcohol dehydrogenase [Entamoeba | 78 | 61 | |
| | | | | | histolytica] | | | |
| 732 | 1 | 661 | 2 | gi\|1064791 | function umknown [Bacillus subtilis] | 78 | 55 | |
| 785 | 1 | 2 | 679 | gi\|556014 | DP-N-acetyl muramate-alanine ligase | 78 | 59 | |
| | | | | | [Bacillus subtilis] | | | |
| 786 | 1 | 2 | 172 | gi\|536992 | SugES [Escherichia coli] | 78 | 60 | |
| 820 | 2 | 1602 | 1144 | gi\|153749 | UDPglucose 4-epimerase [Streptococcus | 78 | 60 | |
| | | | | | thermophilus] pir\|A44509\|A44509 UDPglucose | | | |
| | | | | | 4-epimerase (EC 5.1.3.2) - treptococcus | | | |
| | | | | | thermophilus | | | |
| 887 | 1 | 337 | 2 | gi\|495046 | tripeptidase [Lactococcus lactis] | 78 | 70 | |
| 970 | 2 | 395 | 234 | gi\|1652190 | Fat protein [Synechocystis sp.] | 78 | 51 | |
| 4 | 7 | 6069 | 5656 | gi\|1573482 | high affinity ribose transport protein | 77 | 51 | |
| | | | | | (rbsD) [Haemophilus influenzae] | | | |
| 45 | 16 | 12065 | 14047 | gi\|666069 | orf2 gene product [Lactobacillus | 77 | 51 | |
| | | | | | leichmannii] | | | |
| 49 | 13 | 8199 | 9992 | gnl\|PID\|e228615 | homologous to yqcC of the skin element | 77 | 59 | |
| | | | | | [Bacillus subtilis] | | | |
| 60 | 2 | 2895 | 1300 | gi\|143373 | phosphoribosyl aminoimidazole carboxy | 77 | 63 | |
| | | | | | formyl ormyltransferase/inosine | | | |
| | | | | | monophosphate cyclohydrolase (PUR-H(J)) | | | |
| | | | | | Bacillus subtilis] | | | |
| 70 | 6 | 5118 | 3874 | gi\|912464 | No definition line found [Escherichia | 77 | 53 | |
| | | | | | coli] | | | |
| 70 | 7 | 5172 | 5756 | gi\|288413 | glutamate dehydrogenase (NADP+) | 77 | 65 | |
| | | | | | [Corynebacterium glutamicum] | | | |
| | | | | | pir\|S32227\|S32227 glutamate dehydrogenase | | | |
| | | | | | (NADP+) (EC 1.4.1.4) - orynebacterium | | | |
| | | | | | glutamicum | | | |
| 74 | 10 | 7303 | 5864 | gi\|289284 | cysteinyl-tRNA synthetase [Bacillus | 77 | 62 | |
| | | | | | subtilis] | | | |
| 74 | 12 | 9559 | 8078 | gi\|289282 | glutamyl-tRNA synthetase [Bacillus | 77 | 57 | |
| | | | | | subtilis] | | | |
| 88 | 6 | 3013 | 3843 | gi\|535351 | CodY [Bacillus subtilis] | 77 | 57 | |
| 89 | 6 | 5749 | 2510 | gi\|1695686 | pyruvate carboxylase [Bacillus | 77 | 62 | |
| | | | | | stearothemophilus] | | | |
| 91 | 1 | 396 | 728 | gi\|1184044 | L-glutamine:D-fructose-6-P | 77 | 66 | |
| | | | | | amidotransferase precursor [Thermus | | | |
| | | | | | aguaticus thermophilus] | | | |
| 98 | 4 | 3992 | 5710 | gi\|984804 | transmembrane protein [Bacillus subtilis] | 77 | 56 | |
| 124 | 1 | 2 | 940 | gnl\|PID\|e199002 | prolidase PepQ [Lactobacillus deibrueckii] | 77 | 60 | |
| 158 | 5 | 4845 | 4171 | gi\|435297 | unknown [Lactococcus lactis] | 77 | 48 | |
| 162 | 6 | 7426 | 5882 | gi\|142992 | glycerol kinase (glpK) (BC 2.7.1.30) | 77 | 60 | |
| | | | | | [Bacillus subtilis] pir\|B45868\|B45868 | | | |
| | | | | | glycerol kinase (EC 2.7.1.30) - Bacillus | | | |
| | | | | | subtilis sp\|P18157\|GLPK_BACSU GLYCEROL | | | |
| | | | | | KINASE (EC 2.7.1.30) (ATP:GLYCEROL - | | | |
| | | | | | PHOSPHOTRANSFERASE) (GLYCEROKINASE) (GK). | | | |
| 164 | 1 | 179 | 1102 | gi\|882532 | ORF_o294 [Escherichia coli] | 77 | 57 | |
| 164 | 22 | 24158 | 23646 | gi\|1573564 | hypothetical [Haemophilus influenzae] | 77 | 36 | |
| 171 | 6 | 6656 | 7639 | gi\|1303855 | YggH [Bacillus subtilis] | 77 | 59 | |
| 171 | 9 | 9198 | 9683 | gi\|1591672 | phosphate transport system ATP-binding | 77 | 57 | |
| | | | | | protein [Methanococcus jannaschii] | | | |
| 202 | 4 | 2967 | 3422 | gi\|147782 | ruvA protein (gtg start) [Escherichia | 77 | 50 | |
| | | | | | coli] | | | |
| 202 | 6 | 3662 | 4693 | gi\|147783 | ruvB protein [Escherichia coli] | 77 | 58 | |
| 213 | 1 | 3 | 1046 | gi\|1103865 | formyl-tetrahydrofolate synthetase | 77 | 63 | |
| | | | | | [Streptococcus mutans] | | | |
| 217 | 10 | 6870 | 7742 | gi\|414014 | ipa-90d gene product [Bacillus subtilis] | 77 | 50 | |
| 223 | 5 | 4171 | 4902 | gnl\|PID\|e254974 | autolysin response regulator [Bacillus | 77 | 55 | |
| | | | | | subtilis] | | | |
| 223 | 7 | 5024 | 5473 | gnl\|PID\|e254975 | hypothetical protein [Bacillus subtilis] | 77 | 58 | |
| 228 | 10 | 7747 | 6035 | gi\|467409 | DNA polymerase III subunit [Bacillus | 77 | 61 | |
| | | | | | subtilis] | | | |
| 229 | 15 | 16711 | 14261 | gnl\|PID\|e290286 | priA [Bacillus subtilis] | 77 | 62 | |
| 232 | 3 | 1742 | 1437 | gi\|142708 | comG3 gene product [Bacillus subtilis] | 77 | 50 | |
| 238 | 25 | 23174 | 24511 | pir\|B48649\|B48649 | L-rhamnose isomerase (EC 5.3.1.14) | 77 | 59 | |
| | | | | | Escherichia coli | | | |
| 238 | 32 | 29472 | 28708 | gi\|451072 | di-tripeptide transporter [Lactococcus | 77 | 56 | |
| | | | | | lactis] | | | |
| 244 | 4 | 3591 | 2809 | gi\|1773173 | similar to M. jannaschii MJ0938 | 77 | 60 | |
| | | | | | [Escherichia coli] | | | |
| 269 | 5 | 3890 | 3522 | gi\|1303793 | YgeL [Bacillus subtilis] | 77 | 55 | |
| 276 | 6 | 2840 | 2328 | pir\|PC1127\|PC1127 | hypothetical 110 protein (lytA 5′ region) | 77 | 50 | |
| | | | | | - Lactococcus lactis phage US3 (fragment) | | | |
| 291 | 1 | 119 | 916 | gi\|556014 | UDP-N-acetyl muramate-alanine ligase | 77 | 63 | |
| | | | | | [Bacillus subtilis] | | | |
| 304 | 2 | 941 | 2020 | gnl\|PID\|e285001 | CTORF239 [Staphylococcus aureus] | 77 | 62 | |
| 305 | 4 | 3618 | 4394 | gi\|709993 | hypothetical protein [Bacillus subtilis] | 77 | 54 | |
| 327 | 8 | 5697 | 6005 | gi\|153570 | H+ ATPase [Enterococcus faecalis] | 77 | 61 | |
| 341 | 4 | 1206 | 1937 | gi\|1303951 | YqiZ [Bacillus subtilis] | 77 | 62 | |
| 360 | 1 | 429 | 4 | gi\|897754 | nonstructural protein NSP3 [Human | 77 | 38 | |
| | | | | | rotavirus] | | | |
| 362 | 3 | 541 | 1239 | gi\|1001826 | cadmium-transporting ATPase [Synechocystis | 77 | 60 | |
| | | | | | sp.] | | | |
| 363 | 9 | 13917 | 12652 | gi\|1574390 | C4-dicarboxylate transport protein | 77 | 55 | |
| | | | | | [Haemophilus influenzae] | | | |
| 367 | 14 | 7218 | 6679 | pir\|A02766\|RSBS0F | ribosomal protein L6 - Bacillus | 77 | 63 | |
| | | | | | stearothermophilus | | | |
| 386 | 8 | 5456 | 5776 | gnl\|PID\|e281578 | hypothetical 12.2 kd protein [Bacillus | 77 | 61 | |
| | | | | | subtilis] | | | |
| 394 | 4 | 3706 | 4167 | pir\|B39096\|B39096 | alkaline phosphatase (EC 3.1.3.1) III | 77 | 55 | |
| | | | | | precursor - Bacillus subtilis | | | |
| 402 | 1 | 710 | 3 | gi\|533105 | unknown [Bacillus subtilis] | 77 | 59 | |
| 408 | 2 | 1357 | 584 | gi\|666983 | putative ATP binding subunit [Bacillus | 77 | 58 | |
| | | | | | subtilis] | | | |
| 460 | 6 | 3562 | 4938 | gi\|1055246 | biotin carboxylase [Bacillus subtilis] | 77 | 60 | |
| 466 | 7 | 8657 | 9253 | gi\|147402 | mannose permease subunit III-Man | 77 | 61 | |
| | | | | | [Escherichia coli] | | | |
| 475 | 5 | 3794 | 3234 | gi\|532547 | ORF14 [Enterococcus faecalis] | 77 | 68 | |
| 498 | 1 | 1 | 603 | gi\|410137 | ORFX13 [Bacillus subtilis] | 77 | 58 | |
| 515 | 1 | 107 | 574 | gi\|1303815 | YgeY [Bacillus subtilis] | 77 | 60 | |
| 518 | 6 | 2980 | 4518 | gi\|1402515 | membrane-spanning transporter protein | 77 | 56 | |
| | | | | | [Clostridium perfringens] | | | |
| 523 | 5 | 2527 | 2333 | gi\|149601 | thymidylate synthase (EC 2.1.1.45) | 77 | 66 | |
| | | | | | [Lactobacillus casei] | | | |
| 526 | 2 | 1782 | 436 | gi\|1750124 | xylose isomerase [Bacillus subtilis | 77 | 62 | |
| 552 | 7 | 6809 | 6135 | gi\|534045 | antiterminator [Bacillus subtilis] | 77 | 51 | |
| 607 | 3 | 778 | 936 | gi\|1015321 | alanyl-tRNA synthetase [Homo sapiens] | 77 | 51 | |
| 624 | 3 | 2289 | 2555 | gnl\|PID\|e187971 | orf121 gene product [Lactococcus lactis] | 77 | 57 | |
| 781 | 1 | 15 | 485 | gi\|580883 | ipa-88d gene product [Bacillus subtilis] | 77 | 65 | |
| 850 | 2 | 895 | 572 | gi\|142520 | thioredoxin [Bacillus subtilis] | 77 | 59 | |
| 853 | 1 | 186 | 4 | gi\|39962 | ribosomal protein L35 (AA 1-66) [Bacillus | 77 | 66 | |
| | | | | | stearothermophilus] ir\|S05347\|R5BS35 | | | |
| | | | | | ribosomal protein L35 - Bacillus | | | |
| | | | | | earothermophilus | | | |
| 944 | 1 | 2 | 172 | gi\|425467 | transposase [Lactobacillus helveticus] | 77 | 50 | |
| 10 | 1 | 1 | 258 | gnl\|PID\|e234078 | hom [Lactococcus lactis] | 76 | 63 | |
| 12 | 4 | 7650 | 5842 | gnl\|PID\|e254877 | unknown [Mycobacterium tuberculosis] | 76 | 57 | |
| 17 | 29 | 29022 | 28153 | gi\|1500003 | mutator mutT protein [Methanococcus | 76 | 47 | |
| | | | | | jannaschii] | | | |
| 23 | 15 | 8897 | 10285 | gi\|153960 | ethanolamine ammonia-lyase (eutB) | 76 | 64 | |
| | | | | | [Salmonella typhimurium] pir\|A36570\|A36570 | | | |
| | | | | | ethanolamine ammonia-lyase (EC 4.3.1.7) | | | |
| | | | | | 55K chain Salmonella typhimurium | | | |
| 29 | 2 | 1024 | 500 | gi\|40011 | ORF17 (AA 1-161) [Bacillus subtilis] | 76 | 61 | |
| 33 | 1 | 14 | 1552 | gi\|148304 | beta-1,4-N-acetylmuramoylhydrolase | 76 | 60 | |
| | | | | | [Enterococcus hirae] pir\|A42296\|A42296 | | | |
| | | | | | lysozyme 2 (EC 3.2.1.-) precursor - | | | |
| | | | | | Enterococcus irae (ATCC 9790) | | | |
| 34 | 7 | 7432 | 6965 | gi\|44067 | ORF1 C-terminal [Lactococcus lactis] | 76 | 59 | |
| 45 | 8 | 3708 | 4166 | gi\|1303698 | BltD [Bacillus subtilis] | 76 | 56 | |
| 47 | 9 | 12849 | 10270 | gi\|1002520 | MutS [Bacillus subtilis] | 76 | 59 | |
| 55 | 8 | 3614 | 4105 | gi\|1303915 | YghZ [Bacillus subtilis] | 76 | 53 | |
| 55 | 11 | 6385 | 6642 | gi\|216583 | ORF1 [Escherichia coli] | 76 | 45 | |
| 57 | 14 | 17283 | 16597 | gi\|1183887 | integral membrane protein [Bacillus | 76 | 56 | |
| | | | | | subtilis] | | | |
| 59 | 6 | 3112 | 2426 | gi\|392872 | repressor protein [Pasteurella multocida] | 76 | 47 | |
| 64 | 1 | 1242 | 46 | gi\|483941 | blt gene product [Bacillus subtilis] | 76 | 55 | |
| 67 | 3 | 1370 | 2146 | gnl\|PID\|e199390 | orotate phosphoribosyltransferase | 76 | 57 | |
| | | | | | [Lactobacillus plantarum] | | | |
| 69 | 2 | 837 | 334 | gi\|1377831 | unknown [Bacillus subtilis] | 76 | 57 | |
| 70 | 1 | 164 | 1588 | gi\|895751 | putative 6-phospho-beta-glucosidase | 76 | 60 | |
| | | | | | [Bacillus subtilis] pir\|S57762\|S57762 | | | |
| | | | | | probable 6-phospho-beta-glucosidase - | | | |
| | | | | | Bacillus ubtilis | | | |
| 74 | 11 | 7826 | 7269 | pir\|E53402\|E53402 | serine O-acetyltransferase (EC 2.3.1.30) - | 76 | 54 | |
| | | | | | Bacillus stearothermophilus | | | |
| 74 | 13 | 10073 | 9588 | gi\|289281 | unknown [Bacillus subtilis] | 76 | 60 | |
| 85 | 11 | 7809 | 7102 | gi\|457634 | butyrate kinase [Clostridium | 76 | 61 | |
| | | | | | acetobutylicum] | | | |
| 94 | 8 | 6036 | 4801 | gi\|142538 | aspartate aminotransferase [Bacillus sp.] | 76 | 57 | |
| 94 | 14 | 17174 | 12801 | gi\|40060 | DNA polymerase III (AA 1-1437) [Bacillus | 76 | 62 | |
| | | | | | subtilis] p\|P13267\|DP3A_BACSU DNA | | | |
| | | | | | POLYMERASE III, ALPHA CHAIN (EC 2.7.7.7). | | | |
| 94 | 15 | 19140 | 17407 | gi\|1573733 | prolyl-tRNA synthetase (proS) [Haemophilus | 76 | 54 | |
| | | | | | influenzae] | | | |
| 95 | 1 | 1 | 1290 | gi\|472918 | v-type Na-ATPase [Enterococcus hirae] | 76 | 59 | |
| 95 | 4 | 2367 | 3194 | gi\|487276 | Na+ ″ATPase subunit C [Enterococcus hirae] | 76 | 48 | |
| 99 | 1 | 1 | 171 | gi\|1353874 | unknown [Rhodobacter capsulatus] | 76 | 52 | |
| 100 | 5 | 5414 | 5064 | gi\|1591962 | M. jannaschii predicted coding region | 76 | 46 | |
| | | | | | MJ1322 [Methanococcus jannaschii] | | | |
| 100 | 27 | 23165 | 21198 | gi\|216151 | DNA polymerase (gene L; ttg start codon) | 76 | 62 | |
| | | | | | [Bacteriophage SPO2] gi\|579197 SPO2 DNA | | | |
| | | | | | polymerase (aa 1-648) [Bacteriophage SPO2] | | | |
| | | | | | pir\|A21498\|DJBPS2 DNA-directed DNA | | | |
| | | | | | polymerase (EC 2.7.7.7) - phage PO2 | | | |
| 106 | 1 | 1511 | 264 | gi\|1750108 | YnbA [Bacillus subtilis] | 76 | 61 | |
| 116 | 4 | 2480 | 2854 | gi\|755602 | unknown [Bacillus subtilis] | 76 | 60 | |
| 116 | 6 | 3299 | 3625 | gi\|1146234 | dihydrodipicolinate reductase [Bacillus | 76 | 56 | |
| | | | | | subtilis] | | | |
| 122 | 5 | 3029 | 3619 | gi\|467436 | unknown [Bacillus subtilis] | 76 | 52 | |
| 123 | 10 | 9109 | 10389 | gi\|1773196 | similar to B. stearothermophilus N- | 76 | 61 | |
| | | | | | carbamyl-L-amino acid amidohydrolase | | | |
| | | | | | [Escherichia coli] | | | |
| 124 | 5 | 4087 | 3182 | gi\|974332 | NAD(P)H-dependent dihydroxyacetone- | 76 | 58 | |
| | | | | | phosphate reductase [Bacillus ubtilis] | | | |
| 130 | 5 | 3341 | 4294 | gi\|308853 | transmembrane protein [Lactococcus lactis] | 76 | 55 | |
| 132 | 3 | 2265 | 5117 | gi[1673889 | (AE000022) Mycoplasma pneumoniae, | 76 | 59 | |
| | | | | | excinuclease ABC subunit A; similar to | | | |
| | | | | | Swiss-Prot Accession Number P07671, from | | | |
| | | | | | E. coli [Mycoplasma pneumoniae] | | | |
| 138 | 34 | 25849 25409 | gi\|143795 | transfer RNA-Tyr synthetase [Bacillus | 76 | 56 | | |
| | | | | | subtilis] | | | |
| 139 | 1 | 3 | 350 | gnl\|PID\|e191395 | mobilisation protein [Lactococcus lactis] | 76 | 65 | |
| 141 | 1 | 2 | 544 | gi\|662792 | single-stranded DNA binding protein | 76 | 64 | |
| | | | | | [unidentified eubacterium] | | | |
| 155 | 9 | 7612 | 7058 | gnl\|PID\|e247026 | orf6 [Lactobacillus sake] | 76 | 57 | |
| 164 | 4 | 1889 | 2416 | gi\|727436 | putative 20-kDa protein [Lactococcus | 76 | 55 | |
| | | | | | lactis] | | | |
| 181 | 5 | 3475 | 2288 | gi\|1147744 | PSR [Enterococcus hirae] | 76 | 53 | |
| 181 | 8 | 6281 | 4986 | gi\|683583 | 5-enolpyruvylshikimate-3-phosphate | 76 | 62 | |
| | | | | | synthase [Lactococcus lactis] | | | |
| | | | | | pir\|S52580\|S52580 3-phosphoshikirnate 1- | | | |
| | | | | | carboxyvinyltransferase (EC .5.1.19) - | | | |
| | | | | | Lactococcus lactis | | | |
| 197 | 7 | 7662 | 8102 | gi\|1783253 | homologous to many ATP-binding transport | 76 | 58 | |
| | | | | | proteins; hypothetical [Bacillus subtilis] | | | |
| 222 | 16 | 10780 | 11298 | gi\|1591856 | hypothetical protein (SP:P15889) | 76 | 64 | |
| | | | | | [Methanococcus jannaschii] | | | |
| 229 | 1 | 1 | 138 | gi\|148316 | NaH-antiporter protein [Enterococcus | 76 | 47 | |
| | | | | | hirae] | | | |
| 233 | 6 | 3946 | 3341 | gi\|1591652 | hypothetical protein (SP:P31065) | 76 | 60 | |
| | | | | | [Methanococcus jannaschii] | | | |
| 238 | 2 | 844 | 1848 | gi\|622991 | mannitol transport protein [Bacillus | 76 | 64 | |
| | | | | | stearothermophilus] sp\|P508521\|PTMB_BACST | | | |
| | | | | | PTS SYSTEM, MANNITOL-SPECIFIC IIBC | | | |
| | | | | | COMPONENT EIIBC-MTL) (MANNITOL- PERMEASE | | | |
| | | | | | IIBC COMPONENT) (PHOSPHOTRANSFERASE NZYME | | | |
| | | | | | II, BC COMPONENT) (EC 2.7.1.69) (EII-MTL). | | | |
| 238 | 9 | 7235 | 7957 | gi\|1592142 | ABC transporter, probable ATP-binding | 76 | 49 | |
| | | | | | subunit [Methanococcus jannaschii] | | | |
| 249 | 2 | 543 | 1235 | gi\|143156 | membrane bound protein [Bacillus subtilis] | 76 | 45 | |
| 262 | 3 | 4131 | 2692 | gnl\|PID\|e281591 | catalase [Bacillus subtilis] | 76 | 65 | |
| 265 | 1 | 2 | 400 | gi\|141858 | replication-associated protein [Plasmid | 76 | 52 | |
| | | | | | pAD1] | | | |
| 271 | 13 | 8175 | 10844 | gi\|397973 | Mg2+ transport ATPase [Salmonella | 76 | 57 | |
| | | | | | typhimurium] | | | |
| 323 | 4 | 4128 | 4568 | gnl\|PID\|e249023 | T19B10.3 [Caenorhabditis elegans] | 76 | 60 | |
| 329 | 5 | 3270 | 2560 | gi\|310631 | ATP binding protein [Streptococcus | 76 | 54 | |
| | | | | | gordonii] | | | |
| 356 | 1 | 971 | 3 | gi\|971479 | orf3 gene product [Lactobacillus | 76 | 52 | |
| 371 | 1 | 1564 | 944 | gi\|1750125 | xylulose kinase [Bacillus subtilis] | 76 | 57 | |
| 375 | 6 | 5137 | 4238 | gi\|1644202 | unknown [Bacillus subtilis] | 76 | 58 | |
| 382 | 2 | 508 | 2769 | gi\|442360 | ClpC adenosine triphosphatase [Bacillus | 76 | 60 | |
| | | | | | subtilis] | | | |
| 399 | 11 | 7811 | 8845 | gi\|1572970 | acetate:SH-citrate lyase ligase (AMP) | 76 | 54 | |
| | | | | | [Haemophilus influenzae] | | | |
| 399 | 13 | 9126 | 10034 | gi\|1572968 | citrate lyase beta chain (acyl lyase | 76 | 57 | |
| | | | | | subunit) (citE) [Haemophilus influenzae] | | | |
| 485 | 1 | 3 | 1262 | gi\|564018 | dihydrofolate synthetase [Streptococcus | 76 | 54 | |
| | | | | | pneumoniae] | | | |
| 486 | 2 | 970 | 344 | gi\|1256617 | adenine phosphoribosyltransferase | 76 | 61 | |
| | | | | | [Bacillus subtilis] | | | |
| 536 | 1 | 220 | 2 | gi\|437389 | transposase [Lactococcus lactis] | 76 | 59 | |
| 552 | 3 | 3969 | 2491 | gi\|882609 | 6-phospho-beta-glucosidase [Escherichia | 76 | 63 | |
| | | | | | coli | | | |
| 634 | 2 | 697 | 918 | gi\|1022725 | unknown [Staphylococcus haemolyticus] | 76 | 52 | |
| 684 | 3 | 1191 | 688 | gi\|1256653 | DNA-binding protein [Bacillus subtilis] | 76 | 65 | |
| 752 | 1 | 1111 | 929 | gi\|407907 | ORF2 [Staphylococcus xylosus] | 76 | 46 | |
| 822 | 1 | 548 | 237 | gi\|144313 | 6.0 kd ORF [Plasmid ColE1] | 76 | 73 | |
| 923 | 1 | 2 | 421 | gi\|153843 | trypsin-resistant surface T6 protein | 76 | 57 | |
| | | | | | (tee6) precursor [Streptococcus yogenes] | | | |
| 953 | 2 | 534 | 187 | gi\|1592339 | hypothetical protein (PIR:S52522) | 76 | 44 | |
| | | | | | [Methanococcus jannaschii] | | | |
| 965 | 2 | 564 | 343 | gi\|1098898 | CTRP [Plasmodium falciparum] | 76 | 69 | |
| 7 | 4 | 3754 | 4161 | gi\|495046 | tripeptidase [Lactococcus lactis] | 75 | 61 | |
| 25 | 1 | 2 | 580 | gi\|1575577 | DNA-binding response regulator [Thermotoga | 75 | 57 | |
| | | | | | maritima] | | | |
| 45 | 7 | 3090 | 3350 | gi\|1673663 | (AE000003) Mycoplasma pneumoniae, | 75 | 35 | |
| | | | | | E07_orf166 Protein [Mycoplasma pneumoniae] | | | |
| 47 | 6 | 7526 | 6957 | gi\|1673843 | (AE000019) Mycoplasma pneumoniae, pilB | 75 | 58 | |
| | | | | | homolog; similar to GenBank Accession | | | |
| | | | | | Number E64124, from H. influenzae | | | |
| | | | | | [Mycoplasma pneumoniae] | | | |
| 51 | 1 | 15 | 1520 | sp\|P39168\|ATM_ECO | MG(2+) TRANSPORT ATPASE, P-TYPE 1 (EC | 75 | 58 | |
| | | | | LI | 3.6.1.-). | | | |
| 54 | 11 | 3761 | 3579 | gi\|1504026 | similar to C.elegans protein (Z37093) | 75 | 56 | |
| | | | | | [Homo sapiens] | | | |
| 55 | 5 | 1648 | 2562 | gi\|1303901 | YghT [Bacillus subtilis] | 75 | 58 | |
| 56 | 8 | 5873 | 5358 | gi\|895749 | putative cellobiose phosphotransferase | 75 | 49 | |
| | | | | | enzyme II″ [Bacillus ubtilis] | | | |
| 58 | 2 | 2707 | 1916 | gi\|1658403 | formate dehydrogenase alpha subunit | 75 | 58 | |
| | | | | | [Moorella thermoacetica] | | | |
| 71 | 1 | 110 | 1429 | gi\|1304007 | LysA [Bacillus subtilis] | 75 | 58 | |
| 74 | 5 | 3436 | 3074 | gi\|467433 | unknown [Bacillus subtilis] | 75 | 61 | |
| 74 | 8 | 5491 | 4631 | gi\|467483 | unknown [Bacillus subtilis] | 75 | 60 | |
| 77 | 1 | 3 | 992 | gi\|1653966 | 47 kD protein [Synechocystis sp.] | 75 | 34 | |
| 81 | 1 | 26 | 862 | gi\|1064809 | homologous to sp:HTRA_ECOLI [Bacillus | 75 | 55 | |
| | | | | | subtilis] | | | |
| 89 | 11 | 11651 | 9801 | gi\|1573881 | hypothetical [Haemophilus influenzae] | 75 | 51 | |
| 96 | 3 | 2521 | 1643 | gi\|1531619 | NodB [Rhizobium sp.] | 75 | 54 | |
| 98 | 9 | 11494 | 10199 | gi\|1573043 | hypothetical [Haemophilus influenzae] | 75 | 53 | |
| 110 | 12 | 11326 | 10283 | gi\|1184121 | auxin-induced protein [Vigna radiata] | 75 | 51 | |
| 117 | 13 | 11200 | 9944 | gi\|457635 | vancomycin histidine protein kinase | 75 | 51 | |
| | | | | | [Enterococcus faecium] gi\|801884 vanS | | | |
| | | | | | [Transposon Tn1546] | | | |
| 122 | 6 | 3812 | 5206 | gi\|467439 | temperature sensitive cell division | 75 | 59 | |
| | | | | | [Bacillus subtilis] | | | |
| 128 | 12 | 8262 | 7921 | gi\|466473 | cellobiose phosphotransferase enzyme II′ | 75 | 48 | |
| | | | | | [Bacillus tearothermophilus] | | | |
| 128 | 38 | 31848 | 30733 | gi\|216300 | peptidoglycan synthesis enzyme [Bacillus | 75 | 56 | |
| | | | | | subtilis] sp\|P37585 MURG_BACSU MURO | | | |
| | | | | | PROTEIN UPD-N-ACETYLGLUCOSAMINE--N- | | | |
| | | | | | ACETYLMURAMYL- | | | |
| | | | | | PENTAPEPTIDE) PYROPHOSPHORYL-UNDECAPRENOL | | | |
| | | | | | N-ACETYLGLUCOSAMINE RANSFERASE). | | | |
| 129 | 2 | 1916 | 2134 | gnl\|PID\|e267624 | Unknown, highly similar to Pseudomonas | 75 | 47 | |
| | | | | | putida 4-oxalocrotonate tautomerase | | | |
| | | | | | [Bacillus subtilis] | | | |
| 130 | 4 | 2375 | 3343 | gi\|495179 | transmembrane protein [Lactococcus lactis] | 75 | 55 | |
| 133 | 1 | 3 | 1514 | gnl\|PID\|e254877 | unknown [Mycobacterium tuberculosis] | 75 | 54 | |
| 158 | 13 | 12326 | 11634 | gi\|809660 | deoxyribose-phosphate aldolase [Bacillus | 75 | 66 | |
| | | | | | subtilis] pir\|S49455\|S49455 deoxyribose- | | | |
| | | | | | phosphate aldolase (EC 4.1.2.4) - acillus | | | |
| | | | | | subtilis | | | |
| 162 | 13 | 14285 | 12543 | gi\|1653222 | cation-transporting ATPase PacL | 75 | 60 | |
| | | | | | [Synechocystis sp.] | | | |
| 170 | 2 | 1280 | 921 | sp\|P07999\|DHGB_BAC | GLUCOSE 1-DEHYDROGENASE B (EC 1.1.1.47). 75 | 62 | | |
| | | | | | ME | | | |
| 171 | 7 | 7618 | 8523 | gi\|1303856 | YagI [Bacillus subtilisi | 75 | 52 | |
| 179 | 14 | 14668 | 15255 | gi\|457177 | alkyl hydroperoxide reductase [Salmonella | 75 | 55 | |
| | | | | | typhimurium] sp\|P19479\|AHPC_SALTY ALKYL | | | |
| | | | | | HYDROPEROXIDE REDUCTASE C22 PROTEIN (EC | | | |
| | | | | | .6.4.-). {SUB 2-187)} | | | |
| 181 | 6 | 4470 | 3604 | gi\|683585 | prephenate dehydratase [Lactococcus | 75 | 49 | |
| | | | | | lactis] | | | |
| 191 | 1 | 183 | 560 | gnl\|PID\|e261991 | putative orf [Bacillus subtilis] | 75 | 57 | |
| 197 | 3 | 2117 | 3592 | gi\|1783250 | h omologous to cytochrome d ubiquinol | 75 | 60 | |
| | | | | | oxidase subunit I; hypothetical [Bacillus | | | |
| | | | | | subtilis] | | | |
| 215 | 3 | 2545 | 2201 | gn\|PID\|e284996 | ORF136 [Staphylococcus aureus] | 75 | 54 | |
| 216 | 1 | 2 | 256 | gi\|153570 | H+ ATPase [Enterococcus faecalis] | 75 | 53 | |
| 223 | 4 | 2406 | 4193 | gi\|862312 | lytS gene product [Staphylococcus aureus] | 75 | 56 | |
| 227 | 5 | 3004 | 3567 | gi\|144729 | butanol dehydrogenase [Clostridium | 75 | 53 | |
| | | | | | acetobutylicum] sp\|Q04944\|ADHA_CLOAB NADH- | | | |
| | | | | | DEPENDENT BUTANOL DEHYDROGENASE A (EC | | | |
| | | | | | .1.1.-) | (BDH I). | | |
| 228 | 9 | 6032 | 5700 | gi\|467410 | unknown [Bacillus subtilis] | 75 | 59 | |
| 229 | 16 | 17081 | 16848 | gi\|207398 | tropomyosin T class IVd alpha-3 [Rattus | 75 | 42 | |
| | | | | | norvegicus] | | | |
| 238 | 8 | 6038 | 7237 | gi\|141927 | czcB gene product [Alcaligenes eutrophus] | 75 | 39 | |
| 244 | 10 | 7795 | 7460 | gi\|467419 | unknown [Bacillus subtilis] | 75 | 56 | |
| 247 | 1 | 7 | 1431 | gi\|577569 | PepV [Lactobacillus delbrueckii] | 75 | 54 | |
| 250 | 5 | 3416 | 3201 | gi\|1580783 | sperm receptor [Strongylocentrotus | 75 | 50 | |
| | | | | | purpuratus | | | |
| 256 | 1 | 2 | 562 | gi\|709991 | hypothetical protein [Bacillus subtilis] | 75 | 56 | |
| 262 | 2 | 1031 | 2479 | gi\|142783 | DNA photolyase [Bacillus firmus] | 75 | 59 | |
| 263 | 1 | 222 | 890 | gi\|148304 | beta-1,4-N-acetylmuramoylhydrolase | 75 | 60 | |
| | | | | | [Enterococcus hirae] pir\|A42296\|A42296 | | | |
| | | | | | lysozyme 2 (EC 3.2.1.-) precursor - | | | |
| | | | | | Enterococcus irae (ATCC 9790) | | | |
| 266 | 5 | 2224 | 1982 | gnl\|PID\|e253211 | ORF YDLO65c [Saccharomyces cerevisiae] | 75 | 50 | |
| 269 | 2 | 1477 | 707 | gi\|1736647 | ORF_ID:o347#4; similar to [SwissProt | 75 | 61 | |
| | | | | | Accession Number P44634] [Escherichia | | | |
| | | | | | coli] | | | |
| 276 | 11 | 7415 | 4593 | gnl\|PID\|e221269 | tail protein [Bacteriophage CP-1] | 75 | 54 | |
| 279 | 17 | 14992 | 14651 | gi\|1389549 | ORF3 [Bacillus subtilis] | 75 | 61 | |
| 292 | 11 | 7829 | 8470 | gi\|160693 | sporozoite surface protein [Plasmodium | 75 | 50 | |
| | | | | | yoelii] | | | |
| 295 | 2 | 489 | 1157 | gi\|533099 | endonuclease III [Bacillus subtilis] | 75 | 59 | |
| 307 | 4 | 3804 | 4889 | gi\|1321625 | exo-alpha-1, 4-glucosidase [Bacillus | 75 | 60 | |
| | | | | | stearothermophilus] | | | |
| 322 | 4 | 1088 | 1996 | gi\|310303 | mosA [Rhizobium meliloti] | 75 | 63 | |
| 331 | 1 | 1 | 294 | gi[1016092 | ribosomal protein S14 [Cyanophora | 75 | 57 | |
| | | | | | paradoxa] | | | |
| 334 | 7 | 6860 | 7969 | gi\|409286 | bmrU [Bacillus subtilis] | 75 | 45 | |
| 340 | 1 | 3 | 743 | gi\|288413 | glutamate dehydrogenase (NADP+) | 75 | 60 | |
| | | | | | [Corynebacterium glutamicum] | | | |
| | | | | | pir\|S32227\|S32227 glutamate dehydrogenase | | | |
| | | | | | (NADP+) (EC 1.4.1.4) - orynebacterium | | | |
| | | | | | glutamicum | | | |
| 343 | 2 | 1497 | 778 | gi\|46602 | putative transposase (AA 1 - 224) | 75 | 54 | |
| | | | | | [Staphylococcus aureus] ir\|S12093\|S12093 | | | |
| | | | | | probable IS431mec protein - Staphylococcus | | | |
| | | | | | aureus p\|P19380\|TRA2_STAAU TRANSPOSASE FOR | | | |
| | | | | | INSERTION SEQUENCE-LIKE ELEMENT 431MEC. | | | |
| 372 | 3 | 865 | 1629 | gi\|146282 | gut operon repressor (gutR) [Escherichia | 75 | 58 | |
| | | | | | coli] | | | |
| 372 | 7 | 6614 | 5307 | gnl\|PID\|e255128 | trigger factor [Bacillus subtilis] | 75 | 62 | |
| 387 | 3 | 1721 | 1353 | gi\|580902 | ORF6 gene product [Bacillus subtilis] | 75 | 53 | |
| 399 | 30 | 28774 | 29805 | gi\|146278 | glucitol-specific enzyme II (gutA) | 75 | 61 | |
| | | | | | [Escherichia coli] pir\|A26725\|WQEC2S | | | |
| | | | | | phosphotransferase system enzyme II (EC | | | |
| | | | | | .7.1.69), sorbitol-specific, factor II - | | | |
| | | | | | Escherichia coli sp\|P05705\|PTHB_ECOLI PTS | | | |
| | | | | | SYSTEM, GLUCITOL/SORBITOL-SPECIFIC IIBC | | | |
| | | | | | OMPONENT (EIIBC-GUT) | | | |
| 399 | 33 | 31077 | 32768 | gi\|517205 | 67 kDa Myosin-crossreactive streptococcal | 75 | 59 | |
| | | | | | antigen [Streptococcus yogenes] | | | |
| 404 | 6 | 4994 | 4332 | gi\|1303921 | YqiF [Bacillus subtilis] | 75 | 64 | |
| 404 | 7 | 4984 | 4829 | gi\|1303921 | YgiF [Bacillus subtilis] | 75 | 60 | |
| 419 | 1 | 320 | 3 | gi\|496283 | lysin [Bacteriophage Tuc2009] | 75 | 67 | |
| 431 | 3 | 1139 | 759 | sp\|P46351\|YZGD_BAC | HYPOTHETICAL 45.4 KD PROTEIN IN THIAMINASE | 75 | 60 | |
| | | | | SU | I 5′REGION. | | | |
| 473 | 1 | 166 | 2 | gnl\|PID\|e229299 | R04D3.8[Caenorhabditis elegans] | 75 | 35 | |
| 481 | 1 | 1 | 351 | gi\|1573766 | phosphoglyceromutase (gpmA) [Haemophilus | 75 | 64 | |
| | | | | | influenzae] | | | |
| 492 | 1 | 440 | 3 | gi\|806487 | ORF211; putative [Lactococcus lactis] | 75 | 57 | |
| 595 | 1 | 705 | 181 | gi\|147485 | queA [Escherichia coli] | 75 | 51 | |
| 619 | 2 | 879 | 319 | gi\|1063246 | low homology to P14 protein of Heamophilus | 75 | 59 | |
| | | | | | influenzar and 14.2 kDa protein of | | | |
| | | | | | Escherichia coli [Bacillus subtilis] | | | |
| 663 | 1 | 15 | 1544 | gi\|475112 | enzyme IIabc [Pediococcus pentosaceus] | 75 | 54 | |
| 701 | 4 | 662 | 946 | gi\|143793 | tyrosyl-tRNA synthetase [Bacillus | 75 | 60 | |
| | | | | | caldotenax] | | | |
| 719 | 1 | 970 | 419 | gi\|727436 | putative 20-kDa protein [Lactococcus | 75 | 56 | |
| | | | | | lactis] | | | |
| 886 | 1 | 101 | 409 | gi\|143150 | levR [Bacillus subtilis] | 75 | 59 | |
| 939 | 1 | 403 | 191 | gi\|425467 | transposase [Lactobacillus helveticus] | 75 | 53 | |
| 984 | 2 | 66 | 227 | gi\|1652190 | Fat protein [Synechocystis sp.] | 75 | 48 | |
| 17 | 2 | 2592 | 2924 | gi\|532556 | ORF23 [Enterococcus faecalis] | 74 | 53 | |
| 17 | 25 | 24449 | 25639 | gi\|1458228 | mutY homolog [Homo sapiens] | 74 | 50 | |
| 21 | 7 | 4729 | 5229 | gi\|726320 | putative protein of unknown function | 74 | 57 | |
| | | | | | encoded by the IS200-like lement [Yersinia | | | |
| | | | | | pestis] | | | |
| 32 | 9 | 5819 | 4488 | gi\|1498962 | M. jannaschii predicted coding region | 74 | 41 | |
| | | | | | MJ0188 [Methanococcus jannaschii] | | | |
| 38 | 1 | 707 | 3 | gi\|142152 | sulfate permease (gtg start codon) | 74 | 53 | |
| | | | | | [Synechococcus PCC6301] pir\|A30301\|GRYCS7 | | | |
| | | | | | sulfate transport protein - Synechococcus | | | |
| | | | | | sp. PCC 7942) | | | |
| 44 | 1 | 1 | 927 | gi\|1377823 | aminopeptidase [Bacillus subtilis] | 74 | 63 | |
| 60 | 8 | 8747 | 8070 | gi\|143368 | phosphoribosylformyl glycinamidine | 74 | 63 | |
| | | | | | synthetase I (PUR-L; gtg start odon) | | | |
| | | | | | [Bacillus subtilis] | | | |
| 72 | 8 | 7388 | 7119 | gnl\|PID\|e209004 | glutaredoxin-like protein [Lactococcus | 74 | 53 | |
| | | | | | lactis] | | | |
| 91 | 4 | 1031 | 2257 | gi\|726480 | L-glutamine-D-fructose-6-phosphate | 74 | 58 | |
| | | | | | amidotransferase [Bacillus ubtilis] | | | |
| 105 | 7 | 5553 | 5855 | gi\|467418 | unknown [Bacillus subtilis] | 74 | 63 | |
| 110 | 18 | 16903 | 15842 | gi\|45288 | arcB (AA 11336) [Pseudomonas aeruginosa] | 74 | 57 | |
| 112 | 3 | 1112 | 636 | gi\|887824 | ORF_o310 [Esoherichia coli] | 74 | 53 | |
| 123 | 8 | 6105 | 7619 | gi\|1773191 | similar to Pseudomonas sp. ORF5 | 74 | 60 | |
| | | | | | [Escherichia coli] | | | |
| 128 | 1 | 2 | 1315 | gi\|143961 | pyruvate phosphate dikinase [Clostridium | 74 | 58 | |
| | | | | | symbiosum] pir\|A36231\|KIQAPO | | | |
| | | | | | pyruvate, orthophosphate dikinase (EC | | | |
| | | | | | 2.7.9.1) - lostridium symbiosum | | | |
| 128 | 26 | 18866 | 20401 | gi\|1303961 | YgjJ [Bacillus subtilis] | 74 | 57 | |
| 150 | 5 | 4653 | 5303 | gi\|495046 | tripeptidase [Lactococcus lactis] | 74 | 53 | |
| 159 | 8 | 7500 | 6850 | gi\|581098 | GlnQ (AA 1-240); gtg start [Escherichia | 74 | 53 | |
| | | | | | coli ] | | | |
| 179 | 1 | 1259 | 57 | gi\|537080 | ribonucleoside triphosphate reductase | 74 | 62 | |
| | | | | | [Escherichia coli] pir\|A47331\|A47331 | | | |
| | | | | | oxygen-sensitive ribonucleoside- | | | |
| | | | | | triphosphate eductase (BC 1.17.4.-)- | | | |
| | | | | | Escherichia coli | | | |
| 183 | 2 | 1669 | 224 | gi\|1146200 | DNA or RNA helicase, DNA-dependent ATPase | 74 | 53 | |
| | | | | | [Bacillus subtilis] | | | |
| 213 | 4 | 2265 | 3200 | gi\|1373157 | orf-X; hypothetical protein; Method: | 74 | 63 | |
| | | | | | conceptual translation supplied by author | | | |
| | | | | | [Bacillus subtilis] | | | |
| 229 | 13 | 13774 | 12806 | gnl\|PID\|e290288 | Met-tRNAi formyl transferase [Bacillus | 74 | 55 | |
| | | | | | subtilis] | | | |
| 238 | 31 | 28648 | 28052 | gi\|451072 | di-tripeptide transporter [Lactococcus | 74 | 56 | |
| 244 | 8 | 6409 | 5552 | gi\|467422 | unknown [Bacillus subtilis] | 74 | 60 | |
| 249 | 1 | 7 | 411 | gi\|1591758 | diaminopimelate epimerase [Methanococcus | 74 | 51 | |
| | | | | | jannaschii] | | | |
| 270 | 3 | 1832 | 3955 | gi\|1303829 | YgfK [Bacillus subtilis] | 74 | 55 | |
| 276 | 3 | 1668 | 1357 | gi\|496282 | holin [Bacteriophage Tuc2009] | 74 | 54 | |
| 288 | 9 | 5807 | 5076 | gi\|530063 | glycerol uptake facilitator [Streptococcus | 74 | 60 | |
| | | | | | pneumoniae] sp\|P52281\|GLPF_STRPN GLYCEROL | | | |
| | | | | | UPTAKE FACILITATOR PROTEIN. | | | |
| 292 | 21 | 16780 | 17547 | gi\|1573646 | Mg(2+) transport ATPase protein C (mgtC) | 74 | 42 | |
| | | | | | (SP:P22037) [Haemophilus influenzae] | | | |
| 297 | 1 | 682 | 11 | gnl\|PID\|e255093 | hypothetical protein [Bacillus subtilis] | 74 | 54 | |
| 298 | 3 | 3562 | 3095 | gi\|1303970 | YqjS [Bacillus subtilis] | 74 | 46 | |
| 321 | 10 | 5081 | 6028 | pir\|A32950\|A32950 | probable reductase protein - Leishmania | 74 | 56 | |
| | | | | | major | | | |
| 327 | 2 | 904 | 3285 | gi\|1573876 | virulence associated protein homolog | 74 | 53 | |
| | | | | | (vacB) [Haemophilus influenzae] | | | |
| 334 | 5 | 3942 | 5432 | gi\|1652678 | amidase [Synechocystis sp.] | 74 | 57 | |
| 341 | 13 | 13007 | 12069 | gi\|39881 | ORF 311 (AA 1-311) [Bacillus subtilis] | 74 | 53 | |
| 362 | 7 | 3529 | 5274 | gnl\|PID\|e255093 | hypothetical protein [Bacillus subtilis] | 74 | 58 | |
| 376 | 3 | 1282 | 2346 | gi\|1773090 | transfer RNA-guanine transglycosylase | 74 | 59 | |
| | | | | | [Escherichia coli] | | | |
| 421 | 2 | 48 | 1400 | gi\|710632 | beta-glucosidase [Bacillus subtilis] | 74 | 58 | |
| 471 | 1 | 815 | 3 | gi\|854234 | cymG geno product [Klebsiella oxytoca] | 74 | 53 | |
| 480 | 2 | 263 | 607 | gi\|1303994 | YgkM [Bacillus subtilis] | 74 | 48 | |
| 518 | 7 | 4409 | 5002 | gi\|145821 | EBG enzyme alpha subunit [Escherichia | 74 | 47 | |
| | | | | | coli] | | | |
| 539 | 8 | 6607 | 7179 | gi[1165295 | D3703.8p [Saccharomyces cerevisiae] | 74 | 57 | |
| 542 | 1 | 750 | 4 | gi[1064810 | function unknown [Bacillus subtilis] | 74 | 56 | |
| 559 | 1 | 1204 | 5 | gi\|43821 | nifJ protein (AA 1-1171) [Klebsiella | 74 | 58 | |
| | | | | | pneumoniae] p\|P03833\|NIFJ_KLEPN PYRUVATE- | | | |
| | | | | | FLAVODOXIN OXIDOREDUCTASE (BC -.-.-) | | | |
| 579 | 3 | 1373 | 1624 | gi[1237013 | ORF2 [Bacillus subtilis] | 74 | 46 | |
| 624 | 4 | 2518 | 3669 | gi[467394 | recombination protein [Bacillus subtilis] | 74 | 56 | |
| 688 | 1 | 623 | 3 | gi[662880 | novel hemolytic factor [Bacillus cereus] | 74 | 48 | |
| 763 | 1 | 106 | 441 | gi\|153955 | envM protein [Salmonella typhimurium] | 74 | 46 | |
| 811 | 1 | 3 | 158 | gi\|309662 | pheromone binding protein [Plasmid pCF10] | 74 | 57 | |
| 852 | 1 | 2 | 601 | gi\|309662 | pheromone binding protein [Plasmid pCF10] | 74 | 53 | |
| 935 | 1 | 976 | 2 | gi\|467403 | seryl-tRNA synthetase [Bacillus subtilis] | 74 | 59 | |
| 22 | 2 | 2178 | 2471 | gi\|467460 | unknown [Bacillus subtilis] | 73 | 61 | |
| 24 | 2 | 1126 | 3150 | gi\|1303822 | YqfF [Bacillus subtilis] | 73 | 54 | |
| 33 | 6 | 6638 | 6970 | gi\|536971 | ORF_o76 [Esoherichia coli] | 73 | 56 | |
| 48 | 1 | 621 | 1241 | gnl\|PID\|e274111 | aggregation promoting protein | 73 | 67 | |
| | | | | | [Lactobacillus gasseri] | | | |
| 48 | 6 | 5327 | 7225 | gi\|1185289 | 2-succinyl-6-hydroxy-2,4-cyclohexadiene-1- | 73 | 56 | |
| | | | | | carboxylate synthase [Bacillus subtilis] | | | |
| 50 | 2 | 1097 | 2008 | gi\|1498295 | homoserine kinase homolog [Streptococcus | 73 | 55 | |
| | | | | | pneumoniae] | | | |
| 52 | 4 | 2793 | 4334 | gi\|473902 | alpha-acetolactate synthase [Lactococcus | 73 | 59 | |
| | | | | | lactis] | | | |
| 55 | 1 | 1 | 261 | gi\|396365 | alternate name yjbA [Escherichia coli] | 73 | 36 | |
| 60 | 6 | 5935 | 5549 | gi\|551881 | amidophosphoribosyltransferase | 73 | 57 | |
| | | | | | [Lactobacillus casei] pir\|PC1136\|PC1136 | | | |
| | | | | | purF protein - Lactobacillus casei | | | |
| | | | | | (fragment) sp\|P35853\|PUR1_LACCA | | | |
| | | | | | AMIDOPHOSPHORIBOSYLTRANSFEFASE (SC | | | |
| | | | | | 2.4.2.14) GLUTAMINE | | | |
| | | | | | PHOSPHORIBOSYLPYROPHOSPHATE | | | |
| | | | | | AMIDOTRANSFERASE) (ATASE) FRAGMENT | | | |
| 74 | 2 | 477 | 1355 | gnl\|PID\|e233567 | unknown [Mycobacterium tuberculosis] | 73 | 54 | |
| 81 | 19 | 14213 | 13845 | gi\|606073 | ORF_o169 [Escherichia coli] | 73 | 52 | |
| 93 | 7 | 2861 | 4075 | gi\|405134 | acetate kinase [Bacillus subtilis] | 73 | 56 | |
| 100 | 1 | 1057 | 2 | gi\|1353561 | ORF44 [Bacteriophage rlt] | 73 | 52 | |
| 100 | 41 | 28872 | 28627 | gi\|188492 | heat shock-induced protein [Homo sapiens] | 73 | 42 | |
| 104 | 4 | 5558 | 5274 | gi\|312440 | aspartate carbamoyltransferase [Bacillus | 73 | 55 | |
| | | | | | caldolyticus] pir\|S34318\|S34318 aspartate | | | |
| | | | | | carbamoyltransferase (EC 2.1.3.2) - | | | |
| | | | | | acillus caldolyticus | | | |
| 119 | 5 | 3264 | 3638 | gi\|473707 | positive regulator for virulence factors | 73 | 39 | |
| | | | | | [Clostridium perfringens] | | | |
| 123 | 17 | 16156 | 15665 | gi\|1303703 | YrkD [Bacillus subtilis] | 73 | 37 | |
| 123 | 18 | 16133 | 16465 | gi\|1303893 | YghL [Bacillus subtilis] | 73 | 43 | |
| 124 | 3 | 2165 | 1722 | gi\|486661 | TMnm related protein [Saccharomyces | 73 | 45 | |
| | | | | | cerevisiae] | | | |
| 127 | 6 | 5778 | 5101 | gi\|290561 | o188 [Escherichia coli] | 73 | 48 | |
| 128 | 10 | 6896 | 7201 | pir\|S37387\|s37387 | internalin A precursor - Listeria | 73 | 53 | |
| | | | | | monocytogenes | | | |
| 137 | 2 | 980 | 1954 | gi\|1276882 | EpsI [Streptococcus thermophilus] | 73 | 56 | |
| 141 | 3 | 942 | 2777 | gi\|467336 | unknown [Bacillus subtilis] | 73 | 49 | |
| 146 | 7 | 5611 | 4739 | gi\|149395 | lacC [Lactococcus lactis] | 73 | 56 | |
| 154 | 6 | 3566 | 4621 | gi\|1354775 | pfoS/R [Treponema pallidum] | 73 | 46 | |
| 155 | 8 | 7136 | 6726 | gnl\|PID\|e247026 | orf6 [Lactobacillus sake] | 73 | 61 | |
| 158 | 8 | 8693 | 7119 | gi\|1674275 | (AE000056) Mycoplasma pneumonlae, | 73 | 45 | |
| | | | | | hypothetical ABC transporter (yjcW) | | | |
| | | | | | homolog; similar to Swiss-Prot Accession | | | |
| | | | | | Number P32721, from E. coli [Mycoplasma | | | |
| | | | | | pneumoniae] | | | |
| 162 | 4 | 4039 | 3305 | gi\|142997 | glycerol uptake facilitator [Bacillus | 73 | 55 | |
| | | | | | subtilis] | | | |
| 165 | 4 | 3962 | 3105 | gi\|882736 | ORFf278 [Escherichia coli] | 73 | 58 | |
| 171 | 3 | 3952 | 4689 | gnl\|PID\|e63527 | FtsE [Mycobacterium tuberculosis] | 73 | 56 | |
| 171 | 5 | 5673 | 6596 | gi\|1303854 | YqgG [Bacillus subtilis] | 73 | 59 | |
| 179 | 9 | 9302 | 10414 | gnl\|PID\|e254984 | hypothetical protein [Bacillus subtilis] | 73 | 55 | |
| 180 | 1 | 24 | 1151 | gi\|43985 | nifS-like gene [Lactobacillus delbrueckii] | 73 | 56 | |
| 181 | 12 | 10036 | 9674 | gnl\|PID\|e220317 | chorismate mutase [Staphylococcus xylosus] | 73 | 50 | |
| 181 | 13 | 10713 | 10003 | gi\|39813 | phospho-2-dehydro-3-deoxyheptonate | 73 | 56 | |
| | | | | | aldolase [Bacillus subtilis] | | | |
| | | | | | ir\|S21418\|S21418 phospho-2-dehydro-3- | | | |
| | | | | | deoxyheptonate aldolase (EC 1.2.15) - | | | |
| | | | | | Bacillus subtilis | | | |
| 183 | 3 | 2716 | 1667 | gi\|1146199 | putative [Bacillus subtilis] | 73 | 36 | |
| 198 | 1 | 869 | 108 | gi\|142854 | homologous to E. coli radC gene product | 73 | 47 | |
| | | | | | and to unidentified protein rom | | | |
| | | | | | Staphylococcus aureus [Bacillus subtilis] | | | |
| 210 | 1 | 956 | 3 | gnl\|PID\|e281310 | acetyl coenzyme A acetyltransferase | 73 | 54 | |
| | | | | | (thiolase) [Thermoanaerobacterium | | | |
| | | | | | thermosaccharolyticum] | | | |
| 230 | 1 | 1 | 171 | gi\|304143 | S-layer protein [Bacillus circulans] | 73 | 46 | |
| 235 | 1 | 715 | 2 | gi\|1732315 | transport system permease homolog | 73 | 49 | |
| | | | | | [Listeria monocytogenes] | | | |
| 235 | 2 | 888 | 676 | gi\|551726 | sporulation protein [Bacillus subtilis] | 73 | 54 | |
| 242 | 4 | 3290 | 3517 | gnl\|PID\|e236570 | orf6 gene product [Enterococcus faecalis] | 73 | 30 | |
| 242 | 8 | 5914 | 6492 | gi\|1742340 | HipB protein. [Escherichia coli] | 73 | 49 | |
| 250 | 3 | 3037 | 2411 | gi\|1174238 | TipB [Pseudomonas fluorescens] | 73 | 57 | |
| 254 | 5 | 1124 | 792 | gi\|580900 | ORF3 gene product [Bacillus subtilis] | 73 | 52 | |
| 269 | 9 | 5507 | 5154 | gi\|1303790 | YqeI [Bacillus subtilis] | 73 | 60 | |
| 269 | 12 | 7989 | 7345 | gi\|285621 | undefined open reading frame [Bacillus | 73 | 54 | |
| | | | | | stearothermophilus] | | | |
| 284 | 1 | 1 | 915 | gi\|455528 | ORF2 [Streptococcus thermophilus | 73 | 54 | |
| | | | | | bacteriophage] | | | |
| 290 | 3 | 1932 | 2678 | gnl\|PID\|e248883 | unknown [Mycobacterium tuberculosis] | 73 | 57 | |
| 295 | 8 | 4521 | 4739 | gi\|145478 | putative [Escherichia coli] | 73 | 56 | |
| 296 | 1 | 2 | 1846 | gnl\|PID\|e249642 | transketolase [Bacillus subtilis] | 73 | 59 | |
| 310 | 4 | 3488 | 3036 | gi\|1591900 | nucleoside diphosphate kinase | 73 | 48 | |
| | | | | | [Methanococcus jannaschii] | | | |
| 313 | 1 | 17 | 778 | gi\|1658371 | cyclic beta-1,2-glucan modification | 73 | 60 | |
| | | | | | protein [Rhizobium meliloti] | | | |
| 314 | 3 | 2642 | 2067 | gi\|1330343 | C34D4.12 gene product [Caenorhabditis | 73 | 56 | |
| | | | | | elegans | | | |
| 325 | 1 | 492 | 4 | gi\|407908 | EIIscr [Staphylococcus xylosus] | 73 | 56 | |
| 345 | 19 | 20549 | 21901 | gi\|443691 | glutathione reductase [Streptococcus | 73 | 59 | |
| | | | | | thermophilus] | | | |
| 359 | 4 | 3280 | 2252 | gi\|1001478 | hypothetical protein [Synechocystis sp.] | 73 | 50 | |
| 374 | 1 | 884 | 3 | gi\|435123 | PacL [Synechococcus sp.] | 73 | 58 | |
| 379 | 6 | 5676 | 4339 | gi\|887822 | possible frameshift at end to join to next | 73 | 57 | |
| | | | | | ORF? [Escherichia coli] | | | |
| 383 | 4 | 3815 | 3387 | gi\|1651732 | mutator MutT protein [Synechocystis sp.] | 73 | 52 | |
| 392 | 4 | 3454 | 5202 | gi\|294587 | minimal change nephritis transmembrane | 73 | 56 | |
| | | | | | glycoprotein [Rattus orvegicus] | | | |
| 394 | 5 | 4267 | 5250 | gi\|49011 | amidinotransferase II [Streptomyces | 73 | 42 | |
| | | | | | griseus] | | | |
| 395 | 10 | 4252 | 4608 | gi\|1591139 | M. jannaschii predicted coding region | 73 | 48 | |
| | | | | | MJ0435 [Methanococcus jannaschii] | | | |
| 397 | 1 | 885 | 4 | gnl\|PID\|e249658 | GriA [Bacillus subtilis] | 73 | 56 | |
| 399 | 15 | 10007 | 11569 | gi\|565619 | citrate lyase alpha-subunit [Klebsiella | 73 | 54 | |
| | | | | | pneumoniae] pir\|S60776\|560776 citrate | | | |
| | | | | | (pro-3S)-lyase (EC 4.1.3.6) alpha chain - | | | |
| | | | | | lebsiella pneumoniae | | | |
| 416 | 2 | 660 | 1649 | gi\|475114 | regulatory protein [Pediococcus | 73 | 50 | |
| | | | | | pentosaceus] | | | |
| 436 | 6 | 4124 | 3540 | gi\|727436 | putative 20-kDa protein [Lactococcus | 73 | 53 | |
| | | | | | lactis] | | | |
| 446 | 3 | 1618 | 4260 | gi\|882711 | exonuclease V alpha-subunit [Escherichia | 73 | 48 | |
| | | | | | coli] | | | |
| 462 | 1 | 819 | 43 | gi\|1399011 | immunogenic secreted protein precursor | 73 | 63 | |
| | | | | | (Streptococcus pyogenes ] | | | |
| 482 | 5 | 3181 | 2501 | gi\|1072419 | glcB gene product [Staphylococcus | 73 | 55 | |
| | | | | | carnosus] | | | |
| 495 | 4 | 1340 | 3031 | gi\|146547 | kdpA [Escherichia coli] | 73 | 55 | |
| 523 | 4 | 2354 | 1821 | pir\|A00392\|RDSODF | dihydrofolate reductase (EC 1.5.1.3) - | 73 | 54 | |
| | | | | | Enterococcus faecium | | | |
| 543 | 5 | 3099 | 2893 | gi\|19743 | nsGRP-2 [Nicotiana sylvestris] | 73 | 53 | |
| 567 | 1 | 9 | 740 | gi\|1147601 | cyclophilin isoform 4 [Caenorhabditis | 73 | 54 | |
| | | | | | elegans] | | | |
| 629 | 1 | 945 | 4 | gi\|1006620 | ABC transporter [Synechocystis sp.] | 73 | 46 | |
| 714 | 2 | 344 | 556 | gi\|1045872 | ATP-binding protein [Mycoplasma | 73 | 61 | |
| | | | | | genitalium] | | | |
| 747 | 1 | 320 | 3 | gi\|437389 | transposase [Lactococcus lactis] | 73 | 56 | |
| 764 | 1 | 3 | 515 | gi\|532554 | ORF21 [Enterococcus faecalis] | 73 | 50 | |
| 766 | 1 | 683 | 3 | gi\|1673788 | (AE000015) Mycoplasma pneumoniae, | 73 | 52 | |
| | | | | | fructose-bisphosphate aldolase; similar to | | | |
| | | | | | Swiss-Prot Accession Number P13243, from | | | |
| | | | | | B. subtilis [Mycoplasma pneumoniae] | | | |
| 880 | 1 | 198 | 4 | gi\|309661 | regulatory protein [Plasmid pCF10] | 73 | 50 | |
| 897 | 1 | 3 | 170 | gi\|807976 | unknown [Saccharomyces cerevisiae] | 73 | 57 | |
| 5 | 1 | 223 | 2 | gnl\|PID\|e255315 | unknown [Mycobacterium tuberculosis] | 72 | 56 | |
| 8 | 5 | 4158 | 4799 | gi\|587088 | shikimate kinase [Bacillus subtilis] | 72 | 54 | |
| 19 | 6 | 2600 | 2833 | gi\|34844 | embryonic myosin heavy chain (AA 1 - 1940) | 72 | 38 | |
| | | | | | [Homo sapiens] ir\|S04090\|S04090 myosin | | | |
| | | | | | heavy chain, skeletal muscle, embryonic - | | | |
| | | | | | man | | | |
| 19 | 25 | 12872 | 14605 | gnl\|PID\|e242896 | orf5 [Bacteriophage A2] | 72 | 52 | |
| 21 | 4 | 2777 | 2598 | gi\|54115 | skeletal muscle chloride channel [Mus | 72 | 45 | |
| | | | | | musculus domesticus] | | | |
| 23 | 7 | 3702 | 4847 | gi\|144714 | NADPH-dependent butanol dehydrogenase | 72 | 48 | |
| | | | | | [Clostridium acetobutylicum] | | | |
| | | | | | pir\|JU0053\|JJU0053 NADPH-dependent butanol | | | |
| | | | | | dehydrogenase - lostridium acetobutylicum | | | |
| 32 | 1 | 1073 | 3 | gi\|1303839 | YqfR [Bacillus subtilis] | 72 | 50 | |
| 39 | 8 | 4137 | 3244 | pir\|A32950\|A32950 | probable reductase protein - Leishmania | 72 | 55 | |
| | | | | | major | | | |
| 43 | 3 | 969 | 1919 | gi\|290494 | o287 [Escherichia coli] | 72 | 46 | |
| 45 | 2 | 911 | 1567 | gi\|1039479 | ORFU [Lactococcus lactis] | 72 | 50 | |
| 55 | 6 | 2549 | 2896 | gi\|755602 | unknown [Bacillus subtilis] | 72 | 51 | |
| 55 | 7 | 3178 | 3660 | gi\|1303914 | YghY [Bacillus subtilis] | 72 | 49 | |
| 60 | 1 | 1302 | 34 | gi\|143374 | phosphoribosyl glycinamide synthetase | 72 | 59 | |
| | | | | | (PUR-D; gtg start codon) Bacillus | | | |
| | | | | | subtilis] | | | |
| 60 | 3 | 3422 | 2838 | gi\|143372 | phosphoribosyl glycinamide | 72 | 48 | |
| | | | | | formyltransferase (PUR-N) [Bacillus | | | |
| | | | | | ubtilis] | | | |
| 60 | 10 | 9771 | 9010 | gi\|143367 | phosphoribosyl aminoidazole | 72 | 57 | |
| | | | | | succinocarboxamide synthetase (PUR-C; tg | | | |
| | | | | | start codon) [Bacillus subtilis] | | | |
| 70 | 5 | 3615 | 3833 | sp\|P43672\|YCBH_ECO | HYPOTHETICAL 14.4 KD PROTEIN IN PYRD-PQIA | 72 | 48 | |
| | | | | LI | INTERGENIC REGION. | | | |
| 79 | 2 | 632 | 841 | gi\|1652343 | ABC transporter [Synechocystis sp.] | 72 | 47 | |
| 85 | 2 | 1843 | 770 | gi\|1354775 | pfoS/R [Treponema pallidum] | 72 | 45 | |
| 87 | 1 | 2 | 745 | gi\|42029 | ORF1 gene product [Escherichia coli] | 72 | 47 | |
| 88 | 1 | 124 | 1047 | gi\|535348 | CodV [Bacillus subtilis] | 72 | 50 | |
| 88 | 7 | 3862 | 4752 | gi\|149413 | ORF [Lactococcus lactis] | 72 | 51 | |
| 91 | 2 | 611 | 877 | gi\|726480 | L-glutamine-D-fructose-6-phosphate | 72 | 57 | |
| | | | | | amidotransferase [Bacillus ubtilis] | | | |
| 98 | 16 | 16302 | 15163 | gi\|147326 | transport protein [Escherichia coli] | 72 | 57 | |
| 101 | 6 | 4676 | 4023 | gi\|1109685 | ProW [Bacillus subtilis] | 72 | 53 | |
| 104 | 3 | 5331 | 3982 | gi\|312441 | dihydroorotase [Bacillus caldolyticus] | 72 | 58 | |
| 114 | 10 | 11165 | 12205 | gi\|556881 | Similar to Saccharomyces cerevisiae SUA5 | 72 | 60 | |
| | | | | | protein [Bacillus subtilis] | | | |
| | | | | | pir\|S49358\|S49358 ipc-29d protein - | | | |
| | | | | | Bacillus subtilis sp\|P39153\|YWLC_BACSU | | | |
| | | | | | HYPOTHETICAL 37.0 KD PROTEIN IN SPOIIR- | | | |
| | | | | | GLYC NTERGENIC REGION. | | | |
| 128 | 19 | 14325 | 11560 | gi\|143150 | levR [Bacillus subtilis] | 72 | 58 | |
| 130 | 2 | 382 | 1437 | gi\|308850 | ATP binding protein [Lactoccus lactis] | 72 | 55 | |
| 135 | 4 | 5012 | 3693 | gi\|413940 | ipa-16d gene product [Bacillus subtilis] | 72 | 56 | |
| 150 | 6 | 5114 | 5878 | gi\|495046 | tripeptidase [Lactococcus lactis] | | | |
| 154 | 9 | 5850 | 5677 | gi\|425467 | transposase [Lactobacillus helveticus] | 72 | 52 | |
| 168 | 4 | 1375 | 1563 | gi\|1652869 | NADH dehydrogenase [Synechocystis sp.] | 72 | 55 | |
| 173 | 5 | 2879 | 4024 | gnl\|PID\|e254877 | unknown [Mycobacterium tuberculosis] | 72 | 57 | |
| 179 | 2 | 1608 | 2399 | gi\|709993 | hypothetical protein [Bacillus subtilis] | 72 | 45 | |
| 179 | 6 | 7584 | 7844 | gi\|1161934 | DltC [Lactobacillus casei] | 72 | 54 | |
| 180 | 21 | 19948 | 21105 | gi\|1773197 | similar to M. fervidus malate | 72 | 55 | |
| | | | | | dehydrogenase [Escherichia coli] | | | |
| 182 | 1 | 3 | 413 | gi\|1146182 | putative [Bacillus subtilis] | 72 | 48 | |
| 200 | 23 | 13106 | 12789 | gi\|1707358 | polyprotein precurser [Soybean mosaic | 72 | 34 | |
| | | | | | virus] | | | |
| 204 | 6 | 2462 | 2289 | gi\|1200525 | dihydrolipoamide acetyltransferase | 72 | 61 | |
| | | | | | [Pseudomonas aeruginosa] | | | |
| 204 | 9 | 6374 | 5187 | gi\|1732040 | alcohol dehydrogenase [Actinobacillus | 72 | 56 | |
| | | | | | pleuropneumoniae] | | | |
| 205 | 1 | 463 | 71 | gi\|42029 | ORF1 gene product [Escherichia coli] | 72 | 57 | |
| 210 | 7 | 6433 | 5279 | gi\|142978 | glycerol dehydrogenase [Bacillus | 72 | 46 | |
| | | | | | stearothermophilus] | pir I JQ1474 I JQ1474 | | |
| | | | | | glycerol dehydrogenase (EC 1.1.1.6) - | | | |
| | | | | | Bacillus tearothermophilus | | | |
| 213 | 6 | 4086 | 5141 | gi\|431231 | uracil permease [Bacillus caldolyticus] | 72 | 51 | |
| 223 | 1 | 99 | 833 | gi\|1573615 | ATP-binding protein (abc) [Haemophilus | 72 | 47 | |
| | | | | | influenzae] | | | |
| 227 | 1 | 26 | 886 | gi\|1070015 | protein-dependent [Bacillus subtilis] | 72 | 52 | |
| 228 | 4 | 2047 | 2481 | gi\|467339 | unknown [Bacillus subtilis] | 72 | 50 | |
| 238 | 17 14728 | 15582 | gi\|882736 | ORF_f278 [Escherichia coli] | 72 | 59 | | |
| 250 | 6 | 4169 | 4765 | gi\|437389 | transposase [Lactococcus lactis] | 72 | 56 | |
| 258 | 7 | 5296 | 7089 | gi\|192185 | acid beta-galactosidase [Mus musculus] | 72 | 53 | |
| 266 | 3 | 2024 | 1773 | gi\|145149 | ORFd [Escherichia coli] | 72 | 50 | |
| 269 | 8 | 5142 | 4477 | gi\|1303791 | YgeJ [Bacillus subtilis] | 72 | 45 | |
| 276 | 13 | 9843 | 8152 | gnl\|PID\|e59644 | predicted 86.4kd protein; 52Kd observed | 72 | 48 | |
| | | | | | [Mycobacteriophage 15] | | | |
| 278 | 2 | 965 | 1573 | gi\|425467 | transposase [Lactobacillus helveticus] | 72 | 52 | |
| 279 | 2 | 1305 | 340 | gnl\|PID\|e198981 | ttg start [Campylobacter coli] | 72 | 47 | |
| 283 | 4 | 1668 | 2045 | gi\|1353563 | ORF46 [Bacteriophage rlt] | 72 | 48 | |
| 286 | 2 | 789 | 2606 | gi\|1651216 | Pz-peptidase [Bacillus licheniformis] | 72 | 52 | |
| 290 | 4 | 2676 | 3239 | gi\|1653645 | ribosome releasing factor [Synechocystis | 72 | 56 | |
| | | | | | sp.] | | | |
| 301 | 2 | 1762 | 899 | gi\|606013 | CG Site No. 829 [Escherichia coli] | 72 | 57 | |
| 362 | 2 | 377 | 688 | gi\|1001826 | cadmium-transporting ATPase [Synechocystis | 72 | 53 | |
| | | | | | sp.] | | | |
| 369 | 1 | 582 | 142 | gi\|153745 | mannitol-specific enzyme III | 72 | 47 | |
| | | | | | [Streptococcus mutans]pir\|B44798\|844798 | | | |
| | | | | | mannitol-specific factor III, MtlF - | | | |
| | | | | | treptococcus mutans | | | |
| 379 | 2 | 1934 | 1527 | gi\|1055071 | C23G10.2 gene product [Caenorhabditis | 72 | 51 | |
| | | | | | elegans] | | | |
| 384 | 2 | 694 | 1098 | gi\|1208474 | hypothetical protein [Synechocystis sp.] | 72 | 49 | |
| 388 | 1 | 291 | 4 | gi\|1673836 | (AE000018) Mycoplasma pneumoniae, | 72 | 43 | |
| | | | | | osmotically inducible protein; similar to | | | |
| | | | | | Swiss-Prot Accession Number P23929, from | | | |
| | | | | | E. coli [Mycoplasma pneumoniae] | | | |
| 401 | 6 | 3995 | 5137 | gi\|508242 | ORF 6, putative Galf synthesis pathway | 72 | 62 | |
| | | | | | protein [Escherichia coli] gi\|510253 orf6 | | | |
| | | | | | [Escherichia coli] | | | |
| 404 | 2 | 2119 | 776 | gi\|466474 | cellobiose phosphotransferase enzyme II′ | 72 | 48 | |
| | | | | | [Bacillus tearothermophilus] | | | |
| 416 | 4 | 3461 | 1980 | gi\|710632 | beta-glucosidase [Bacillus subtilis] | 72 | 55 | |
| 416 | 7 | 6285 | 5551 | gnl\|PID\|e269549 | Unknown [Bacillus subtilis] | 72 | 52 | |
| 419 | 3 | 759 | 505 | gi\|928830 | ORF75; putative [Lactococcus lactis phage | 72 | 47 | |
| | | | | | BK5-T] | | | |
| 441 | 4 | 3420 | 4676 | gi\|1732195 | beta-cystathionase [Vibrio furnissii] | 72 | 54 | |
| 460 | 3 | 1385 | 2641 | gi\|1652389 | beta ketoacyl-acyl carrier protein | 72 | 55 | |
| | | | | | synthase [Synechocystis sp.] | | | |
| 460 | 5 | 3129 | 3560 | gnl\|PID\|e289141 | similar to hydroxymyristoyl-(acyl carrier | 72 | 54 | |
| | | | | | protein) dehydratase [Bacillus subtilis] | | | |
| 460 | 8 | 5817 | 6023 | gi\|285621 | undefined open reading frame [Bacillus | 72 | 57 | |
| | | | | stearothermophilus] | | | | |
| 462 | 2 | 1591 | 785 | gi\|148304 | beta-1,4-N-acetylmuramoylhydrolase | 72 | 51 | |
| | | | | | [Enterococcus hirae] pir\|A42296\|A42296 | | | |
| | | | | | lysozyme 2 (EC 3.2.1.-) precursor - | | | |
| | | | | | Enterococcus irae (ATCC 9790) | | | |
| 467 | 1 | 2 | 706 | gi\|148711 | 6-aminohexanoate-cyclic-dimer hydrolase | 72 | 50 | |
| | | | | | [Flavobacterium sp.] gi\|488343 6- | | | |
| | | | | | aminohexanoate-cyclic-dimer hydrolase | | | |
| | | | | | [Flavobacterium p.] | | | |
| 469 | 3 | 1144 | 1419 | gi\|466474 | cellobiose phosphotransferase enzyme II″ | 72 | 48 | |
| | | | | | [Bacillus tearothermophilusi] | | | |
| 493 | 1 | 1124 | 240 | sp\|IP5O848IYPW&BAC | HYPOTHETICAL 58.2 KD PROTEIN IN KDGT-XPT | 72 | 58 | |
| SU | INTERGENIC REGION. | | | | | | | |
| 536 | 2 | 379 | 218 | gi\|437389 | transposase [Lactococcus lactis] | 72 | 58 | |
| 543 | 1 | 574 | 86 | gi\|290513 | f470 [Escherichia coli] | 72 | 47 | |
| 592 | 1 | 57 | 680 | gi\|987092 | ABC-transporter [Streptomyces | 72 | 55 | |
| | | | | | hygroscopicus] | | | |
| 666 | 2 | 551 | 967 | gi\|1064786 | function unknown [Bacillus subtilis] | 72 | 48 | |
| 762 | 1 | 974 | 273 | gi\|304928 | pantothenate synthetase [Escherichia coli] | 72 | 55 | |
| 792 | 1 | 401 | 3 | pir\|A36933\|A36933 | diacyiglycerol kinase homolog - | 72 | 50 | |
| | | | | | Streptococcus mutans | | | |
| 873 | 1 | 183 | 4 | gnl\|PID\|e258329 | oxaloacetate decarboxylase alpha-chain | 72 | 55 | |
| | | | | | [Legionella pneumophila] | | | |
| 4 | 4 | 3799 | 3155 | gi\|496943 | ORF [Saccharomyces cerevisiae] | | | |
| 10 | 2 | 180 | 977 | gnl\|PID\|e234078 | hom [Lactococcus lactis] | 71 | 49 | |
| 16 | 7 | 4922 | 6097 | gi\|534982 | phosphoglucomutase [Spinacia oleracea] | 71 | 54 | |
| 21 | 6 | 4148 | 3972 | gi\|1736645 | Proline/betaine transporter (Proline | 71 | 50 | |
| | | | | | porter II) (PPII) . [Escherichia coli] | | | |
| 23 | 27 | 16452 | 17459 | gi\|1408503 | yxeR gene product [Bacillus subtilis] | 71 | 52 | |
| 25 | 7 | 5812 | 6669 | gi\|413943 | ipa-19d gene product [Bacillus subtilis] | 71 | 58 | |
| 31 | 1 | 80 | 946 | gi\|534045 | antiterminator [Bacillus subtilis] | 71 | 47 | |
| 39 | 3 | 755 | 1297 | sp\|P09997\|YIDA_ECO | HYPOTHETICAL 29.7 KD PROTEIN IN IBPA-GYRB | 71 | 50 | |
| | | | | LI | INTERGENIC REGION. | | | |
| 39 | 7 | 2537 | 3193 | pir\|C43748\|C43748 | hypothetical protein (pepX 3′ region) - | 71 | 54 | |
| | | | | | Lactococcus lactis subsp. lactis | | | |
| 45 | 10 | 5119 | 5484 | gi\|606044 | ORF_o130; Geneplot suggests frameshift, | 71 | 51 | |
| | | | | | none found [Escherichia oil] | | | |
| 48 | 10 | 11722 | 10148 | gi\|20432 | 4-cournarate:CoA ligase Pc4Cl-1 (AA 1-544) | 71 | 39 | |
| | | | | | [Petroselinum crispum] ir\|S0l667\|S01667 4- | | | |
| | | | | | coumarate--CoA ligase (EC 6.2.1.12) (clone | | | |
| | | | | | 4CL-1) - parsley | | | |
| 55 | 4 | 1470 | 1709 | gi\|1303901 | YqhT [Bacillus subtilis] | 71 | 54 | |
| 57 | 10 | 12899 | 13060 | gi\|40053 | phenylalanyl-tRNA synthetase alpha subunit | 71 | 45 | |
| | | | | | [Bacillus subtilis] ir\|S11730\|YFBSA | | | |
| | | | | | phenylalanine--tRNA ligase (EC 6.1.1.20) | | | |
| | | | | | alpha ain - Bacillus subtilis | | | |
| 58 | 3 | 3743 | 2571 | gi\|1658403 | formate dehydrogenase alpha subunit | 71 | 51 | |
| | | | | | [Moorella thermoacetica] | | | |
| 68 | 11 | 8225 | 8602 | gi\|793910 | surface antigen [Homo sapiens] | 71 | 49 | |
| 74 | 4 | 2908 | 2042 | gi\|467435 | unknown [Bacillus subtilis] | 71 | 55 | |
| 85 | 3 | 3267 | 1966 | gi\|142613 | branched chain alpha-keto acid | 71 | 56 | |
| | | | | | dehydrogenase E2 [Bacillus subtilis] | | | |
| | | | | | gi\|1303944 BfmBB [Bacillus subtilis] | | | |
| 111 | 8 | 5737 | 4253 | gi\|1256135 | YbbF [Bacillus subtilis] | 71 | 50 | |
| 111 | 9 | 6590 | 5730 | gi\|1573762 | glucokinase regulator [Haemophilus | 71 | 53 | |
| | | | | | influenzae] | | | |
| 120 | 1 | 111 | 353 | gnl\|PID\|e235823 | unknown [Schizosaccharmyces pombe] | 71 | 52 | |
| 123 | 11 | 10387 | 11196 | gi\|1773195 | hypothetical [Escherichia coli] | 71 | 55 | |
| 151 | 3 | 4045 | 3098 | gi\|1256618 | transport protein [Bacillus subtilis] | 71 | 51 | |
| 172 | 6 | 3949 | 4806 | gi\|1262288 | CdsA [Brucella abortus] | 71 | 56 | |
| 172 | 7 | 5264 | 6448 | gi\|40100 | rodC (tag3) polypeptide (AA 1-746) | 71 | 52 | |
| | | | | | [Bacillus subtilis] ir\|S06049\|S06049 rode | | | |
| | | | | | protein - Bacillus subtilis | | | |
| | | | | | p\|P13485\|TAGF_BACSU TEICHOIC ACID | | | |
| | | | | | BIOSYNTHESIS PROTEIN F. | | | |
| 190 | 7 | 3454 | 3122 | gi\|532556 | ORF23 [Enterococcus faecalis] | 71 | 52 | |
| 195 | 24 | 9850 | 11871 | gi\|405564 | traE [Plasmid pSK41] | 71 | 45 | |
| 215 | 4 | 3361 | 2711 | gi\|1573086 | uridine kinase (uridine monophosphokinase) | 71 | 51 | |
| | | | | | (udk) [Haemophilus influenzae] | | | |
| 218 | 2 | 1456 | 2613 | gnl\|PID\|e254644 | membrane protein [Streptococcus | 71 | 41 | |
| | | | | | pneumoniae] | | | |
| 222 | 3 | 1205 | 2053 | gnl\|PID\|e255114 | glutamate racemase [Bacillus subtilis] | 71 | 56 | |
| 222 | 4 | 1611 | 1387 | gi\|1001195 | phosphate transport system permease | 71 | 57 | |
| | | | | | protein PstA [Synechocystis sp.] | | | |
| 222 | 14 | 8852 | 9853 | gi\|466720 | No definition line found [Escherichia | 71 | 53 | |
| | | | | | coli] | | | |
| 238 | 22 | 19256 | 20578 | gi\|595299 | YgiK [Salmonella typhimurium] | 71 | 50 | |
| 255 | 3 | 2692 | 1061 | gnl\|PID\|e254877 | unknown [Mycobacterium tuberculosis] | 71 | 55 | |
| 265 | 5 | 2960 | 1581 | gi\|1039479 | ORFU [Lactococcus lactis] | 71 | 58 | |
| 276 | 2 | 1359 | 538 | gi\|496283 | lysin [Bacteriophage Tuc2009] | 71 | 63 | |
| 290 | 5 | 3552 | 4379 | gi\|1016162 | ABC transporter subunit [Cyanophora | 71 | 49 | |
| | | | | | paradoxa] | | | |
| 290 | 7 | 5659 | 6912 | gi\|1001708 | NifS [Synechocystis sp.] | 71 | 56 | |
| 292 | 3 | 948 | 2156 | gn1\|PID\|e233874 | hypothetical protein [Bacillus subtilis] | 71 | 55 | |
| 318 | 4 | 3229 | 2285 | gi\|1256138 | YbbI [Bacillus subtilis] | 71 | 54 | |
| 333 | 1 | 145 | 741 | gi\|293011 | unknown protein [Lactococcus lactis] | 71 | 50 | |
| 344 | 1 | 76 | 396 | gi\|853775 | unknown [Bacillus subtilis] | 71 | 53 | |
| 350 | 1 | 138 | 1394 | gi\|1652389 | beta ketoacyl-acyl carrier protein | 71 | 57 | |
| | | | | | synthase [Synechocystis sp.] | | | |
| 363 | 4 | 4184 | 5674 | gi\|1657518 | similar to fdrA gene of E. coli | 71 | 54 | |
| | | | | | [Escherichia coli] | | | |
| 364 | 5 | 5319 | 6563 | gi\|1657522 | hypothetical protein [Escherichia coli] | 71 | 46 | |
| 367 | 13 | 6539 | 6162 | gi\|44225 | ribosomal protein L18 (AA 1-116) | 71 | 51 | |
| | | | | | [Mycoplasma capricolum] ir\|S02847\|R5YM18 | | | |
| | | | | | ribosomal protein L18 - Mycoplasma | | | |
| | | | | | capricolum GC3) | | | |
| 379 | 7 | 6884 | 5655 | gi\|887821 | ORF_o398 [Escherichia coli] | 71 | 50 | |
| 399 | 9 | 6528 | 7664 | gi\|154198 | oxaloacetate decarboxylase [Salmonella | 71 | 50 | |
| | | | | | typhimurium] pir\|C44465\|C44465 sodium ion | | | |
| | | | | | pump oxaloacetate decarboxylase ubunit | | | |
| | | | | | beta - Salmonella typhimurium | | | |
| 399 | 18 | 13540 | 14778 | gi\|143165 | malic enzyme (EC 1.1.1.38) [Bacillus | 71 | 46 | |
| | | | | | stearothermophilus] pir\|A33307\|DEBSXS | | | |
| | | | | | malate dehydrogenase oxaloacetate- | | | |
| | | | | | decarboxylating) (EC 1.1.1.38) - Bacillus | | | |
| | | | | | tearothermophilus | | | |
| 404 | 4 | 3769 | 3029 | gi\|143402 | recombination protein (ttg start codon) | 71 | 48 | |
| | | | | | [Bacillus subtilis] gi\|1303923 RecN | | | |
| | | | | | [Bacillus subtilis] | | | |
| 464 | 1 | 1532 | 216 | gi\|895749 | putative cellobiose phosphotransferase | 71 | 40 | |
| | | | | | enzyme II″ [Bacillus ubtilis] | | | |
| 464 | 3 | 2088 | 2846 | gi\|1486242 | unknown [Bacillus subtilis] | 71 | 39 | |
| 481 | 2 | 954 | 409 | gi\|144729 | butanol dehydrogenase [Clostridium | 71 | 58 | |
| | | | | | acetobutylicum] sp\|Q04944\|ADHA_CLOAB NADH- | | | |
| | | | | | DEPENDENT BUTANOL DEHYDROGENASE A (EC | | | |
| | | | | | .1.1.-) (BDH I). | | | |
| 482 | 4 | 2503 | 1841 | gi\|1072418 | gicA gene product [Staphylococcus | 71 | 58 | |
| | | carnosus] | | | | | | |
| 496 | 2 | 1636 | 848 | gi\|1001226 | methionine aminopeptidase [Synechocystis | 71 | 51 | |
| | | | | | sp.] | | | |
| 503 | 2 | 1624 | 650 | gi\|39478 | ATP binding protein of transport ATPases | 71 | 49 | |
| | | | | | [Bacillus firmus] ir\|S15486\|S15486 ATP- | | | |
| | | | | | binding protein - Bacillus firmus | | | |
| | | | | | p\|26946\|YATR_BACFI HYPOTHETICAL ABC | | | |
| | | | | | TRANSPORTER ATP-BINDNG OTEIN. | | | |
| 513 | 2 | 1590 | 982 | gnl\|PID\|e202290 | unknown [Lactobacillus sake] | 71 | 46 | |
| 530 | 1 | 2 | 1534 | gi\|1542974 | AbcA [Thermoanaerobacterium | 71 | 52 | |
| | | | | | thermosulfurigenes] | | | |
| 537 | 1 | 706 | 365 | gi\|929972 | ORFB; similar to B. anthracis SterneL | 71 | 57 | |
| | | | | | element ORFB; putative S150-like | | | |
| | | | | | transposase [Bacillus anthracis] | | | |
| 553 | 1 | 304 | 1287 | gi\|1653479 | regulatory components of sensory | 71 | 48 | |
| | | | | | transduction system [Synechocystis sp.] | | | |
| 573 | 9 | 5560 | 5090 | gi\|143799 | MtrA [Bacillus subtilis] | 71 | 59 | |
| 583 | 1 | 21 | 341 | gi\|1064791 | function umknown [Bacillus subtilis] | 71 | 50 | |
| 584 | 2 | 638 | 276 | gi\|662792 | single-stranded DNA binding protein | 71 | 58 | |
| | | | | | [unidentified eubacterium] | | | |
| 585 | 1 | 282 | 809 | gi\|666972 | ORF 168 [Synechococcus sp.] | 71 | 46 | |
| 611 | 1 | 985 | 2 | gi\|1039479 | ORFU [Lactococcus lactis] | 71 | 55 | |
| 616 | 1 | 350 | 3 | gi\|1088272 | nitrogen fixation protein [Bacillus | 71 | 52 | |
| | | | | | cereus] | | | |
| 624 | 1 | 61 | 399 | gi\|40014 | pot. ORF 446 (aa 1-446) [Bacillus | 71 | 53 | |
| | | | | | subtilis] | | | |
| 624 | 2 | 608 | 1732 | gi\|40015 | pot. ORF 378 (aa 1-378) [Bacillus | 71 | 51 | |
| | | | | | subtilis] | | | |
| 659 | 1 | 76 | 582 | gi\|1591045 | hypothetical protein (SP:P31466) | 71 | 51 | |
| | | | | | [Methanococcus jannaschii] | | | |
| 668 | 2 | 836 | 1030 | gi\|467330 | replicative DNA helicase [Bacillus | 71 | 60 | |
| | | | | | subtilis] | | | |
| 683 | 1 | 582 | 118 | gnl\|PID\|e264663 | CinA [Streptococcus pneumoniae] | 71 | 55 | |
| 701 | 3 | 411 | 797 | gi\|143795 | transfer RNA-Tyr synthetase [Bacillus | 71 | 51 | |
| | | | | | subtilis] | | | |
| 720 | 1 | 1 | 351 | gi\|1595810 | type-I signal peptidase SpsB | 71 | 55 | |
| | | | | | [Staphylococcus aureus] | | | |
| 724 | 2 | 1020 | 415 | gnl\|PID\|e239621 | ORF YNL218w [Saccharomyces cerevisiae] | 71 | 51 | |
| 790 | 2 | 658 | 383 | gi\|1783253 | homologous to many ATP-binding transport | 71 | 48 | |
| | | | | | proteins; hypothetical [Bacillus subtilis] | | | |
| 799 | 1 | 505 | 906 | gi\|580866 | ipa-12d gene product [Bacillus subtilis] | 71 | 45 | |
| 974 | 2 | 139 | 333 | gi\|1778531 | H10021 homolog [Escherichia coli] | | | |
| 980 | 1 | 156 | 497 | gi\|437389 | transposase [Lactococcus lactis] | | | |
| 4 | 3 | 3170 | 2418 | gi\|1001805 | hypothetical protein [Synechocystis sp.] | 70 | 55 | |
| 17 | 21 | 18642 | 21527 | gi\|145821 | EBG enzyme alpha subunit [Escherichia | 70 | 53 | |
| | | | | | coli] | | | |
| 19 | 8 | 2894 | 3952 | gi\|1353527 | ORF10 [Bacteriophage rlt] | 70 | 58 | |
| 23 | 6 | 2640 | 3230 | gi\|699336 | C. freundli orfW homologue [Mycobacterium | 70 | 43 | |
| | | | | | leprae] sp\|P53523\|Y02Y_MYCLE HYPOTHETICAL | | | |
| | | | | | 20.9 KD PROTEIN U471A. | | | |
| 27 | 3 | 1011 | 493 | gi\|1001644 | regulatory components of sensory | 70 | 44 | |
| | | | | | transduction system [Synechocystis sp.] | | | |
| 31 | 2 | 1095 | 1337 | gi\|1100076 | PTS-dependent enzyme II [Clostridium | 70 | 55 | |
| | | | | | longisporum] | | | |
| 32 | 10 | 6527 | 5817 | gi\|1591789 | M. jannaschii predicted coding region | 70 | 51 | |
| | | | | | MJ1163 [Methanococcus jannaschii] | | | |
| 33 | 7 | 6930 | 7235 | gi\|536972 | ORF_o90a [Escherichia coli] | 70 | 45 | |
| 35 | 2 | 500 | 2533 | gi\|43819 | nagE gene product [Klebsiella pneumoniae] | 70 | 50 | |
| 47 | 13 | 15837 | 14512 | gi\|150209 | ORF 1 [Mycoplasma mycoides] | 70 | 44 | |
| 49 | 15 | 10409 | 11179 | gi\|853751 | N-acetylmuramoyl-L-alanine amidase | 70 | 54 | |
| | | | | | [Bacteriophage A511] | | | |
| 57 | 7 | 8365 | 12189 | gi\|142440 | ATP-dependent nuclease [Bacillus subtilis] | 70 | 48 | |
| 57 | 16 | 18656 | 18033 | gi\|388565 | major cell-binding factor [Campylobacter | 70 | 52 | |
| | | | | | jejuni] | | | |
| 59 | 9 | 4985 | 7060 | gnl\|PID\|e254877 | unknown [Mycobacterium tuberculos] | 70 | 49 | |
| 72 | 6 | 6771 | 4600 | gi\|557567 | ribonucleotide reductase R1 subunit | 70 | 53 | |
| | | | | | [Mycobacterium tuberculosis] | | | |
| | | | | | sp\|P50640\|RIR1_MYCTU RIBONUCLEOSIDE- | | | |
| | | | | | DIPHOSPHATE REDUCTASE ALPHA HAIN (EC | | | |
| | | | | | 1.17.4.1) (RIBONUCLEOTIDE REDUCTASE) (R1 | | | |
| | | | | | SUBUNIT) FRAGMENT). | | | |
| 76 | 8 | 5960 | 6343 | gi\|1063251 | no homologous protein [Bacillus subtilis] | 70 | 52 | |
| 81 | 16 | 12529 | 11723 | gi\|1732200 | PTS permease for rnannose subunit IIPMan | 70 | 52 | |
| | | | | | [Vibrio furnissii] | | | |
| 98 | 7 | 8974 | 7874 | gi\|1573045 | hypothetical [Haemophilus influenzae] | 70 | 46 | |
| 110 | 2 | 1353 | 502 | gi\|1399848 | unknown [Synechococcus PCC7942] | 70 | 52 | |
| 123 | 7 | 5009 | 5527 | gi\|143284 | negative regulator pal 1 [Bacillus | 70 | 51 | |
| | | | | | subtilis] | | | |
| 123 | 22 | 19729 20412 gi\|1591493 | glutamine transport ATP-binding protein Q | 70 48 | | | | |
| | | | | | [Methanococcus jannaschii] | | | |
| 133 | 6 | 5905 | 6498 | gi\|746399 | transcription elongation factor | 70 | 50 | |
| | | | | | [Escherichia coli] | | | |
| 134 | 1 | 1 | 384 | gi\|1146242 | aspartate 1-decarboxylase [Bacillus | 70 | 49 | |
| | | | | | subtilis] | | | |
| 138 | 10 | 8543 | 7953 | gi\|467371 | LACI family of transcriptional repreesor | 70 | 50 | |
| | | | | | (probable) [Bacillus ubtilis] | | | |
| 160 | 3 | 1263 | 1520 | gi\|1468939 | meso-2,3-butanediol dehydrogenase (D- | 70 | 45 | |
| | | | | | acetoin forming) [Klebsiella pneumoniae] | | | |
| 174 | 3 | 2279 | 1572 | gi\|413931 | ipa-7d gene product [Bacillus subtilis] | 70 | 44 | |
| 177 | 2 | 2104 | 1022 | gnl\|PID\|e186242 | D-mannonate hydrolase [Thermotoga | 70 | 52 | |
| | | | | | neapolitana] | | | |
| 178 | 2 | 1320 | 532 | gi\|499659 | K+ channel protein [Panulirus interruptus] | 70 | 51 | |
| 180 | 18 | 17770 | 18729 | gi\|887824 | ORF_o310 [Escherichia coli] | 70 | 50 | |
| 180 | 22 | 21072 | 22526 | gi\|1573294 | hypothetical [Haemophilus influenzae] | 70 | 40 | |
| 181 | 9 | 7409 | 6279 | sp\|P20692\|TYRA_BAC | PREPHENATE DEHYDROGENASE (EC 1.3.1.12) | 70 | 49 | |
| | | | | | SU | (PDH). | | |
| 197 | 5 | 4529 | 6340 | gi\|1783252 | homologous to many ATP-binding transport | 70 | 47 | |
| | | | | | proteins including Swissprot:CYDD_ECOLI; | | | |
| | | | | | hypothetical [Bacillus subtilis] | | | |
| 200 | 21 | 12419 | 11820 | gi\|290943 | HindIII modification methyltransferase | 70 | 47 | |
| | | | | | [Haemophilus influenzae] | | | |
| | | | | | sp\|P43871\|MTH3_HAEIN MODIFICATION | | | |
| | | | | | METHYLASE HINDIII (SC 2.1.1.72) ADENINE- | | | |
| | | | | | SPECIFIC METHYLTRANSFERASE HINDIII) | | | |
| | | | | | (M.HINDIII) | | | |
| 210 | 4 | 3877 | 3269 | gi\|602683 | orfC [Mycoplasma capricolum] | 70 | 47 | |
| 217 | 2 | 405 | 707 | gi\|153767 | ORF [Streptococcus pneumoniae] | 70 | 56 | |
| 222 | 8 | 4940 | 6046 | gi\|537033 | ORF_f356 [Escherichia coli] | 70 | 54 | |
| 222 | 15 | 9825 | 10553 | gi\|537039 | ORF_o228a [Escherichia coli] | 70 | 56 | |
| 227 | 4 | 1871 | 2893 | gi\|1070014 | protein-dependent [Bacillus subtilis] | 70 | 44 | |
| 228 | 2 | 1343 | 792 | gi\|1742730 | Protein AraJ precursor. [Escherichia coli] | 70 | 50 | |
| 228 | 5 | 3470 | 2574 | gi\|1573390 | hypothetical [Haemophilus influenzae] | 70 | 54 | |
| 231 | 2 | 2470 | 1238 | gi\|1574085 | H. influenzae predicted coding region | 70 | 48 | |
| | | | | | HI1048 [Haemophilus influenzae] | | | |
| 235 | 4 | 2779 | 2138 | gi\|309662 | pheromone binding protein [Plasmid pCF10] | 70 | 46 | |
| 239 | 4 | 5807 | 6409 | gi\|682765 | mccB gene product [Escherichia coli] | 70 | 41 | |
| 248 | 1 | 3 | 350 | gi\|143725 | putative [Bacillus subtilis] | 70 | 52 | |
| 254 | 4 | 838 | 497 | gi\|49318 | ORF4 gene product [Bacillus subtilis] | 70 | 48 | |
| 256 | 3 | 1737 | 2612 | gi\|596092 | putative multiple membrane domain protein; | 70 | 51 | |
| | | | | | possible TTG initiation odon at position | | | |
| | | | | | 1064, near putative RBS at position 1052 | | | |
| | | | | | Streptococcus pyogenes] | | | |
| 279 | 15 | 14547 | 14224 | gi\|1389549 | ORF3 [Bacillus subtilis] | 70 | 50 | |
| 283 | 6 | 2279 | 3190 | gi\|853751 | N-acetylmuralmoyl-L-alanine amidase | 70 | 52 | |
| | | | | | [Bacteriophage A511] | | | |
| 292 | 8 | 5557 | 6534 | gi\|474195 | This ORF is homologous to a 40.0 kd 70 | 50 | | |
| | | | | | hypothetical protein in the htrB ′ region | | | |
| | | | | | from E. coli, Accession Number X61000 | | | |
| | | | | | [Mycoplasma-like rganism] | | | |
| 294 | 8 | 2776 | 3375 | gi\|1750126 | YncB [Bacillus subtilis] | 70 | 47 | |
| 294 | 10 | 3742 | 4020 | gi\|984581 | YafQ [Escherichia coli] | 70 | 50 | |
| 299 | 1 | 905 | 132 | gi\|606309 | ORF_o265; gtg start [Escherichia coli] | 70 | 40 | |
| 300 | 3 | 3200 | 2784 | gi\|289260 | comE ORF1 [Bacillus subtilis] | 70 | 50 | |
| 301 | 9 | 8564 | 7590 | gi\|1303865 | YqgR [Bacillus subtilis] | 70 | 52 | |
| 336 | 2 | 661 | 921 | gi\|202864 | [Rat alternatively spliced mRNA.], gene | 70 | 47 | |
| | | | | | product [Rattus norvegicus] | | | |
| 339 | 1 | 269 | 3 | gi\|786163 | Ribosomal Protein L10 [Bacillus subtilis] | 70 | 50 | |
| 351 | 9 | 4760 | 4359 | gi\|799235 | dTDP-6-deoxy-L-lyxo-4-hexulose reductase | 70 | 45 | |
| | | | | | [Escherichia coli] | | | |
| 399 | 28 | 28203 | 28793 | gi\|146278 | glucitol-specfic enzyme II (gutA) | 70 | 52 | |
| | | | | | [Escherichia coli] pir\|A26725\|WQEC2S | | | |
| | | | | | phosphotransferase system enzyme II (EC | | | |
| | | | | | .7.1.69), sorbitol-specific, factor II - | | | |
| | | | | | Escherichia coli sp\|P05705\|PTHB_ECOLI PTS | | | |
| | | | | | SYSTEM, GLUCITOL/SORBITOL-SPECIFIC IIBC | | | |
| | | | | | OMPONENT (EIIBC-GUT) | | | |
| 406 | 1 | 1 | 552 | gi\|49315 | ORF1 gene product [Bacillus subtilis] | 70 | 50 | |
| 436 | 5 | 2417 | 2193 | gi\|773665 | transposase [Lactococcus lactis] | 70 | 36 | |
| 482 | 3 | 1887 | 1660 | gi\|48680 | ptsG-like product [Bacillus subtilis] | 70 | 47 | |
| 529 | 3 | 6587 | 7030 | gi\|1022726 | unknown [Staphylococcus haemolyticus] | 70 | 44 | |
| 535 | 2 | 1702 | 965 | gi\|1747435 | KdpE [Clostridium acetobutylicum] | 70 | 52 | |
| 543 | 2 | 1248 | 547 | gi\|1591045 | hypothetical protein (SP:P31466) | 70 | 47 | |
| | | | | | [Methanococcus jannaschii] | | | |
| 543 | 8 | 4084 | 3878 | gi\|511976 | SERP gene gene product [Plasmodium | 70 | 60 | |
| | | | | | falciparum] | | | |
| 560 | 3 | 1037 | 876 | gi\|558458 | acidic 82 kDa protein [Homo sapiens] | 70 | 40 | |
| 573 | 4 | 1920 | 2258 | gi\|336639 | prephytoene pyrophosphate dehydrogenase | 70 | 32 | |
| | | | | | [Cyanophora paradoxa] gi\|1016130 prenyl | | | |
| | | | | | transferase [Cyanophora paradoxa] | | | |
| | | | | | pir\|A40433\|A40433 prephytoene | | | |
| | | | | | pyrophosphatase dehydrogenase (crtE) | | | |
| | | | | | omolog - Cyanophora paradoxa | | | |
| 599 | 2 | 244 | 573 | gi\|42029 | ORF1 gene product [Escherichia coli] | 70 | 49 | |
| 608 | 3 | 867 | 556 | gi\|475032 | formamidopyrimidine-DNA glycosylase | 70 | 53 | |
| | | | | | [Streptococcus mutans] sp\|P55045\|FPG_STRMU | | | |
| | | | | | FORMAMIDOPYRIMIDINE-DNA GLYCOSYLASE (EC | | | |
| | | | | | .2.2.23) (FAPY-DNA GLYCOSYLASE). | | | |
| 636 | 1 | 2 | 628 | gi\|606309 | ORF_o265; gtg start [Escherichia coli] | 70 | 50 | |
| 670 | 2 | 2157 | 1828 | gi\|1657698 | hyaluronan receptor [Homo sapiens] | 70 | 41 | |
| 702 | 1 | 103 | 870 | gi\|149490 | sucrose-6-phosphate hydrolase [Lactococcus | 70 | 51 | |
| | | | | | lactis] pir\|JH0754\|JH0754 sucrose-6- | | | |
| | | | | | phosphate hydrolase (EC 3.2.1.-) - | | | |
| | | | | | actococcus lactis | | | |
| 726 | 2 | 725 | 480 | gnl\|PID\|e240103 | unknown ORF [Saccharomnyces cerevisiae] | 70 | 41 | |
| 854 | 1 | 1 | 207 | gi\|532653 | thermonuclease [Staphylococcus hyicus] | 70 | 51 | |
| 901 | 1 | 238 | 447 | gi\|172022 | myosin 1 isoform (MYO2) [Saccharomyces | 70 | 20 | |
| | | | | | cerevisiae] | | | |
| 940 | 1 | 1 | 318 | gi\|1039479 | ORFU [Lactococcus lactis] | 70 | 56 | |
| 1 | 2 | 2112 | 1213 | gi\|413976 | ipa-52r gene product [Bacillus subtilis] | 69 | 51 | |
| 8 | 2 | 2196 | 778 | gi\|1510108 | ORF-1 [Agrobacterium tumefaciens] | 69 | 50 | |
| 8 | 9 | 7949 | 6654 | gi\|1196907 | daunorubicin resistance protein | 69 | 44 | |
| | | | | | [Streptomyces peucetius] | | | |
| 16 | 3 | 1618 | 2574 | gi\|1109684 | ProV [Bacillus subtilis] | 69 | 53 | |
| 17 | 26 | 25781 | 26944 | gi\|485275 | 53.6 kDa protein [Streptococus | 69 | 44 | |
| | | | | | pneumoniae] | | | |
| 17 | 35 | 32300 | 32770 | gi\|1574146 | pfs protein (pfs) [Haemophilus influenzae] | 69 | 53 | |
| 23 | 30 | 18107 18538 | gnl\|PID\|e249656 | YneT [Bacillus subtilis] | 69 | 59 | | |
| 25 | 8 | 6653 | 6994 | gi\|413943 | ipa-19d gene product [Bacillus subtilis] | 69 | 46 | |
| 37 | 2 | 2042 | 186 | gi\|143331 | alkaline phosphatase regulatory protein | 69 | 52 | |
| | | | | | [Bacillus subtilis] pir\|A27650\|A27650 | | | |
| | | | | | regulatory protein phoR - Bacillus | | | |
| | | | | | subtilis sp\|P23545\|PHOR_BACSU ALKALINE | | | |
| | | | | | PHOSPHATASE SYNTHESIS SENSOR PROTEIN HOR | | | |
| | | | | | (EC 2.7.3.-). | | | |
| 39 | 2 | 528 | 767 | gi\|1408493 | homologous to SwissProt:YIDA_ECOLI | 69 | 52 | |
| | | | | | hypothetical protein [Bacillus subtilis] | | | |
| 56 | 6 | 4809 | 3457 | gi\|1591610 | probable ATP-dependent helicase | 69 | 45 | |
| | | | | | [Methanococcus jannaschii] | | | |
| 67 | 5 | 3042 | 3938 | gi\|1658188 | oxidative stress transcriptional regulator | 69 | 39 | |
| | | | | | [Erwinia carotovora] | | | |
| 68 | 3 | 684 | 1529 | gnl\|PID\|e214719 | P1cR protein [Bacillus thuringiensis] | 69 | 45 | |
| 72 | 4 | 2099 | 3394 | gi\|882672 | ORF_o313 [Escherichia coli] | 69 | 37 | |
| 81 | 15 | 11820 | 10915 | gi\|1732201 | PTS permease for mannose subunit IIBMan | 69 | 44 | |
| | | | | | [pi Vibria furnissii] | | | |
| 83 | 20 | 14001 | 15800 | gi\|1230668 | Similar to Arginyl-tRNA synthetase (Swiss | 69 | 44 | |
| | | | | | Prot. accession number P11875) | | | |
| | | | | | [Saccharomyces cerevisiae] | | | |
| 85 | 6 | 6309 | 5299 | sp\|P54533\|DLD2_BAC | LIPOAMIDE DEHYDROGENASE COMPONENT (E3) OF | 69 | 46 | |
| | | | | SU | BRANCHED-CHAIN ALPHA-KETO ACID | | | |
| | | | | | DEHYDROGENASE COMPLEX (EC 1.8.1.4) | | | |
| | | | | | (DIHYDROLIPOAMIDE DEHYDROGENASE) (LPD- | | | |
| | | | | | VAL). | | | |
| 86 | 3 | 2084 | 3367 | gi\|143318 | phosphoglycerate kinase [Bacillus | 69 | 53 | |
| | | | | | megaterium] | | | |
| 94 | 2 | 1401 | 751 | gi\|755216 | N-acetylmuramidase [Lactococcus lactis] | 69 | 41 | |
| 94 | 16 | 20498 | 19197 | gi\|1208948 | unknown [Escherichia coli] | 69 | 47 | |
| 98 | 8 | 10201 | 9029 | gi\|563934 | similar to E. coli hypothetical protein: | 69 | 51 | |
| | | | | | PIR Accession Number Q0614] [Bacillus | | | |
| | | | | | subtilis] | | | |
| 109 | 4 | 2350 | 1316 | gi\|396501 | aspartyl-tRNA synthetase [Thermus | 69 | 56 | |
| | | | | | aquaticus thermophilus] pir\|S33743\|533743 | | | |
| | | | | | aspartate--tRNA ligase (EC 6.1.1.12) - | | | |
| | | | | | Thermus quaticus | | | |
| 114 | 1 | 83 | 1522 | gi\|1658402 | formate dehydrogenase beta subunit | 69 | 45 | |
| | | | | | [Moorella thermoacetica] | | | |
| 123 | 9 | 7617 | 8984 | gi\|1773192 | similar to S. cerevisiae dal1 [Escherichia | 69 | 50 | |
| | | | | | coli] | | | |
| 128 | 11 | 7940 | 7578 | gi\|895750 | putative cellobiose phosphotransferase | 69 | 53 | |
| | | | | | enzyme III [Bacillus ubtilis] | | | |
| 130 | 10 | 8764 | 9036 | gi\|1641 | put. Na(+)/glucose co-transporter (AA 1- | 69 | 47 | |
| | | | | | 662) [Oryctolagus cuniculus] \|1717 | | | |
| | | | | | cortical sodium-D-glucose cotransporter | | | |
| | | | | | [Oryctolagus iculus] | | | |
| 138 | 26 | 16721 | 17545 | pir\|A25805\|A25805 | L-lactate dehydrogenase (EC 1.1.1.27) - | 69 | 55 | |
| | | | | | Bacillus subtilis | | | |
| 139 | 2 | 310 | 1083 | gi\|1408587 | relaxase [Lactococcus lactis lactis] | 69 | 46 | |
| 139 | 9 | 5196 | 4984 | gi\|473955 | DNA-binding protein [Lactobacillus sp.] | 69 | 34 | |
| 142 | 9 | 5559 | 4564 | gi\|623073 | ORF360; putative [Bacteriophage LL-H] | 69 | 47 | |
| 155 | 6 | 4658 | 5818 | gi\|1591260 | endoglucanase [Methanococcus jannaschii] | 69 | 48 | |
| 158 | 12 | 11671 | 11201 | gi\|606744 | cytidine deaminase [Bacillus subtilis] | 69 | 52 | |
| 162 | 5 | 5888 | 4032 | gi\|142993 | glycerol-3-phosphate dehydrogenase (glpD) | 69 | 54 | |
| | | | | | (EC 1.1.99.5) [Bacillus ubtilis] | | | |
| 180 | 2 | 1901 | 1203 | gi\|1575577 | DNA-binding response regulator [Thermotoga | 69 | 49 | |
| | | | | | maritima] | | | |
| 197 | 4 | 3571 | 4602 | gi\|1783251 | homologous to cytochrome d ubiquino | 169 | 46 | |
| | | | | | oxidase subunit II; hypothetical [Bacillus | C | | |
| | | | | | subtilis] | | | |
| 197 | 6 | 6283 | 7701 | gi\|1783253 | homologous to many ATP-binding transport. | 69 | 49 | |
| | | | | | proteins; hypothetical [Bacillus subtilis] | | | |
| 222 | 1 | 201 | 10 | gi\|149901 | gene codes for a 19 kDa protein | 69 | 50 | |
| | | | | | [Mycobacterium avium] sp\|P46733\|19KD_MYCAV | | | |
| | | | | | 19 KD LIPOPROTEIN ANTIGEN PRECURSOR. | | | |
| 223 | 28 | 23857 | 24567 | gnl\|PID\|e269548 | Unknown [Bacillus subtilis] | 69 | 53 | |
| 228 | 3 | 2031 | 1285 | gi\|1742730 | Protein AraJ precursor. [Escherichia coli] | 69 | 45 | |
| 229 | 8 | 7390 | 6698 | gi\|1162980 | ribulose-5-phosphate 3-epimer [Spinacia | 69 | 52 | |
| | | | | | oleracea] | | | |
| 238 | 27 | 25243 | 25695 | gi\|305005 | ORF_f104 [Escherichia coli] | 69 | 53 | |
| 253 | 3 | 1067 | 921 | gi\|1591278 | aspartokinase I [Methanococcus jannaschii] | 69 | 39 | |
| 260 | 4 | 2110 | 3105 | gi\|580841 | F1 [Bacillus subtilis] | 69 | 45 | |
| 268 | 3 | 2287 | 1910 | gi\|460026 | repressor protein [Streptococcus | 69 | 48 | |
| | | | | | pneumoniae] | | | |
| 269 | 7 | 4532 | 4083 | gi\|1303792 | YqeK [Bacillus subtilis] | 69 | 50 | |
| 271 | 15 | 11040 | 12236 | gi\|1303805 | YqeR [Bacillus subtilis] | 69 | 48 | |
| 271 | 16 | 12444 | 12809 | gi\|435490 | orf1 gene product [Lactococcus lactis] | 69 | 46 | |
| 281 | 3 | 1277 | 2068 | gi\|1303968 | YgjQ [Bacillus subtilis] | 69 | 50 | |
| 281 | 6 | 5004 | 5534 | gi\|1773151 | adenine phosphoribosyltransferase | 69 | 54 | |
| | | | | | [Escherichia coli] | | | |
| 292 | 24 | 19939 | 18398 | gi\|1652664 | glutamine-binding periplasmic protein | 69 | 45 | |
| | | | | | [Synechocystis sp.] | | | |
| 323 | 3 | 2708 | 4243 | gi\|179401 | beta-D-galactosidase precursor (EC | 69 | 56 | |
| | | | | | 3.2.1.23) [Homo sapiens] gi\|179423 beta- | | | |
| | | | | | galactosidase precursor (EC 3.2.1.23) | | | |
| | | | | | [Homo sapiens] pir\|A32688\|A32611 beta- | | | |
| | | | | | galactosidase (EC 3.2.1.23) precursor - | | | |
| | | | | | uman | | | |
| 330 | 2 | 1388 | 2353 | gi\|1303783 | YgeC [Bacillus subtilis] | 69 | 48 | |
| 332 | 1 | 2 | 223 | gi\|1653594 | hemolysin [Synechocystis sp.] | 69 | 50 | |
| 338 | 9 | 7035 | 7607 | gi\|467442 | stage V sporulation [Bacillus subtilis] | 69 | 55 | |
| 341 | 1 | 1 | 408 | gi\|1477741 | histidine periplasmic binding protein P29 | 69 | 50 | |
| | | | | | [Campylobacter jejuni] | | | |
| 368 | 2 | 972 | 598 | gi\|516826 | rat GCP360 [Rattus rattus] | 69 | 33 | |
| 375 | 4 | 3405 | 2599 | gi\|1215693 | putative orf; GT9_orf434 [Mycoplasma | 69 | 38 | |
| | | | | | pneumoniae] | | | |
| 386 | 1 | 2 | 166 | gi\|1549376 | putative protein [Synechococcus PCC7942] | 69 | 42 | |
| 396 | 4 | 1248 | 1715 | gi\|410132 | ORFX8 [Bacillus subtilis] | 69 | 50 | |
| 398 | 4 | 2763 | 2927 | gi\|466475 | putative phospho-beta-glucosidase | 69 | 55 | |
| | | | | | [Bacillus stearothermophilus] | | | |
| | | | | | pir\|D49898\|D49898 cellobiose | | | |
| | | | | | phosphotransferase system celC - acillus | | | |
| | | | | | stearothermophilus | | | |
| 421 | 5 | 2950 | 3471 | gi\|1574625 | H. influenzae predicted coding region | 69 | 45 | |
| | | | | | H11074 [Haemophilus influenzae] | | | |
| 423 | 4 | 2408 | 2893 | gnl\|PID\|e163522 | rnhB [Haemophilus influenzae] | 69 | 55 | |
| 436 | 3 | 1763 | 1521 | gi\|155032 | ORF B [Plasmid pEa34] | 69 | 37 | |
| 452 | 1 | 3 | 341 | gi\|1591139 | M. jannaschii predicted coding region | 69 | 52 | |
| | | | | | MJ0435 [Methanococcus jannaschii] | 69 | 52 | |
| 470 | 3 | 1816 | 2181 | gi\|437389 | transposase [Lactococcus lactis] | 69 | 56 | |
| 471 | 2 | 2003 | 813 | gi\|854233 | cymF gene product [Klebsiella oxytoca] | 69 | 49 | |
| 478 | 1 | 822 | 4 | gi\|142521 | deoxyribodipyrimidine photolyase [Bacillus | 69 | 63 | |
| | | | | | subtilis] gnl\|PID\|e255102 | | | |
| | | | | | deoxyribodipyrimidine photolyase [Bacillus | | | |
| | | | | | ubtilis] | | | |
| 490 | 4 | 1447 | 1289 | gi\|699379 | glvr-1 protein [Mycobacterium leprae] | 69 | 41 | |
| 518 | 2 | 213 | 605 | pir\|S00076\|RSBS12 | ribosomal protein L12 - Bacillus | 69 | 59 | |
| | | | | | stearotherrnophilus | | | |
| 536 | 4 | 1471 | 1653 | gi\|1146240 | ketopantoate hydroxymethyltransferase | 69 | 53 | |
| | | | | | [Bacillus subtilis] | | | |
| 539 | 5 | 3796 | 5091 | gi\|973231 | gamma-glutamyl phosphate reductase | 69 | 54 | |
| | | | | | [Lycopersicon esculentum] | | | |
| 566 | 1 | 1 | 231 | gi\|45741 | ORFE [Enterococcus faecalis] | 69 | 50 | |
| 579 | 5 | 2729 | 3595 | gi\|145887 | malonyl coenzyme A-acyl carrior protein | 69 | 49 | |
| | | | | | transacylase [Escherichia oli] | | | |
| 583 | 2 | 373 | 912 | gi\|1064791 | function umknown [Bacillus subtilis] | 69 | 55 | |
| 605 | 1 | 254 | 3 | pir\|S39743\|S39743 | hypothetical protein - Bacillus subtilis | 69 | 37 | |
| 630 | 2 | 1659 | 1231 | gi\|153672 | lactose repressor [Streptococcus mutans] | 69 | 47 | |
| 634 | 1 | 36 | 731 | gi\|1022725 | unknown [Staphylococcus haemolyticus] | 69 | 53 | |
| 662 | 1 | 486 | 73 | gi\|467431 | high level kasgamycin resistance [Bacillus | 69 | 55 | |
| | | | | | subtilis] sp\|P37468\|KSGA_BACSU | | | |
| | | | | | DIMETHYLADENOSINE TRANSFERASE (EC 2.1.1.-) | | | |
| | | | | | S-ADENOSYLMETHIONINE-6-N′, N′- | | | |
| | | | | | ADENOSYL(RRNA) DIMETHYLTRANSFERASE) 16S | | | |
| | | | | | RRNA DIMETHYLASE) (HIGH LEVEL KASUGAMYCIN | | | |
| | | | | | RESISTANCE PROTEIN SGA) (K | | | |
| 689 | 1 | 340 | 26 | gi\|1017817 | membrane spanning protein [Streptomyces | 69 | 41 | |
| | | | | | coelicolor] | | | |
| 756 | 2 | 300 | 500 | gi\|520596 | Mre2 protein [Saccharomyces cerevisiae] | 69 | 46 | |
| 792 | 2 | 855 | 460 | gi\|1303823 | YqfG [Bacillus subtilis] | 69 | 55 | |
| 916 | 1 | 4 | 789 | gnl\|PID\|e253114 | ornithine carbamoyltransferase [Pyrococcus | 69 | 57 | |
| | | | | | furiosus] | | | |
| 7 | 3 | 2609 | 3748 | gi\|1303836 | YgfO [Bacillus subtilis] | 68 | 50 | |
| 16 | 5 | 4165 | 4689 | gi\|142450 | ahrC protein [Bacillus subtilis] | 68 | 46 | |
| 17 | 16 | 12826 | 13071 | gi\|222681 | RNA polymerase [Tomato spotted wilt virus] | 68 | 50 | |
| 17 | 32 | 31402 | 31572 | gi\|1303984 | YgkG [Bacillus subtilis] | 68 | 44 | |
| 17 | 33 | 31509 | 32009 | gi\|1303984 | YgkG [Bacillus subtilis] | 68 | 50 | |
| 29 | 1 | 19 | 282 | gi\|1234787 | up-regulated by thyroid hormone in | 68 | 37 | |
| | | | | | tadpoles; expressed specifically in the | | | |
| | | | | | tail and only at metamorphosis; membrane | | | |
| | | | | | bound or extracellular protein; C-terminal | | | |
| | | | | | basic region [Xenopus laevis] | | | |
| 29 | 3 | 1087 | 1950 | gi\|407878 | leucine rich protein [Streptococcus | 68 | 45 | |
| | | | | | equisimilis] | | | |
| 45 | 1 | 204 | 959 | gi\|1039479 | ORFU [Lactococcus lactis] | 68 | 50 | |
| 47 | 7 | 8108 | 7527 | gi\|142853 | homologous to unidentified E. coli protein | 68 | 46 | |
| | | | | | [Bacillus subtilis] gi\|143161 maf | | | |
| | | | | | [Bacillus subtilis] | | | |
| 52 | 6 | 4304 | 5050 | gnl\|PID\|e124050 | alpha-acetolactate decarboxylase | 68 | 53 | |
| | | | | | [Lactococcus lactis] | | | |
| 58 | 5 | 5961 | 4807 | gi\|466365 | potential NAD-reducing hydrogenase subunit | 68 | 49 | |
| | | | | | [Desulfovibrio ructosovorans] | | | |
| 68 | 8 | 4036 | 4743 | gi\|1673727 | (AE000009) Mycoplasma pneumoniae, | 68 | 44 | |
| | | | | | glutamine transport ATP-binding protein; | | | |
| | | | | | similar to Swiss-Prot Accession Number | | | |
| | | | | | P10346, from E. coli [Mycoplasma | | | |
| | | | | | pneumoniae] | | | |
| 72 | 5 | 4441 | 3434 | gi\|1395209 | ribonucleotide reductase R2-2 small | 68 | 52 | |
| subunit [Mycobacterium tuberculosis] | | | | | | | | |
| 80 | 1 | 836 | 3 | gi\|474176 | regulator protein [Staphylococcus xylosus] | 68 | 48 | |
| 81 | 2 | 793 | 1359 | gi\|1064809 | homologous to sp:HTRA_ECOLI [Bacillus | 68 | 48 | |
| | | | | | subtilis] | | | |
| 85 | 9 | 6911 | 6711 | gi\|144893 | butyrate kinase [Clostridium | 68 | 55 | |
| | | | | | acetobutylicum] | | | |
| 89 | 8 | 7184 | 5970 | gi\|1469784 | putative cell division protein ftsW | 68 | 44 | |
| | | | | | [Enterococcus hirae] | | | |
| 91 | 3 | 828 | 1076 | gi\|726480 | L-glutarnine-D-fructose-6-phosphate | 68 | 53 | |
| | | | | | amidotransferase [Bacillus ubtilis] | | | |
| 103 | 1 | 1019 | 3 | gi\|143365 | phosphoribosyl aminoimidazole carboxylase | 68 | 50 | |
| | | | | | II (PUR-K; ttg start odon) [Bacillus | | | |
| | | | | | subtilis] | | | |
| 106 | 2 | 2441 | 1509 | gi\|146860 | delta-2-isopentenyl pyrophosphate | 68 | 47 | |
| | | | | | transferase [Escherichia coli] gi\|537012 | | | |
| | | | | | tRNA delta-2-isopentenylpyrophosphate | | | |
| | | | | | (IPP) transferase Escherichia coli] | | | |
| 112 | 1 | 558 | 100 | gnl\|PID\|e242290 | carbamate kinase [Clostridium perfringens] | 68 | 50 | |
| 116 | 3 | 2383 | 1496 | gi\|755601 | unknown [Bacillus subtilis] | 68 | 42 | |
| 119 | 3 | 2136 | 1201 | gi\|1171125 | thioredoxin reductase [Clostridium | 68 | 49 | |
| | | | | | litorale] | | | |
| 121 | 4 | 3697 | 4650 | gi\|790945 | aryl-alcohol dehydrogenase [Bacillus | 68 | 48 | |
| | | | | | subtilis] | | | |
| 123 | 26 | 24262 | 24801 | gi\|537235 | Kenn Rudd identifies as gpmB [Escherichia | 68 | 51 | |
| | | | | | coli] | | | |
| 123 | 27 | 24887 | 25888 | gi\|143150 | levR [Bacillus subtilis] | 68 | 51 | |
| 126 | 4 | 2773 | 1844 | gi\|551854 | ORF2 [Erwinia herbicola] | 68 | 54 | |
| 131 | 1 | 150 | 1058 | gi\|1387979 | 44% identity over 302 residues with | 68 | 44 | |
| | | | | | hypothetical protein from Synechocystis | | | |
| | | | | | sp, accession D64006_CD; expression | | | |
| | | | | | induced by environmental stress; some | | | |
| | | | | | similarity to glycosyl transferases; two | | | |
| | | | | | potential membrane-spanning helices | | | |
| | | | | | [Bacillus subtil | | | |
| 134 | 3 | 2154 | 1804 | sp\|P39213\|YI91_SHI | INSERTION ELEMENT IS911 HYPOTHETICAL 12.7 | 68 | 43 | |
| | | | | DY | KD PROTEIN. | | | |
| 138 | 19 | 12285 | 12656 | gi\|1438847 | homologue of hypothetical 17.6 kDa protein | 68 | 43 | |
| | | | | | in rplI-cpdB intergenic region of E. coli | | | |
| | | | | | [Bacillus subtilis] | | | |
| 151 | 2 | 2784 | 1654 | gi\|143365 | phosphoribosyl aminoimidazole carboxylase | 68 | 45 | |
| | | | | | II(PUR-K; ttg start odon) [Bacillus | | | |
| | | | | | subtilis] | | | |
| 164 | 23 | 24352 | 24119 | gi\|1573564 | hypothetical [Haemophilus influenzae] | 68 | 40 | |
| 166 | 2 | 970 | 1260 | gi\|151968 | nifS [Rhodobacter sphaeroides] | 68 | 41 | |
| 172 | 2 | 1320 | 2015 | gi\|1208965 | hypothetical 23.3 kd protein [Escherichia | 68 | 46 | |
| | | | | | coli] | | | |
| 175 | 1 | 900 | 451 | gi\|468207 | Submitter comments: A Mg2+ transporting P- | 68 | 47 | |
| | | | | | type ATPase highly omologous with mgtB | | | |
| | | | | | ATPase at 80 min on Salmonella chromosome. | | | |
| | | | | | ediates the influx of Mg2+ only. | | | |
| | | | | | Transcription regulated by xtracellular | | | |
| | | | | | Mg2+ [Salmonella typhimurium] | | | |
| 180 | 14 | 12551 | 14956 | gi\|565641 | FdrA protein [Escherichia coli] | 68 | 49 | |
| 186 | 1 | 3 | 686 | gi\|405804 | transposase [Streptococcus thermophilus] | 68 | 51 | |
| 200 | 1 | 239 | 3 | gi\|468016 | immunoglobulin heavy chain binding protein | 68 | 42 | |
| | | | | | [Giardia intestinalis] | | | |
| 201 | 4 | 4468 | 3686 | gi\|304013 | abcA [Aeromonas salmonicida] | 68 | 50 | |
| 204 | 10 | 6833 | 6468 | gi\|488430 | alcohol dehydrogenase 2 [Entamoeba | 68 | 51 | |
| | | | | | histolytica] | | | |
| 214 | 3 | 3360 | 2491 | gi\|928834 | integrase [Lactococcus lactis phage BK5-T] | 68 | 50 | |
| 229 | 9 | 8277 | 7375 | gi\|1574569 | hypothetical [Haemophilus influenzae] | 68 | 41 | |
| 229 | 14 | 14288 | 13740 | gnl\|P1D\|e290287 | polypeptide deformylase [Bacillus | 68 | 50 | |
| | | | | | subtilis] | | | |
| 230 | 5 | 4593 | 3532 | gi\|143002 | proton glutamate symport protein [Bacillus | 68 | 29 | |
| | | | | | caldotenax] pir\|S26246\|S526246 | | | |
| | | | | | glutamate/aspartate transport protein - | | | |
| | | | | | Bacillus aldotenax | | | |
| 244 | 1 | 1 | 891 | gi\|537080 | ribonucleoside triphosphate reductase | 68 | 54 | |
| | | | | | [Escherichia coli] pir\|A47331\|A47331 | | | |
| | | | | | oxygen-sensitive ribonucleoside- | | | |
| | | | | | triphosphate eductase (EC 1.17.4.-) - | | | |
| | | | | | Escherichia coli | | | |
| 244 | 5 | 4249 | 3551 | gi\|1773172 | hypothetical protein [Escherichia coli] | 68 | 46 | |
| 244 | 7 | 5670 | 5212 | gi\|467423 | unknown [Bacillus subtilis] | 68 | 43 | |
| 264 | 9 | 3925 | 3734 | gi\|914991 | Similar to hemoglobinase [Saccharomyces | 68 | 44 | |
| | | | | | cerevisiae] pir\|S59796\|S59796 hypothetical | | | |
| | | | | | protein D9798.2 - yeast Saccharomyces | | | |
| | | | | | cerevisiae) | | | |
| 271 | 7 | 3484 | 4686 | gi\|1469784 | putative cell division protein ftsW | 68 | 50 | |
| | | | | | [Enterococcus hirae] | | | |
| 271 | 11 | 6817 | 6548 | gi\|413948 | ipa-24d gene product [Bacillus subtilis] | 68 | 50 | |
| 288 | 3 | 1638 | 1333 | gi\|562039 | NADH dehydrogenase, subunit 2 | 68 | 50 | |
| | | | | | [Acanthamoeba castellanii] | | | |
| | | | | | pir\|S53835\|S53835 NADH dehydrogenase chain | | | |
| | | | | | 2 - Acanthamoeba astellanii mitochondrion | | | |
| | | | | | (SGC6) | | | |
| 295 | 6 | 3537 | 4472 | gi\|555668 | glycosylasparaginase precursor | 68 | 41 | |
| | | | | | [Flavobacterium meningosepticum] | | | |
| 296 | 2 | 3143 | 1950 | gi\|1742630 | Bicyclomycin resistance protein | 68 | 34 | |
| | | | | | (Sulfonamide resistance protein) | | | |
| | | | | | [Escherichia coli] | | | |
| 301 | 3 | 3271 | 1760 | gi\|413960 | ipa-36d galT gene product [Bacillus | 68 | 53 | |
| | | | | | subtilis] | | | |
| 315 | 3 | 2230 | 905 | gi\|1653498 | ABC transporter [Synechocystis sp.] | 68 | 47 | |
| 318 | 2 | 1285 | 854 | gi\|43940 | EIII-F Sor PTS [Klebsiella pneumoniae] | 68 | 39 | |
| 320 | 2 | 1178 | 621 | gi\|664842 | sister of P-glycoprotein [Sus scrofa | 68 | 46 | |
| | | | | | domestica] | | | |
| 331 | 2 | 342 | 566 | pir\|B48396\|B48396 | ribosomal protein L33 - Bacillus | 68 | 59 | |
| | | | | | stearothermophilus | | | |
| 336 | 1 | 1 | 663 | gi\|1006591 | cation-transporting ATPase PacL | 68 | 44 | |
| | | | | | [Synechocystis sp.] | | | |
| 338 | 6 | 4004 | 5035 | gi\|155276 | aldehyde dehydrogenase [Vibrio cholerae] | 68 | 51 | |
| 338 | 12 | 10404 | 11165 | gi\|467444 | transcription-repair coupling factor | 68 | 46 | |
| | | | | | [Bacillus subtilis] sp\|P37474\|MF_BACSU | | | |
| | | | | | TRANSCRIPTION-REPAIR COUPLING FACTOR | | | |
| | | | | | (TRCF). | | | |
| 341 | 3 | 743 | 1222 | gi\|1183886 | integral membrane protein [Bacillus | 68 | 45 | |
| | | | | | subtilis] | | | |
| 351 | 6 | 2992 | 2561 | gi\|580881 | ipa-73d gene product [Bacillus subtilis] | 68 | 53 | |
| 363 | 8 | 12517 | 9950 | gi\|1652980 | H(+)-transporting ATPase [Synechocystis | 68 | 46 | |
| | | | | | sp.] | | | |
| 368 | 3 | 1269 | 1736 | gnl\|PID\|e209005 | homologous to ORF2 in nrdEF operons of | 68 | 37 | |
| | | | | | E.coli and S.typhimurium [Lactococcus | | | |
| | | | | | lactis] | | | |
| 386 | 11 | 6564 | 6115 | gi\|765072 | ORF3 [Staphylococcus aureus] | 68 | 46 | |
| 395 | 3 | 935 | 729 | gi\|5521 | ORF 3 (AA 1-90) [Bacteriophaqe phi-105] | 68 | 34 | |
| 399 | 8 | 6073 | 6519 | gi\|153584 | biotin carboxyl carrier protein | 68 | 53 | |
| | | | | | [Streptococcus mutans] | | | |
| | | | | | sp\|P29337\|BCCP_STRMU BIOTIN CARBOXYL | | | |
| | | | | | CARRIER PROTEIN (BCCP). | | | |
| 408 | 3 | 2289 | 1336 | gi\|41572 | GlnP (AA 1-219) [Escherichia coli] | 68 | 40 | |
| 420 | 1 | 559 | 2 | gi\|1592142 | ABC transporter, probable ATP-binding | 68 | 51 | |
| | | | | | subunit [Methanococcus jannaschii] | | | |
| 423 | 2 | 254 | 1294 | gi\|1773109 | similar to S. typhimurium apbA | 68 | 47 | |
| | | | | | [Escherichia coli] | | | |
| 423 | 3 | 1465 | 2421 | gi\|1653032 | hypothetical protein [Synechocystis sp.] | 68 | 40 | |
| 428 | 1 | 859 | 2 | gi\|1652454 | hypothetical protein [Synechocystis sp.] | 68 | 48 | |
| 432 | 7 | 4626 | 3901 | gi\|1573285 | hypothetical [Haemophilus influenzae] | 68 | 55 | |
| 434 | 1 | 90 | 1889 | gi\|1542975 | AbcB [Thermoanaerobacterium | 68 | 50 | |
| | | | | | thermosulfurigenes] | | | |
| 441 | 5 | 4674 | 5156 | gi\|467437 | unknown [Bacillus subtilis] | 68 | 48 | |
| 455 | 4 | 3835 | 4080 | gi\|19815 | luminal binding protein (BiP) [Nicotiana | 68 | 40 | |
| | | | | | tabacum] | | | |
| 530 | 2 | 394 | 546 | gi\|763326 | unknown [Saccharomnyces cerevisiae] | 68 | 42 | |
| 531 | 2 | 810 | 622 | gi\|1146183 | putative [Bacillus subtilis] | 68 | 51 | |
| 537 | 3 | 1353 | 1192 | gi\|929968 | ORFA; similar to B. anthracis WeyAR | 68 | 56 | |
| | | | | | element ORFA; putative ransposase | | | |
| | | | | | [Bacillus anthracis] | | | |
| 539 | 3 | 2725 | 2231 | gi\|1353537 | dUTPase [Bacteriophage rlt] | 68 | 53 | |
| 569 | 1 | 3 | 446 | gi\|146544 | 18 kD protein [Eschenichia coli] | 68 | 47 | |
| 591 | 2 | 656 | 174 | gi\|1039479 | ORFU [Lactococcus lactis] | 68 | 42 | |
| 652 | 2 | 739 | 1032 | gi\|1303715 | YrkP [Bacillus subtilis] | 68 | 50 | |
| 671 | 2 | 436 | 1617 | gi\|413959 | ipa-35d galK gene product [Bacillus | 68 | 50 | |
| | | | | | subtilis] | | | |
| 684 | 1 | 466 | 2 | gnl\|PID\|e248400 | orfRM1 gene product [Bacillus subtilis] | 68 | 40 | |
| 693 | 1 | 2 | 787 | gi\|405804 | transposase [Streptococcus thermophilus] | 68 | 46 | |
| 700 | 2 | 772 | 596 | gi\|153801 | enzyme scr-II [Streptococcus mutans] | 68 | 50 | |
| 735 | 1 | 118 | 609 | gi\|969027 | gamma-aminobutyrate permease [Bacillus | 68 | 40 | |
| | | | | | subtilis] sp\|P46349\|GABP_BACSU GABA | | | |
| | | | | | PERMEASE (4-AMINO BUTYRATE TRANSPORT | | | |
| | | | | | ARRIER) (GAMA-AMINOBUTYRATE PERMEASE). | | | |
| 750 | 1 | 2 | 529 | gi\|893358 | PgsA [Bacillus subtilis] | 68 | 54 | |
| 762 | 2 | 1588 | 950 | gi\|1146240 | ketopantoate hydroxymethyltransferase | 68 | 49 | |
| | | | | | [Bacillus subtilis] | | | |
| 790 | 1 | 407 | 3 | gi\|142224 | attachment protein ChvA (ttg strart codon) | 68 | 55 | |
| | | | | | [Agrobacterium umefaciens] | | | |
| 882 | 1 | 3 | 278 | gi\|57572 | glyceraldehyde-3-phosphate dehydrogenase | 68 | 48 | |
| | | | | | (NADP+) (phosphorylating) attus rattus] | | | |
| 950 | 1 | 140 | 568 | gi\|882736 | ORF_f278 [Escherichia coli] | 68 | 53 | |
| 969 | 2 | 554 | 339 | gi\|1118031 | similar to neural cell adhesion molecules | 68 | 47 | |
| | | | | | and neuroglians in their IG-like C2-type | | | |
| | | | | | domains [Caenorhabditis elegans] | | | |
| 970 | 1 | 297 | 73 | gi\|474404 | cyclophilin [Tolypocladium inflatum] | 68 | 40 | |
| 1 | 1 | 1103 | 3 | gi\|48790 | ORF 3 [Pseudomonas putAda] | 67 | 50 | |
| 29 | 10 | 7156 | 6614 | sp\|P36672\|PTTB_ECO | PTS SYSTEM, TREHALOSE-SPECIFIC IIBC | 67 | 52 | |
| | | | | LI | COMPONENT (EIIBC-TRE) (TREHALOSE- PERMEASE | | | |
| | | | | | IIBC COMPONENT) (PHOSPHOTRANSFERASE ENZYME | | | |
| | | | | | II, BC COMPONENT) (EC 2.7.1.69) (EII-TRE). | | | |
| 48 | 8 | 8035 | 9141 | gi\|975627 | N-acylamino acid racemase [Amycolatopsis | 67 | 48 | |
| | | | | | sp.] | | | |
| 55 | 12 | 6621 | 7439 | gi\|391610 | farnesyl diphosphate synthase [Bacillus | 67 | 47 | |
| | | | | | stearothermophilus] pir\|JX0257\|JX0257 | | | |
| | | | | | geranyltranstransferase (BC 2.5.1.10) - | | | |
| | | | | | Bacillus tearothermophilus | | | |
| 57 | 13 | 13972 | 16401 | gnl\|PID\|e255138 | phenylalanyl-tRNA synthetase beta subunit | 67 | 47 | |
| | | | | | [Bacillus subtilis] | | | |
| 63 | 4 | 1917 | 2729 | gi\|1321629 | MIP related protein of E. coli | 67 | 47 | |
| | | | | | [Escherichia coli] | | | |
| 68 | 12 | 8600 | 8923 | gi\|793910 | surface antigen [Homo sapiens] | 67 | 43 | |
| 72 | 7 | 7138 | 6740 | gnl\|PID\|e209005 | homologous to ORF2 in nrdEF operons of | 67 | 39 | |
| | | | | | E.coli and S.typhimurium [Lactococcus | | | |
| | | | | | lactis] | | | |
| 72 | 10 | 8309 | 9433 | gi\|1199515 | ferrous iron transport protein B | 67 | 41 | |
| | | | | | [Escherichia coli] | | | |
| 85 | 5 | 5315 | 4296 | gi\|142611 | branched chain alpha-keto acid | 67 | 52 | |
| | | | | | dehydrogenase E1-alpha [Bacillus ubtilis] | | | |
| 101 | 5 | 4149 | 3100 | gi\|1109686 | ProX [Bacillus subtilis] | 67 | 48 | |
| 110 | 4 | 2335 | 1292 | gi\|1066343 | mu-crystallin [Homo sapiens] | 67 | 48 | |
| 114 | 12 | 12936 | 13520 | gi\|146218 | serine hydroxymethyltransferase | 67 | 50 | |
| | | | | | [Escherichia coli] | | | |
| 115 | 5 | 3137 | 2010 | gi\|1256150 | YbaR [Bacillus subtilis] | 67 | 47 | |
| 115 | 6 | 3199 | 2792 | gi\|1652593 | hypothetical protein [Synechocystis sp.] | 67 | 45 | |
| 123 | 25 | 22739 | 24208 | gi\|148711 | 6-aminohexanoate-cyclic-dimer hydrolase | 67 | 50 | |
| | | | | | [Flavobacterium sp.] gi\|488343 6- | | | |
| | | | | | aminohexanoate-cyclic-dimer hydrolase | | | |
| | | | | | [Flavobacterium p.] | | | |
| 124 | 6 | 5139 | 4267 | gi\|1016770 | prolipoprotein diacyiglyceryl transferase | 67 | 50 | |
| | | | | | [Staphylococcus aureus] | | | |
| 125 | 2 | 1306 | 221 | gi\|853743 | L-alanoyl-D-glutamate peptidase | 67 | 50 | |
| | | | | | [Bacteriophage A118] | | | |
| 128 | 36 | 29462 | 28737 | gi\|142940 | ftsA [Bacillus subtilis] | 67 | 46 | |
| 138 | 27 | 17602 | 18183 | gi\|1256639 | putative [Bacillus subtilis] | 67 | 50 | |
| 138 | 31 | 21578 | 20097 | gi\|143245 | Na+/H+ antiporter [Bacillus firmus] | 67 | 42 | |
| 138 | 33 | 25165 | 23249 | gi\|1498811 | M. jannaschii predicted coding region | 67 | 45 | |
| | | | | | MJ0050 [Methanococcus jannaschii] | | | |
| 138 | 36 | 28690 | 27362 | gnl\|PID\|e269549 | Unknown [Bacillus subtilis] | 67 | 47 | |
| 144 | 4 | 3271 | 3717 | gi\|1753229 | PKCI [Borrelia burgdorferi] | 67 | 52 | |
| 145 | 3 | 1435 | 2511 | gi\|1573615 | ATP-binding protein (abc) [Haemophilus | 67 | 47 | |
| | | | | | influenzae] | | | |
| 146 | 5 | 4657 | 2804 | gi\|1045034 | beta-galactosidase [Xanthomonas campestris | 67 | 51 | |
| | | | | | pv. manihotis] | | | |
| 149 | 3 | 1978 | 1367 | gi\|806536 | membrane protein [Bacillus | 67 | 51 | |
| | | | | | acidopullulyticus] | | | |
| 156 | 1 | 3 | 365 | gnl\|PID\|e265539 | ClpB-homologue [Thermus aquaticus | 67 | 42 | |
| | | | | | thermophilus] | | | |
| 158 | 15 | 14863 | 13766 gi\|1573487 | rbs repressor (rbsR) [Haemophilus | 67 | 40 | | |
| | | | | | influenzae] | | | |
| 158 | 17 16483 | 15959 | gi\|677850 | hypothetical protein [Staphylococcus | 67 | 51 | | |
| | | | | | aureus] | | | |
| 159 | 7 | 6872 | 6006 | gi\|1303949 | YqiX [Bacillus subtilis] | 67 | 41 | |
| 159 | 9 | 8103 | 7498 | gi\|1303950 | YqiY [Bacillus subtilis] | 67 | 41 | |
| 165 | 11 | 9846 | 9004 | gi\|606079 | ORF_o267 [Escherichia coli] | 67 | 36 | |
| 169 | 2 | 2151 | 3047 | gi\|42371 | pyruvate formate-lyase activating enzyme | 67 | 44 | |
| | | | | | (AA 1-246) [Escherichia li] | | | |
| 179 | 13 | 13648 | 14451 | gnl\|PID\|e257631 | methyltransferase [Lactococcus lactis] | 67 | 45 | |
| 180 | 28 | 28656 | 29801 | gi\|666005 | hypothetical protein [Bacillus subtilis] | 67 | 48 | |
| 194 | 6 | 2774 | 4231 | gi\|143245 | Na+/H+ antiporter [Bacillus firmus] | 67 | 41 | |
| 194 | 10 | 6472 | 8259 | gi\|622991 | mannitol transport protein [Bacillus | 67 | 50 | |
| | | | | | stearothermophilus] sp\|P50852\|PTMB_BACST | | | |
| | | | | | PTS SYSTEM, MANNITOL-SPECIFIC IIBC | | | |
| | | | | | COMPONENT EIIBC-MTL) (MANNITOL- PERMEASE | | | |
| | | | | | IIBC COMPONENT) (PHOSPHOTRANSFERASE NZYME | | | |
| | | | | | II, BC COMPONENT) (EC 2.7.1.69) (EII-MTL). | | | |
| 204 | 5 | 1924 | 3006 | gi\|1235684 | mevalonate pyrophosphate decarboxylase | 67 | 50 | |
| | | | | | [Saccharomyces cerevisiae] | | | |
| 214 | 1 | 42 | 1196 | gi\|606013 | CG Site No. 829 [Escherichia coli] | 67 | 36 | |
| 219 | 2 | 524 | 850 | gnl\|PID\|e257628 | ORF [Lactococcus lactis] | 67 | 42 | |
| 223 | 15 | 13640 | 14407 | gi\|496520 | orf iota [Streptococcus pyogenes] | 67 | 54 | |
| 227 | 3 | 1011 | 1892 | gi\|1070013 | protein-dependent [Bacillus subtilis] | 67 | 37 | |
| 233 | 12 | 9340 | 8339 | gi\|507880 | xanthine dehydrogenase [Gallus gallus] | 67 | 50 | |
| 238 | 10 | 7951 | 9183 | gi\|1653948 | hypothetical protein [Synechocystis sp.] | 67 | 45 | |
| 246 | 3 | 783 | 1430 | gnl\|PID\|e233869 | hypothetical protein [Bacillus subtilis] | 67 | 47 | |
| 256 | 2 | 570 | 1601 | gi\|709992 | hypothetical protein [Bacillus subtilisl | 67 | 36 | |
| 266 | 2 | 1266 | 835 | gi\|963038 | ArpU [Enterococcus hirae] | 67 | 42 | |
| 285 | 1 | 3 | 809 | gi\|40014 | pot. ORF 446 (aa 1-446) [Bacillus | 67 | 53 | |
| | | | | | subtilis] | | | |
| 288 | 10 | 6838 | 5801 | gi\|1651806 | hypothetical protein [Synechocystis sp.] | 67 | 45 | |
| 301 | 10 | 8822 | 8562 | gi\|1303864 | YqgQ [Bacillus subtilis] | 67 | 43 | |
| 312 | 5 | 2377 | 2595 | gi\|709991 | hypothetical protein [Bacillus subtilis] | 67 | 52 | |
| 353 | 1 | 3 | 1472 | gi\|151259 | HMG-CoA reductase (EC 1.1.1.88) | 67 | 48 | |
| | | | | | [Pseudomonas mevalonii] pir\|A44756\|A44756 | | | |
| | | | | | hydroxymethylglutaryl-CoA reductase (EC | | | |
| | | | | | 1.1.1.88) Pseudomonas sp. | | | |
| 359 | 2 | 984 | 439 | gi\|1773190 | similar to E. coli yhaE [Escherichia coli] | 67 | 45 | |
| 359 | 3 | 2244 | 982 | gi\|1001478 | hypothetical protein [Synechocystis sp.] | 67 | 30 | |
| 364 | 8 | 8469 | 7816 | gi\|496943 | ORF [Saccharomyces cerevisiae] | 67 | 50 | |
| 386 | 12 | 6625 | 7833 | gnl\|PID\|e254644 | membrane protein [Streptococcus | 67 | 36 | |
| | | | | | pneumoniae] | | | |
| 394 | 2 | 497 | 2635 | gnl\|PID\|e25593 | hypothetical protein [Bacillus subtilis] | 67 | 45 | |
| 399 | 6 | 5410 | 3971 | gi\|665994 | hypothetical protein [Bacillus subtilis] | 67 | 45 | |
| 414 | 1 | 1 | 1227 | gi\|1621027 | high affinity potassium transporter | 67 | 40 | |
| | | | | | [Debaryomyces occidentalis] | | | |
| 453 | 2 | 618 | 391 | gi\|537189 | ORF_f132 [Escherichia coli] | 67 | 45 | |
| 458 | 1 | 825 | 226 | gnl\|PID\|e189917 | ORF 28.5 [Escherichia coli] | 67 | 45 | |
| 460 | 2 | 644 | 1387 | gi\|1502421 | 3-ketoacyl-acyl carrier protein reductase | 67 | 48 | |
| | | | | | [Bacillus subtilis] | | | |
| 460 | 4 | 2622 | 3131 | gi\|1399830 | biotin carboxyl carrier protein | 67 | 53 | |
| | | | | | [Synechococcus PCC7942] | | | |
| 474 | 1 | 1456 | 77 | gi\|495277 | histidine kinase [Streptococcus | 67 | 54 | |
| | | | | | pneumoniae] | | | |
| 488 | 6 | 3892 | 3032 | gi\|437389 | transposase [Lactococcus lactis] | 67 | 47 | |
| 490 | 1 | 460 | 2 | gi\|1742830 | ORF_ID:o326#2; similar to [SwissProt | 67 | 43 | |
| | | | | | Accession Number P37794] [Eseherichia | | | |
| | | | | | coli] | | | |
| 582 | 1 | 2 | 787 | gi\|1408485 | yxdM gene product [Bacillus subtilis] | 67 | 38 | |
| 629 | 2 | 1280 | 915 | gi\|1006620 | ABC transporter [Synechocystis sp.] | 67 | 50 | |
| 633 | 2 | 941 | 390 | gnl\|PID\|e221400 | tex gene product [Bordetella pertussis] | 67 | 54 | |
| 655 | 1 | 47 | 313 | gi\|147403 | mannose permease subunit Il-P-Man | 67 | 48 | |
| | | | | | [Escherichia coli] | | | |
| 671 | 3 | 1630 | 2415 | sp\|P13226\|GALE_STR | UDP-GLUCOSE 4-EPIMERASE (EC 5.1.3.2) | 67 | 52 | |
| | | | | LI | (GALACTOWALDENASE). | | | |
| 682 | 2 | 1428 | 595 | gi\|147404 | mannose permease subunit II-M-Man | 67 | 42 | |
| | | | | | [Escherichia coli] | | | |
| 704 | 3 | 977 | 411 | gi\|467428 | unknown [Bacillus subtilis] | 67 | 45 | |
| 711 | 1 | 590 | 168 | gi\|471236 | orf3 [Haemophilus influenzae] | 67 | 37 | |
| 784 | 1 | 253 | 2 | gnl\|PID\|e236287 | site-specific DNA-methyltransferase | 67 | 44 | |
| | | | | | [Bacillus_stearothermophilus] | | | |
| 907 | 1 | 209 | 3 | gi\|5119 | topoisomerase I [Schizosaccharomyces | 67 | 42 | |
| | | | | | pombe] | | | |
| 908 | 1 | 275 | 96 | gi\|1591045 | hypothetical protein (SP:P31466) | 67 | 46 | |
| | | | | | [Methanococcus jannaschii] | | | |
| 960 | 1 | 499 | 98 | gi\|405804 | transposase [Streptococcus thermophilus] | 67 | 50 | |
| 963 | 1 | 259 | 2 | pir\|S34632\|S34632 | dnaJ protein homolog - human | 67 | 54 | |
| 964 | 1 | 164 | 628 | bbs\|173803 | CD4+ T cell-stimulating antigen [Listeria | 67 | 49 | |
| | | | | | monocytogenes, 85E0-1167, Peptide Partial, | | | |
| | | | | | 268 aa] [Listeria monocytogenes] | | | |
| 5 | 4 | 1438 | 2403 | gi\|1303810 | YgeT [Bacillus subtilis] | 66 | 50 | |
| 7 | 1 | 24 | 1727 | gi\|145220 | alanyl-tRNA synthetase [Escherichia coli] | 66 | 50 | |
| 7 | 2 | 1858 | 2646 | gi\|687599 | orfA1; transposon insertion into orfA1 | 66 | 58 | |
| | | | | | impairs growth and virulence f L. | | | |
| | | | | | monocytogenes [Listeria monocytogenes] | | | |
| 8 | 1 | 3 | 707 | gi\|1303830 | YgfL [Bacillus subtilis] | 66 | 45 | |
| 9 | 1 | 182 | 1051 | gi\|467399 | IMP dehydrogenase [Bacillus subtilis] | 66 | 51 | |
| 17 | 11 | 8383 | 8598 | gi\|457336 | Pv200 [Plasmodium vivax] | 66 | 42 | |
| 18 | 14 | 5903 | 6136 | gi\|294706 | trfA [Plasmid RK2] | 66 | 50 | |
| 23 | 12 | 5951 | 6895 | gi\|1652472 | ethylene response sensor protein | 66 | 51 | |
| | | | | | [Synechocystis sp.] | | | |
| 23 | 17 | 11198 | 11881 | gi\|466517 | pduB [Salmonella typhimurium] | 66 | 44 | |
| 23 | 19 | 12395 | 13501 | gi\|145206 | pduB [Salmonella typhimurium] | 66 | 47 | |
| 34 | 5 | 5987 | 6232 | gi\|397360 | yNucR endo-exonuclease [Saccharomyces | 66 | 46 | |
| | | | | | cerevisiae] | | | |
| 43 | 2 | 782 | 1018 | gi\|513417 | non-structural polyprotein of pSP6-SFV4 | 66 | 46 | |
| | | | | | [unidentified] | | | |
| 43 | 5 | 3757 | 2324 | gnl\|PID\|e154145 | penicillin binding protein 4 | 66 | 44 | |
| | | | | | [Staphylococcus_aureus] | | | |
| 56 | 4 | 2351 | 1662 | gi\|49272 | Asparaginase [Bacillus licheniformis] | 66 | 44 | |
| 57 | 2 | 950 | 1735 | gi\|1657505 | hypothetical protein [Escherichia coli] | 66 | 46 | |
| 57 | 4 | 3117 | 3932 | gi\|1657507 | hypothetical protein [Escherichia coli] | 66 | 41 | |
| 57 | 8 | 12269 | 12646 | gi\|1622733 | orf108; unknown function [Butyrivibrio | 66 | 44 | |
| | | | | | fibrisolvens] | | | |
| 62 | 2 | 547 | 1302 | gi\|413967 | ipa-43d gene product [Bacillus subtilis] | 66 | 50 | |
| 62 | 5 | 2633 | 1905 | gi\|475110 | fructokinase [Pediococcus pentosace] | 66 | 51 | |
| 74 | 7 | 4661 | 4086 | gi\|467484 | unknown [Bacillus subtilis] | 66 | 47 | |
| 81 | 18 | 13878 | 13717 | gi\|146724 | enzyme III-Man function protein (manX | 66 | 35 | |
| | | | | | (ptsL)) [Escherichia coli] gi\|41976 manX | | | |
| | | | | | gene product (AA 1-315) [Escherichia coli] | | | |
| 94 | 17 | 20780 | 21253 | gi\|142955 | glucose dehydrogenase (EC 1.1.1.47) | 66 | 47 | |
| | | | | | [Bacillus subtilis] pir\|S36090\|S36090 | | | |
| | | | | | glucose 1-dehydrogenase (EC 1.1.1.47) - | | | |
| | | | | | Bacillus ubtilis | | | |
| 98 | 15 | 15165 | 14338 | gi\|147327 | transport protein [Escherichia coli] | 66 | 34 | |
| 105 | 3 | 1726 | 3183 | gnl\|PID\|e205173 | orf1 gene product [Lactobacillus | 66 | 45 | |
| | | | | | helveticus] | | | |
| 110 | 17 | 15811 | 14804 | gi\|887824 | ORF_o310 [Escherichia coli] | 66 | 52 | |
| 112 | 2 | 712 | 443 | gnl\|PID\|e242290 | carbainate kinase [Clostridium perfringens] | 66 | 51 | |
| 123 | 1 | 1 | 540 | gi\|1573538 | H. influenzae predicted coding region | 66 | 39 | |
| | | | | | H10552 [Haemophilus influenzae] | | | |
| 123 | 33 | 30312 | 31460 | gi\|1498930 | M. jannaschii predicted coding region | 66 | 48 | |
| | | | | | MJ0158 [Methanococcus jannaschii] | | | |
| 125 | 8 | 4914 | 4474 | gi\|1736749 | Exopolysaccharide production protein PSS. | 66 | 54 | |
| | | | | | [Escherichia_coli] | | | |
| 128 | 25 | 18201 | 18878 | gnl\|PID\|e255543 | putative iron dependant repressor | 66 | 48 | |
| | | | | | [Staphylococcus epidermidis] | | | |
| 131 | 3 | 2311 | 3213 | gi\|38969 | lacF gene product [Agrobacterium | 66 | 37 | |
| | | | | | radiobacter] | | | |
| 131 | 5 | 3588 | 3394 | gi\|1303823 | YqfG [Bacillus subtilis] | 66 | 29 | |
| 135 | 1 | 1214 | 45 | gi\|1498930 | M. jannaschii predicted coding region | 66 | 48 | |
| | | | | | MJ0158 [Methanococcus jannaschii] | | | |
| 135 | 10 | 7764 | 7405 | gi\|530825 | OVT1 [Onchocerca volvulus] | 66 | 47 | |
| 144 | 13 | 12859 | 10739 | pir\|A40614\|A40614 | penicillin-binding protein pbpF - Bacillus | 66 | 47 | |
| | | | | | subtilis | | | |
| 145 | 5 | 3224 | 4063 | gi\|349531 | lipoprotein [Pasteurella haemolytica] | 66 | 45 | |
| 146 | 2 | 1497 | 619 | gi\|147404 | mannose permease subunit II-M-Man | 66 | 38 | |
| | | | | | [Escherichia coli] | | | |
| 149 | 2 | 1097 | 1282 | gi\|1762962 | FemA [Staphylococcus simulans] | 66 | 38 | |
| 150 | 3 | 1443 | 2417 | gnl\|PID\|e185374 | ceuE gene product [Campylobacter coli] | 66 | 46 | |
| 150 | 8 | 6487 | 6903 | gi\|1377842 | unknown [Bacillus subtilis] | 66 | 43 | |
| 164 | 20 | 21846 | 22646 | gi\|1279769 | FdhC [Methanobacterium thermoformicicum] | 66 | 57 | |
| 164 | 25 | 24555 | 25688 | pir\|A43577\|A43577 | regulatory protein pfoR - Clostridium | 66 | 47 | |
| | | | | | perfringens | | | |
| 178 | 1 | 383 | 3 | gi\|763052 | integrase [Bacteriophage T270] | 66 | 47 | |
| 195 | 19 | 8698 | 8516 | bbs\|169008 | homeobox gene [Drosophila sp.] | 66 | 55 | |
| 207 | 1 | 166 | 1554 | gi\|619724 | MgtE [Bacillus firmus] | 66 | 39 | |
| 207 | 3 | 2312 | 2010 | gi\|1204258 | soluble protein [Escherichia coli] | 66 | 44 | |
| 211 | 3 | 1523 | 1729 | gi\|289932 | MHC class II beta chain [Cyphotilapia | 66 | 66 | |
| | | | | | frontosa] | | | |
| 213 | 3 | 1811 | 2308 | gi\|153045 | prolipoprotein signal peptidase | 66 | 40 | |
| | | | | | [Staphylococcus aureus] pir\|S20433\|S20433 | | | |
| | | | | | lsp protein - Staphylococcus aureus | | | |
| | | | | | sp\|P31024\|LSPA_STAAU LIPOPROTEIN SIGNAL | | | |
| | | | | | PEPTIDASE (EC 3.4.23.36) PROLIPOPROTEIN | | | |
| | | | | | SIGNAL PEPTIDASE) (SIGNAL PEPTIDASE II) | | | |
| | | | | | (SPASE II). | | | |
| 221 | 7 | 2524 | 3468 | gi\|1353527 | ORF10 [Bacteriophage rlt] | 66 | 44 | |
| 222 | 13 | 8272 | 8988 | gi\|466719 | No definition line found [Eschenichia | 66 | 48 | |
| | | | | | coli] | | | |
| 223 | 18 | 15210 | 15971 | gi\|496520 | orf iota [Streptococcus pyogenes] | 66 | 57 | |
| 232 | 5 | 3494 | 2715 | gi\|142706 | comG1 gene product [Bacillus subtilis] | 66 | 41 | |
| 235 | 3 | 1774 | 734 | gi\|580897 | OppB gene product [Bacillus subtilis] | 66 | 47 | |
| 244 | 2 | 906 | 1520 | gi\|15354 | ORF 55.9 [Bacteriophage T4] | 66 | 46 | |
| 259 | 3 | 2355 | 1867 | gi\|56312 | Gephyrin [Rattus norvegicus] | 66 | 55 | |
| 271 | 1 | 1 | 675 | gi\|1574748 | tRNA pseudouridine 55 synthase (truB) | 66 | 53 | |
| | | | | | [Haemophilus influenzae] | | | |
| 277 | 1 | 1 | 927 | gi\|1303799 | YqeN [Bacillus subtilis] | 66 | 45 | |
| 291 | 5 | 4587 | 3547 | gnl\|PID\|e257609 | sugar-binding transport protein | 66 | 46 | |
| | | | | | [Anaerocellum thermophilum] | | | |
| 292 | 25 | 20451 | 19912 | gi\|1649035 | high-affinity periplasmic glutamine | 66 | 50 | |
| | | | | | binding protein [Salmonella typhimurium] | | | |
| 300 | 1 | 2302 | 77 | gi\|289262 | comE ORF3 [Bacillus subtilis] | 66 | 46 | |
| 301 | 4 | 4290 | 3265 | sp\|P13226\|GALE_STR | UDP-GLUCOSE 4-EPIMERASE (EC 5.1.3.2) | 66 | 51 | |
| | | | | LI | (GALACTOWALDENASE). | | | |
| 301 | 5 | 4516 | 4689 | gnl\|PID\|e212164 | PSII, protein N [Odontella sinensis] | 66 | 58 | |
| 314 | 1 | 360 | 4 | gi\|467452 | unknown [Bacillus subtilis] | 66 | 43 | |
| 15 | 4 | 2559 | 2209 | gi\|1653498 | ABC transporter [Synechocystis sp.] | 66 | 44 | |
| 320 | 3 | 2406 | 1081 | gnl\|PID\|e250352 | unknown [Mycobacterium tuberculosis] | 66 | 35 | |
| 332 | 2 | 157 | 921 | gi\|1303875 | YghB [Bacillus subtilis] | 66 | 44 | |
| 334 | 2 | 1001 | 3076 | gi\|1651660 | DNA ligase [Synechocystis sp.] | 66 | 48 | |
| 338 | 1 | 2 | 616 | gi\|845686 | ORF-27 [Staphylococcus aureus] | 66 | 54 | |
| 338 | 7 | 5011 | 5496 | gi\|912476 | No definition line found [Escherichia | 66 | 48 | |
| | | | | | coli] | | | |
| 341 | 5 | 1935 | 3107 | gi\|142538 | aspartate aminotransferase [Bacillus sp.] | 66 | 44 | |
| 343 | 3 | 2548 | 2045 | gnl\|PID\|e289147 | similar to single strand binding protein | 66 | 44 | |
| | | | | | [Bacillus subtilis] | | | |
| 345 | 20 | 22093 | 22461 | gi\|1657795 | dihydroneopterin aldolase | 66 | 45 | |
| | | | | | [Methylobacterium extorquens] | | | |
| 353 | 3 | 2621 | 2379 | gnl\|PID\|e257628 | ORF [Lactococcus lactis] | 66 | 52 | |
| 365 | 4 | 5117 | 4779 | gi\|1742868 | Mutator MutT protein (7,8-dihydro-8- | 66 | 54 | |
| | | | | | oxoguanine-triphosphatase) (8-oxo-dgtpase) | | | |
| | | | | | (EC 3.6.1.-) (DGTP pyrophosphohydrolase). | | | |
| | | | | | [Escherichia coli] | | | |
| 376 | 1 | 3 | 1076 | gi\|1778517 | glycerol dehydrogenase homolog | 66 | 45 | |
| | | | | | [Escherichia coli] | | | |
| 394 | 7 | 5980 | 5648 | gi\|486358 | ORF YKL202w [Saccharomyces cerevisiae] | 66 | 38 | |
| 421 | 4 | 1469 | 2539 | gi\|606375 | ORF_f345 [Escherichia coli] | 66 | 48 | |
| 475 | 6 | 3978 | 3763 | gi\|532547 | ORF14 [Enterococcus faecalis] | 66 | 48 | |
| 491 | 8 | 7710 | 7081 | gi\|1000453 | TreR [Bacillus subtilis] | 66 | 49 | |
| 526 | 1 | 392 | 3 | gi\|1750125 | xylulose kinase [Bacillus subtilis] | 66 | 49 | |
| 552 | 6 | 6147 | 5917 | gi\|1432152 | PTS antiterminator [Klebsiella oxytoca] | 66 | 37 | |
| 571 | 2 | 560 | 1153 | gi\|1773132 | multidrug resistance-like ATP-binding | 66 | 38 | |
| | | | | | protein Mdl [Esoherichia coli] | | | |
| 575 | 3 | 1075 | 539 | gi\|1651722 | guanylate kinase [Synechocystis sp.] | 66 | 48 | |
| 608 | 2 | 631 | 113 | gi\|1213334 | OrfX; hypothetical 22.5 KD protein | 66 | 41 | |
| | | | | | downstream of type IV prepilin leader | | | |
| | | | | | peptidase gene; Method: conceptual | | | |
| | | | | | translation supplied by author [Vibrio | | | |
| | | | | | vulnificus] | | | |
| 640 | 1 | 877 | 2 | sp\|P50487\|YCPX_CLO | HYPOTHETICAL PROTEIN IN CPE 5′REGION | 66 | 36 | |
| | | | | PE | (FRAGMENT) | | | |
| 734 | 1 | 2 | 343 | gi\|1653602 | hypothetical protein [Synechocystis sp.] | 66 | 43 | |
| 802 | 1 | 2 | 292 | gnl\|PID\|e280516 | voltage-gated sodium channel [Mus | 66 | 58 | |
| | | | | | musculus] | | | |
| 812 | 2 | 343 | 531 | gi\|511075 | ORF2 [Streptococcus agalactiae] | 66 | 51 | |
| 823 | 1 | 1 | 393 | gi\|1303843 | YqfV [Bacillus subtilis] | 66 | 42 | |
| 891 | 1 | 82 | 402 | gi\|567769 | ORF5; predicted protein shows similarity | 66 | 52 | |
| | | | | | to ATP-binding transport roteins AmiE and | | | |
| | | | | | AmiF of Streptococcus pneumoniae; | | | |
| | | | | | disruptulon of RF5 leads to aminopterin | | | |
| | | | | | resistance [Streptococcus parasanguis] | 66 | 52 | |
| 5 | 6 | 2630 | 3154 | gi\|1303811 | YqeU [Bacillus subtilis] | 65 | 50 | |
| 16 | 1 | 2 | 628 | gi\|1742303 | Acyl carrier protein phosphodiesterase | 65 | 43 | |
| | | | | | (ACP phosphodiesterase) (fragment), | | | |
| | | | | | [Escherichia coli] | | | |
| 18 | 6 | 3360 | 2518 | gi\|601880 | rep protein [Bacillus borstelensis] | 65 | 40 | |
| 21 | 11 | 7933 | 7706 | gi\|1500521 | M. jannaschii predicted coding region | 65 | 32 | |
| | | | | | MJ1623 [Methanococcus jannaschii] | | | |
| 23 | 20 | 13459 | 13881 | gi\|488430 | alcohol dehydrogenase 2 [Entamoeba | 65 | 43 | |
| | | | | | histolytica] | | | |
| 23 | 25 | 15987 | 16178 | gnl\|PID\|e248966 | F32D8.5 [Caenorhabditis elegans] | 65 | 50 | |
| 27 | 2 | 526 | 302 | gi\|1001644 | regulatory components of sensory | 65 | 44 | |
| | | | | | transduction system [Synechocystis sp.] | | | |
| 29 | 9 | 6770 | 5727 | sp\|P36672\|PTTB_ECO | PTS SYSTEM, TREHALOSE-SPECIFIC IIBC | 65 | 45 | |
| | | | | LI | COMPONENT (EIIBC-TRE) (TREHALOSE- PERMEASE | | | |
| | | | | | IIBC COMPONENT) (PHOSPHOTRANSFERASE ENZYME | | | |
| | | | | | II, BC COMPONENT) (BC 2.7.1.69) (EII-TRE). | | | |
| 31 | 5 | 4611 | 5207 | gi\|171625 | guanylate kinase [Saccharomyces | 65 | 39 | |
| | | | | | cerevisiae] | | | |
| 32 | 7 | 4085 | 3915 | gi\|150158 | 29 kD protein [Mycoplasma genitalium] | 65 | 51 | |
| 33 | 8 | 7396 | 7638 | gi\|1573421 | protein translocation protein, low | 65 | 26 | |
| | | | | | temperature (secG) [Haemophilus | | | |
| | | | | | influenzae] | | | |
| 35 | 1 | 2 | 499 | gi\|1737500 | transcription antiterminator [Bacillus | 65 | 40 | |
| | | | | | stearothermophilus] | | | |
| 45 | 6 | 2537 | 3037 | gi\|511455 | unknown [Coxiella burnetii] | 65 | 37 | |
| 46 | 3 | 1028 | 2254 | gi\|1001642 | dGTP triphosphohydrolase [Synechocystis | 65 | 43 | |
| | | | | | sp.] | | | |
| 47 | 12 | 14524 | 14264 | gi\|150209 | ORF 1 [Mycoplasma mycoides] | 65 | 34 | |
| 50 | 3 | 2866 | 2051 | gi\|1303830 | YgfL [Bacillus subtilis] | 65 | 40 | |
| 57 | 11 | 12955 | 13332 | gnl\|PID\|e254999 | phenylalany-tRNA synthetase beta subunit | 65 | 51 | |
| | | | | | [Bacillus subtilis] | | | |
| 62 | 1 | 2 | 484 | gi\|1573470 | H. influenzae predicted coding region | 65 | 57 | |
| | | | | | H10491 [Haemophilus influenzae] | | | |
| 68 | 1 | 49 | 282 | gi\|1573250 | aspartate aminotransferase (aspC) | 65 | 52 | |
| | | | | | [Haemophilus influenzae] | | | |
| 72 | 2 | 567 | 1325 | gi\|466645 | alternate name yhiD [Escherichia coli] | 65 | 40 | |
| 81 | 5 | 3711 | 2938 | gi\|1732200 | PTS permease for mannose subunit IIPMan | 65 | 43 | |
| | | | | | [Vibria furnissii] | | | |
| 83 | 18 | 12506 | 12745 | pir\|D64042\|D64042 | ribosomal-protein-alanine | 65 | 50 | |
| | | | | | acetyltransferase (rimI) homolog - | | | |
| | | | | | Haemophilus influenzae (strain Rd KW20) | | | |
| 100 | 38 | 28229 | 28032 | gi\|183075 | glial fibrillary acidic protein [Homo | 65 | 43 | |
| | | | | | sapiens] | | | |
| 105 | 1 | 912 | 106 | pir\|S15248\|YQBZCD | fimC protein - Dichelobacter nodosus | 65 | 46 | |
| | | | | | (serotype D) | | | |
| 106 | 5 | 6097 | 5102 | gi\|1143204 | ORF2; Method: conceptual translation | 65 | 44 | |
| | | | | | supplied by author [Shigella sonnei] | | | |
| 109 | 3 | 1165 | 899 | gi\|1573390 | hypothetical [Haemophilus influenzae] | | | |
| 110 | 7 | 5579 | 4257 | pir\|B44514\|B44514 | hypothetical protein 1 (vnfA 5′ region) - | 65 | 43 | |
| | | | | | Azotobacter vinelandii] | | | |
| 120 | 3 | 1249 | 1632 | sp\|P54746\|YBGB_ECO | HYPOTHETICAL PROTEIN IN HRSA 3′REGION | 65 | 48 | |
| | | | | LI | (FRAGMENT). | | | |
| 122 | 2 | 896 | 1654 | gi\|1335913 | unknown [Erysipelothrix rhusiopathiae] | 65 | 48 | |
| 145 | 4 | 2509 | 3210 | gi\|1208965 | hypothetical 23.3 kd protein [Eseherichia | 65 | 40 | |
| | | | | | coli] | | | |
| 149 | 7 | 4407 | 3502 | gi\|145173 | 35 kDa protein [Escherichia coli] | 65 | 46 | |
| 154 | 8 | 5738 | 4926 | gi\|405804 | transposase [Streptococcus thermophilis] | 65 | 47 | |
| 155 | 1 | 306 | 512 | gi\|285627 | E.coli SecE homologous protein [Bacillus | 65 | 48 | |
| | | | | | subtilis] pir\|S39858\|S39858 secE protein | | | |
| | | | | | homolog - Bacillus subtilis | | | |
| | | | | | sp\|Q06799\|SECE_BACSU PREPROTEIN | | | |
| | | | | | TRANSLOCASE SECE SUBUNIT. | | | |
| 158 | 1 | 150 | 1103 | gi\|289272 | ferrichrome-binding protein [Bacillus | 65 | 40 | |
| | | | | | subtilis] | | | |
| 158 | 16 | 14885 | 15946 | gi\|467172 | add; L308_C2_206 [Mycobacterium leprae] | 65 | 36 | |
| 173 | 4 | 2103 | 2912 | gnl\|PID\|e254877 | unknown [Mycobacterium tuberculosis] | 65 | 41 | |
| 173 | 12 | 9749 | 9054 | gi\|1652864 | hypothetical protein [Synechocystis sp.] | 65 | 50 | |
| 179 | 16 | 15674 | 17035 | gi\|1171125 | thioredoxin reductase [Clostridium | 65 | 41 | |
| | | | | | litorale] | | | |
| 180 | 26 | 26911 | 28266 | sp\|P13692\|P54_ENTF | P54 PROTEIN PRECURSOR. | 65 | 39 | |
| | | | | C | | | | |
| 193 | 6 | 2893 | 3795 | gi\|39787 | adaA [Bacillus subtilis] | 65 | 45 | |
| 194 | 5 | 1843 | 2238 | gi\|47394 | 5-oxoprolyl-peptidase [Streptococcus | 65 | 48 | |
| | | | | | pyogenes] | | | |
| 199 | 1 | 894 | 82 | gi\|1591118 | nitrate transport ATP-binding protein | 65 | 46 | |
| | | | | | [Methanococcus jannaschii] | | | |
| 200 | 24 | 13441 | 13136 | gi\|144926 | toxin A [Clostridium difficile] | 65 | 39 | |
| 202 | 3 | 2925 | 1846 | gi\|413968 | ipa-44d gene product [Bacillus subtilis] | 65 | 46 | |
| 203 | 1 | 797 | 3 | gi\|1377832 | unknown [Bacillus subtilis] | 65 | 45 | |
| 204 | 3 | 1065 | 1472 | gi\|1008996 | unknown [Schizosaccharomyces pombe] | 65 | 51 | |
| 205 | 4 | 1029 | 1685 | gi\|148989 | truncated tetracycline resistance | 65 | 42 | |
| | | | | | repressor (non-functional) Haemophilus | | | |
| | | | | | parainfluenzae] | | | |
| 206 | 8 | 5037 | 4807 | pir\|D60110\|D60110 | repetitive protein antigen 3 - Trypanosoma | 65 | 41 | |
| | | | | | cruzi (fragment) | | | |
| 217 | 1 | 411 | 4 | gi\|1146181 | putative [Bacillus subtilis] | 65 | 43 | |
| 217 | 4 | 1092 | 3065 | gi\|984229 | penicillin-binding protein 1a | 65 | 48 | |
| | | | | | [Streptococcus pneumoniae] | | | |
| 223 | 27 | 23445 | 23879 | gnl\|PID\|e269486 | Unknown [Bacillus subtilis] | 65 | 47 | |
| 225 | 6 | 5138 | 3984 | gi\|39956 | IIGlc [Bacillus subtilis] | 65 | 47 | |
| 229 | 5 | 5528 | 5130 | gi\|1303914 | YghY [Bacillus subtilis] | 65 | 33 | |
| 229 | 10 | 10697 | 8517 | gnl\|PID\|e266933 | unknown [Mycobacterium tuberculosis] | 65 | 46 | |
| 233 | 3 | 2413 | 1526 | gi\|1887825 | ORF_f541 [Escherichia coli] | 65 | 46 | |
| 236 | 4 | 6975 | 4789 | gi\|405863 | yohA [Escherichia coli] | 65 | 43 | |
| 237 | 4 | 1460 | 1816 | gi\|305080 | myosin heavy chain [Entamoeba histolytica] | 65 | 42 | |
| 238 | 24 | 21690 | 23228 | gi\|305008 | rhamnulokinase [Escherichia coli] | 65 | 49 | |
| 242 | 3 | 2192 | 3280 | gnl\|PID\|e221269 | tail protein [Bacteriophage CP-1] | 65 | 37 | |
| 244 | 6 | 5172 | 4228 | gi\|1653197 | hypothetical protein [Synechocystis sp.] | 65 | 51 | |
| 259 | 5 | 3684 | 2779 | gi\|559900 | F49E2.1 [Caenorhabditis elegans] | 65 | 39 | |
| 259 | 6 | 4243 | 3749 | gi\|1743887 | molybdopterin cofactor biosynthesis enzyme | 65 | 50 | |
| | | | | | [Bradyrhizobium laponicum] | | | |
| 260 | 1 | 140 | 478 | gi\|895748 | putative cellobiose phosphotransferase | 65 | 55 | |
| | | | | | enzyme II [Bacillus ubtilis] | | | |
| 269 | 6 | 4113 | 3907 | gi\|1303792 | YgeK [Bacillus subtilis] | 65 | 39 | |
| 271 | 12 | 7731 | 6772 | gi\|1657534 | cyn operon transcriptional activator | 65 | 45 | |
| | | | | | [Escherichia coli] | | | |
| 275 | 9 | 6413 | 5361 | gi\|1773132 | multidrug resistance-like ATP-binding | 65 | 48 | |
| | | | | | protein Mdl [Escherichia coli] | | | |
| 276 | 4 | 1813 | 1583 | gi\|1504014 | similar to myosin heavy chain: Containing | 65 | 34 | |
| | | | | | ATP/GTP-binding site motif A(P-loop) [Homo | | | |
| | | | | | sapiens] | | | |
| 279 | 14 | 14254 | 10625 | gi\|1237015 | ORF4 [Bacillus subtilis] | 65 | 45 | |
| 281 | 2 | 692 | 1279 | gi\|1303962 | YgjK [Bacillus subtilis] | 65 | 50 | |
| 295 | 5 | 2279 | 3388 | gi\|436965 | [malA] gene products [Bacillus | 65 | 41 | |
| | | | | | stearothermophilus] pir\|543914\|S43914 | | | |
| | | | | | hypothetical protein 1 - Bacillus | | | |
| | | | | | tearothermophilus | | | |
| 298 | 1 | 63 | 1142 | gi\|928834 | integrase [Lactococcus lactis phage BK5-T] | 65 | 44 | |
| 301 | 8 | 7592 | 7176 | gi\|1303893 | YqhL [Bacillus subtilis] | 65 | 50 | |
| 311 | 3 | 4658 | 5701 | gnl\|PID\|e221269 | tail protein [Bacteriophage CP-1] | 65 | 40 | |
| 326 | 1 | 2 | 247 | gi\|466520 | pocR [Salmonella typhimurium] | 65 | 38 | |
| 329 | 1 | 789 | 523 | gi\|1303895 | YqhN [Bacillus subtilis] | 65 | 36 | |
| 345 | 5 | 3363 | 3641 | gi\|895749 | putative cellobiose phosphotransferase | 65 | 51 | |
| | | | | | enzyme II″ [Bacillus ubtilis] | | | |
| 369 | 3 | 1635 | 1207 | gi\|1480429 | putative transcriptional regulator | 65 | 45 | |
| | | | | | [Bacillus stearothermophilus] | | | |
| 373 | 2 | 815 | 1630 | gi\|1277032 | unknown [Bacillus subtilis] | 65 | 41 | |
| 379 | 9 | 11301 | 8275 | gi\|887828 | was o492p and o826p before splice | 65 | 49 | |
| | | | | | [Escherichia coli] | | | |
| 386 | 13 | 7903 | 8145 | gnl\|PID\|e217382 | M7.9 [Caenorhabditis elegans] | 65 | 39 | |
| 395 | 4 | 1028 | 1231 | gi\|1592033 | M. jannaschii predicted coding region | 65 | 30 | |
| | | | | | MJ1387 [Methanococcus jannaschii] | | | |
| 396 | 3 | 1000 | 1272 | gi\|1045900 | hypothetical protein (GB:L09228_17) | 65 | 44 | |
| | | | | | [Mycoplasma genitalium] | | | |
| 422 | 3 | 2050 | 1262 | gi\|405907 | yejD [Escherichia coli] | 65 | 50 | |
| 438 | 1 | 44 | 358 | gi\|530798 | LysB [Bacteriophage phi-LC3] | 65 | 39 | |
| 460 | 1 | 119 | 646 | gi\|1502420 | malonyl-CoA:Acyl carrier protein | 65 | 46 | |
| | | | | | transacylase [Bacillus subtilis] | | | |
| 463 | 1 | 870 | 121 | gi\|1651917 | tRNA(m1G37)methyltramsferase | 65 | 47 | |
| | | | | | [Synechocystis sp.] | | | |
| 468 | 1 | 2 | 823 | gi\|216457 | ORF [Escherichia coli] | 65 | 46 | |
| 470 | 1 | 34 | 816 | gi\|530798 | LysB [Bacteriophage phi-LC3] | 65 | 47 | |
| 476 | 1 | 21 | 830 | gi\|1006591 | cation-transporting ATPase PacL | 65 | 46 | |
| | | | | | [Synechocystis sp.] | | | |
| 510 | 7 | 4875 | 6092 | gi\|143150 | levR [Bacillus subtilis] | 65 | 46 | |
| 565 | 2 | 686 | 339 | gi\|143833 | PBSX repressor [Bacillus subtilis] | 65 | 51 | |
| 566 | 2 | 198 | 743 | gi\|496501 | RepS [Streptococcus pyogenes] | 65 | 34 | |
| 604 | 5 | 1875 | 2078 | gi\|1590997 | M. jannaschii predicted coding region | 65 | 49 | |
| | | | | | MJ0272 [Methanococcus jannaschii] | | | |
| 608 | 1 | 194 | 3 | gnl\|PID\|e290940 | unknown [Mycobacterium tuberculosis] | 65 | 35 | |
| 648 | 1 | 60 | 953 | gi\|1591145 | hypothetical protein (HI0902) | 65 | 31 | |
| | | | | | [Methanococcus jannaschii] | | | |
| 657 | 4 | 2531 | 1620 | gi\|1500015 | amidase [Methanococcus jannaschii] | 65 | 46 | |
| 691 | 1 | 2 | 718 | gnl\|PID\|e248400 | orfRM1 gene product [Bacillus subtilis] | 65 | 48 | |
| 704 | 2 | 474 | 175 | gi\|467428 | unknown [Bacillus subtilis] | 65 | 50 | |
| 758 | 2 | 408 | 683 | gi\|451201 | ORF1 [Bacillus subtilis] | 65 | 44 | |
| 778 | 1 | 833 | 3 | gi\|410137 | ORFX13 [Bacillus subtilis] | 65 | 40 | |
| 793 | 1 | 1 | 564 | gi\|912436 | oligo-1,6-glucosidase [Bacillus | 65 | 40 | |
| | | | | | thermoglucosidasius] pir\|A41707\|A41707 | | | |
| | | | | | oligo-1,6-glucosidase (BC 3.2.1.10) - | | | |
| | | | | | Bacillus hemoglucosidasius | | | |
| 827 | 1 | 364 | 2 | gi\|852076 | MrgA [Bacillus subtilis] | 65 | 33 | |
| 856 | 1 | 209 | 3 | gi\|1575605 | 4-methyl-5-nitrocatechol oxygenase | 65 | 45 | |
| | | | | | [Burkholderia sp.] | | | |
| 890 | 1 | 966 | 745 | pir\|A44803\|A44803 | pG1 protein - human (fragment) | 65 | 63 | |
| 4 | 1 | 2 | 958 | gnl\|PID\|e265530 | yorfE [Streptococcus pneumoniae] | 64 | 43 | |
| 5 | 8 | 4212 | 5579 | gi\|407881 | stringent response-like protein | 64 | 47 | |
| | | | | | [Streptococcus equisimilis] | | | |
| | | | | | pir\|539975\|539975 stringent response-like | | | |
| | | | | | protein - Streptococcus quisimilis | | | |
| 8 | 4 | 4047 | 3304 | gi\|1573150 | dihydrolipoamide acetyltransferase (acoC) | 64 | 37 | |
| | | | | | [Haemophilus influenzae] | | | |
| 17 | 14 | 11709 | 10393 | gi\|155109 | ORF 1B [Thermus aguaticus thermophilus] | 64 | 37 | |
| 19 | 12 | 6499 | 6801 | gi\|1303755 | YqbO [Bacillus subtilis] | 64 | 32 | |
| 23 | 1 | 1 | 303 | gi\|1022963 | dextransucrase [Leuconostoc mesenteroides] | 64 | 50 | |
| 28 | 4 | 7059 | 6505 | gi\|1568609 | 18kDA protein [Streptococcus pneumoniae] | 64 | 45 | |
| 31 | 3 | 1316 | 2986 | gi\|1100076 | PTS-dependent enzyme II [Clostridium | 64 | 47 | |
| | | | | | longisporum] | | | |
| 47 | 2 | 2665 | 3408 | gi\|1742154 | Phosphoglycolate phosphatase (EC | 64 | 52 | |
| | | | | | 3.1.3.18). [Escherichia coli] | | | |
| 48 | 2 | 1699 | 1310 | gi\|142702 | A competence protein 2 [Bacillus subtilis] | 64 | 41 | |
| 54 | 8 | 2750 | 2352 | gi\|951052 | ORF9, putative [Streptococcus pneumoniae] | 64 | 31 | |
| 57 | 15 | 18035 | 17274 | gi\|1183886 | integral membrane protein [Bacillus | 64 | 40 | |
| | | | | | subtilis] | | | |
| 62 | 4 | 1968 | 1699 | gi\|475110 | fructokinase [Pediococcus pentosaceus] | 64 | 52 | |
| 100 | 42 | 29329 | 29039 | gi\|951048 | excisionase [Streptococcus pneumoniae] | 64 | 37 | |
| 102 | 4 | 3726 | 4805 | gi\|215331 | morphogenesis protein [Bacteriophage phi- | 64 | 43 | |
| | | | | | 29] | | | |
| 106 | 3 | 3296 | 2439 | gi\|1303930 | YgiK [Bacillus subtilis] | 64 | 44 | |
| 123 | 12 | 12960 | 11314 | sp\|P37047\|YAEG_ECO | HYPOTHETICAL 44.3 KD PROTEIN IN HTRA-DAPD | 64 | 40 | |
| | | | | LI | INTERGENIC REGION. | | | |
| 128 | 2 | 1285 | 1614 | gi\|143961 | pyruvate phosphate dikinase [Clostridium | 64 | 52 | |
| | | | | | symbiosum] pir\|A36231\|KIQAPO | | | |
| | | | | | pyruvate, orthophosphate dikinase (EC | | | |
| | | | | | 2.7.9.1) - lostridium symbiosum | | | |
| 128 | 8 | 6178 | 4757 | gi\|40665 | beta-glucosidase [Clostridium | 64 | 41 | |
| | | | | | thermocellum] | | | |
| 133 | 2 | 1748 | 2248 | gi\|1591027 | ferripyochelin binding protein | 64 | 46 | |
| | | | | | [Methanococcus jannaschii] | | | |
| 150 | 1 | 35 | 673 | gnl\|PID\|e185372 | ceuC gene product [Campylobacter coli] | 64 | 38 | |
| 158 | 6 | 6038 | 5040 | gi\|1045801 | hypothetical protein (SP:P32720) | 64 | 35 | |
| | | | | | [Mycoplasma genitalium] | | | |
| 164 | 7 | 3620 | 4903 | gnl\|PID\|e283116 | unknown similar to quinolon resistance | 64 | 41 | |
| | | | | | protein NorA [Bacillus subtilis] | | | |
| 171 | 11 | 10107 | 10784 | gi\|1591668 | phosphate transport system regulatory | 64 | 40 | |
| | | | | | protein [Methanococcus jannaschii] | | | |
| 179 | 4 | 4826 | 6373 | gi\|149535 | D-alanine activating enzyme [Lactobacillus | 64 | 51 | |
| | | | | | casei] | | | |
| 181 | 4 | 2251 | 1364 | gi\|671632 | unknown [Staphylococcus aureus] | 64 | 38 | |
| 190 | 11 | 11302 | 10355 | gi\|599850 | orf1 gene product [Lactobacillus sake] | 64 | 33 | |
| 195 | 37 | 15344 | 16033 | gi\|1736499 | Lysostaphin precursor (BC 3.5.1.-). | 64 | 49 | |
| | | | | | [Escherichia coli] | | | |
| 199 | 4 | 4000 | 5631 | gi\|746574 | similar to M. musculus transport system | 64 | 37 | |
| | | | | | membrane protein, Nramp PIR:A40739) and S. | | | |
| | | | | | cerevisiae SMF1 protein (PIR:A45154) | | | |
| | | | | | Caenorhabditis elegans] | | | |
| 202 | 1 | 1 | 1560 | gi\|309662 | pheromone binding protein [Plasmid pCF10] | 64 | 45 | |
| 204 | 7 | 3000 | 4115 | gi\|1591731 | melvalonate kinase [Methanococcus | 64 | 41 | |
| | | | | | jannaschii] | | | |
| 208 | 1 | 308 | 1090 | gi\|473821 | ‘tetrahydrodipicolinate N- | 64 | 42 | |
| | | | | | succinyltransferase’ [Escherichia coli] | | | |
| | | | | | gi\|1552743 tetrahydrodipicolinate N- | | | |
| | | | | | succinyltransferase Escherichia coli] | | | |
| 216 | 9 | 6501 | 6698 | gi\|47373 | 7 kDa protein [Streptococcus pneumoniae] | 64 | 35 | |
| 221 | 18 | 8268 | 8513 | gi\|1389837 | complement regulatory protein [Trypanosoma | 64 | 28 | |
| | | | | | cruzi] | | | |
| 231 | 4 | 2964 | 2632 | gnl\|PID\|e279941 | muconate cycloisomerase [Rhodococcus | 64 | 37 | |
| | | | | | erythropolis] | | | |
| 234 | 2 | 751 | 302 | gnl\|PID\|e194709 | N-terminal part of a protein of unknown | 64 | 42 | |
| | | | | | function [Chlamydia psittaci] | | | |
| 238 | 18 | 15580 | 16392 | gi\|537108 | ORE_f254 [Escherichia coli] | 64 | 44 | |
| 245 | 1 | 14 | 868 | gi\|153247 | endo-beta-N-acetylglucosaminidase H | 64 | 51 | |
| | | | | | [Streptomyces plicatus]pir\|A00903\|RBSMHP | | | |
| | | | | | mannosyl-glycoprotein ndo-beta-N- | | | |
| | | | | | acetyiglucosaminidase (EC 3.2.1.96) H | | | |
| | | | | | precursor - treptomyces plicatus | | | |
| 272 | 2 | 584 | 1144 | gi\|580781 | signal peptidase [Bacillus licheniformis] | 64 | 47 | |
| 281 | 5 | 2659 | 5019 | gi\|147550 | recJ [Escherichia coli] | 64 | 46 | |
| 290 | 12 | 9496 | 10371 | gi\|45713 | P.putida genes rpmH, rnpA, 9k, 60k, 50k, | 64 | 42 | |
| | | | | | gidA, gidB, uncI and uncB seudomonas | | | |
| | | | | | putida] | | | |
| 298 | 4 | 4029 | 3466 | gi\|147780 | rts gene product [Escherichia coli] | 64 | 43 | |
| 301 | 20 | 16216 | 15977 | gi\|170482 | prosystemin [Solanum lycopersicum] | 64 | 57 | |
| 301 | 21 | 17732 | 17391 | gi\|405804 | transposase [Streptococcus thermophilus] | 64 | 52 | |
| 307 | 1 | 198 | 1964 | gi\|1255196 | BSMA [Bacillus stearothermophilus] | 64 | 48 | |
| 320 | 5 | 3441 | 3070 | gi\|972900 | ArtP [Haemophilus influenzae] | 64 | 38 | |
| 341 | 9 | 7690 | 6413 | gi\|1161380 | IcaA [Staphylococcus epidermidis] | 64 | 30 | |
| 345 | 6 | 3589 | 4848 | gi\|902932 | L-methionine gamma-lyase [Pseudomonas | 64 | 45 | |
| | | | | | putida] | | | |
| 348 | 1 | 453 | 22 | gi\|1591957 | M. jannaschii predicted coding region | 64 | 32 | |
| | | | | | MJ1318 [Methanococcus jannaschii] | | | |
| 350 | 2 | 1372 | 1830 | gnl\|PID\|e289141 | similar to hydroxyrnyristoyl-(acyl carrier | 64 | 44 | |
| | | | | | protein) dehydratase [Bacillus subtilis] | | | |
| 351 | 7 | 3291 | 2917 | gi\|49013 | dTDP-dihydrostreptose synthase | 64 | 46 | |
| | | | | | [Streptomyces griseus] ir\|S18618\|SYSMPG | | | |
| | | | | | dTDP-dihydrostreptose synthase - | | | |
| | | | | | Streptomyces iseus | | | |
| 352 | 2 | 780 | 1028 | gi\|173431 | H+−ATPase [Schizosaccharomyces pombe] | 64 | 38 | |
| 386 | 10 | 5952 | 6161 | gnl\|PID\|e243284 | ORF YGLO56c [Saccharomyces cerevisiae] | 64 | 50 | |
| 398 | 2 | 1233 | 1808 | gi\|147920 | 3-methyladenine-DNA glycosylase I (tag) | 64 | 47 | |
| | | | | | [Escherichia coli] | | | |
| 399 | 12 | 8761 | 9159 | gi\|1778534 | H10024 homolog [Escherichia coli] | 64 | 40 | |
| 409 | 1 | 657 | 1607 | gi\|1773157 | ferrochelatase [Escherichia coli] | 64 | 41 | |
| 446 | 1 | 266 | 775 | gi\|563845 | orf gene product [Bacillus circulans] | 64 | 53 | |
| 462 | 4 | 1714 | 1959 | gi\|169461 | serine proteinase inhibitor [Populus | 64 | 50 | |
| | | | | | trichocarpa × Populus eltoides] | | | |
| 466 | 6 | 5621 | 8539 | gi\|143150 | levR [Bacillus subtilis] | 64 | 43 | |
| 501 | 2 | 891 | 1469 | gi\|467109 | rim; 30S Ribosomal protein S18 alanine | 64 | 44 | |
| | | | | | acetyltransferase; 229_C1_170 | | | |
| | | | | | [Mycobacterium leprae] | | | |
| 512 | 1 | 1 | 279 | gi\|1651948 | hypothetical protein [Synechocystis sp.] | 64 | 35 | |
| 516 | 1 | 466 | 2 | gi\|155027 | 6′-N-acetyltransferase [Transposon Tn2426] | 64 | 35 | |
| 516 | 2 | 556 | 759 | gi\|1653387 | nitrogen assimilation regulatory protein | 64 | 58 | |
| | | | | | [Synechocystis sp.] | | | |
| 523 | 2 | 904 | 662 | gi\|159464 | armadillo protein [Musca domestica] | 64 | 45 | |
| 537 | 2 | 1083 | 844 | gi\|929966 | truncated ORFB due to a basepair deletion; | 64 | 42 | |
| | | | | | similar to B. anthracis terneR element | | | |
| | | | | | ORFB [Bacillus anthracis] | | | |
| 549 | 1 | 309 | 4 | gi\|1279769 | FdhC [Methanobacterium thermoformicicum] | 64 | 48 | |
| 552 | 4 | 5960 | 3945 | gi\|1100076 | PTS-dependent enzyme II [Clostridium | 64 | 47 | |
| | | | | | longisporum] | | | |
| 556 | 1 | 3 | 224 | gi\|727437 | putative 37-kDa protein [Lactococcus | 64 | 49 | |
| | | | | | lactis] | | | |
| 557 | 2 | 767 | 1120 | gnl\|PID\|e257629 | transcription factor [Lactococcus lactis] | 64 | 44 | |
| 602 | 1 | 428 | 156 | gi\|520407 | orf2; GTG start codon [Bacillus | 64 | 50 | |
| | | | | | thuringiensis] | | | |
| 603 | 1 | 1 | 165 | gi\|1621445 | sporulation protein Cse15 [Bacillus | 64 | 32 | |
| | | | | | subtilis] | | | |
| 626 | 1 | 3 | 992 | gi\|1574715 | thioredoxin reductase (trxB) [Haemophilus | 64 | 40 | |
| | | | | | influenzae] | | | |
| 628 | 2 | 240 | 446 | gi\|1165281 | Smg [Borrelia burgdorferi] | 64 | 41 | |
| 723 | 1 | 23 | 829 | gi\|1620648 | surface protein Rib [Streptococcus | 64 | 50 | |
| | | | | | agalactiae] | | | |
| 739 | 1 | 4 | 378 | gi\|143835 | PBSX repressor [Bacillus subtilis] | 64 | 37 | |
| 748 | 1 | 139 | 765 | gi\|498816 | ORF7; homology to regions 4.1 and 4.2 of | 64 | 35 | |
| | | | | | sigma factors [Bacillus ubtilis] | | | |
| 758 | 1 | 3 | 410 | gi\|451201 | ORF1 [Bacillus subtilis] | 64 | 34 | |
| 808 | 1 | 368 | 3 | gi\|142833 | ORF2 [Bacillus subtilis] | 64 | 47 | |
| 818 | 2 | 415 | 663 | gi\|854020 | U41, major DNA binding protein [Human | 64 | 40 | |
| | | | | | herpesvirus 6] | | | |
| 906 | 1 | 2 | 433 | gi\|1303865 | YggR [Bacillus subtilis] | 64 | 44 | |
| 17 | 28 | 28175 | 27612 | gi\|151824 | ORF5 [Plasmid R46] | 63 | 34 | |
| 19 | 18 | 9546 | 9722 | gi\|288661 | ORF5 product [Bacteriophage P2] | 63 | 45 | |
| 39 | 5 | 1841 | 2329 | gi\|1573292 | hypothetical [Haemophilus influenzae] | 63 47 | | |
| 41 | 1 | 1531 | 2 | gi\|580896 | nodB protein (aa 1-219) [Bradyrhizobium | 63 | 43 | |
| | | | | | sp.] | | | |
| 55 | 10 | 5052 | 6410 | gi\|1303917 | YgiB [Bacillus subtilis] | 63 | 42 | |
| 80 | 2 | 1852 | 824 | gi\|38722 | precursor (aa −20 to 381) [Acinetobacter | 63 | 42 | |
| | | | | | calcoaceticus] ir\|A29277\|A29277 aldose 1- | | | |
| | | | | | epimerase (EC 5.1.3.3) - Acinetobacter | | | |
| | | | | | lcoaceticus | | | |
| 81 | 10 | 6724 | 6221 | gi\|1591234 | hypothetical protein (SP:P42297) | 63 | 40 | |
| | | | | | [Methanococcus jannaschii] | | | |
| 81 | 14 | 9175 | 10848 | gi\|309662 | pheromone binding protein [Plasmid pcF10] | 63 | 44 | |
| 86 | 1 | 2 | 1006 | gi\|143316 | [gap]gene products [Bacillus megaterium] | 63 | 43 | |
| 89 | 13 | 12929 | 12639 | gi\|1377841 | unknown [Bacillus subtilis] | 63 | 44 | |
| 98 | 14 | 14365 | 13502 | sp\|P45169\|POTC_HAE | SPERMIDINE/PUTRESCINE TRANSPORT SYSTEM | 63 | 37 | |
| | | | | IN | PERMEASE PROTEIN POTC. | | | |
| 100 | 24 | 20444 | 17985 | gi\|563258 | virulence-associated protein E | 63 | 44 | |
| | | | | | [Dichelobacter nodosus] | | | |
| 102 | 2 | 2441 | 2599 | gi\|1619835 | MOB [Bacillus thuringiensis israelens] | 63 | 28 | |
| 110 | 22 | 19725 | 20705 | gi\|1763011 | lysophospholipase homolog [Homo sapiens] | 63 | 48 | |
| 115 | 1 | 481 | 92 | gi\|467360 | unknown [Bacillus subtilis] | 63 | 38 | |
| 128 | 30 | 25257 | 24397 | gi\|1518679 | orf [Bacillus subtilis] | 63 | 39 | |
| 138 | 18 | 12236 | 11580 | gi\|405516 | This ORF is homologous to nitroreductase | 63 | 39 | |
| | | | | | from Enterobacter cloacae, ccession Number | | | |
| | | | | | A38686, and Salmonella, Accession Number | | | |
| | | | | | P15888 Mycoplasma-like organism] | | | |
| 143 | 2 | 167 | 1096 | pir\|S39416\|S39416 | metallothionein 10-I - blue mussel | 63 | 63 | |
| 158 | 9 | 10023 | 8893 | bbs\|173803 | CD4+ T cell-stimulating antigen [Listeria | 63 | 48 | |
| | | | | | monocytogenes, 85EO-1167, Peptide Partial, | | | |
| | | | | | 268 aa] [Listeria monocytogenes] | | | |
| 164 | 6 | 3041 | 3301 | gi\|1573583 | H. influenzae predicted coding region | 63 | 31 | |
| | | | | | H10594 [Haemophilus influenzae] | | | |
| 164 | 18 | 18502 | 21708 | gi\|1015903 | ORF YJR151c [Saccharomyces cerevisiae] | 63 | 45 | |
| 165 | 3 | 3084 | 2278 | gi\|537108 | ORF_f254 [Escherichia coli] | 63 | 45 | |
| 166 | 1 | 83 | 1045 | gi\|762778 | NifS gene product [Anabaena azollae] | 63 | 49 | |
| 168 | 3 | 638 | 1489 | gi\|805022 | Ndilp [Saccharomyces cerevisiae] | 63 | 32 | |
| 171 | 12 | 10655 | 10810 | gi\|152403 | phosphate regulatory protein [Rhizobium | 63 | 50 | |
| | | | | | meliloti] | | | |
| 172 | 1 | 242 | 1336 | gi\|1552775 | ATP-binding protein [Escherichia coli] | 63 | 45 | |
| 179 | 11 | 11236 | 12111 | gnl\|PID\|e245033 | unknown [Mycobacterium tuberculosis] | 63 | 42 | |
| 179 | 15 | 15289 | 15765 | gi\|1353197 | thioredoxin reductase [Eubacterium | 63 | 44 | |
| | | | | | acidaminophilum] | | | |
| 180 | 3 | 3412 | 1892 | gi\|1064813 | homologous to sp:PHOR_BACSU [Bacillus | 63 | 40 | |
| | | | | | subtilis] | | | |
| 180 | 7 | 7063 | 7926 | gi\|1657516 | hypothetical protein [Escherichia coli] | 63 | 41 | |
| 187 | 1 | 1 | 729 | gi\|1651957 | hypothetical protein [Synechocystis sp.] | 63 | 34 | |
| 195 | 17 | 7717 | 8280 | gi\|431928 | MunI methyltransferase [Mycoplasma sp.] | 63 | 44 | |
| 202 | 8 | 5311 | 6165 | gi\|606162 | ORF_f229 [Escherichia coli] | 63 | 48 | |
| 202 | 10 | 7848 | 8681 | gi\|606018 | ORF_o783 [Escherichia coli] | 63 | 47 | |
| 208 | 3 | 2979 | 2341 | gi\|1006613 | hypothetical protein [Synechocystis sp.] | 63 | 40 | |
| 221 | 3 | 874 | 1146 | gnl\|PID\|e265530 | yorfE [Streptococcus pneumoniae] | 63 | 42 | |
| 227 | 2 | 856 | 1254 | gi\|438459 | homologous to E. coli hydrophobic Fe- | 63 | 41 | |
| | | | | | uptake components FepD, FecD; utative | | | |
| | | | | | [Bacillus subtilis] | | | |
| 231 | 3 | 2618 | 2448 | gi\|606248 | 30S ribosomal subunit protein S3 | 63 | 42 | |
| | | | | | [Escherichia coli] | | | |
| 233 | 9 | 6773 | 6144 | gi\|887827 | ORF_o192 [Escherichia coli] | 63 | 41 | |
| 234 | 1 | 348 | 70 | gi\|494958 | ExpZ [Bacillus subtilis] | 63 | 32 | |
| 240 | 2 | 1230 | 721 | gnl\|PID\|e252616 | DcuC protein [Escherichia coli] | 63 | 38 | |
| 244 | 9 | 7512 | 6508 | gi\|467421 | similar to B. subtilis DnaH [Bacillus | 63 | 43 | |
| | | | | | subtilis] sp\|P37540\|YAAS_BACSU | | | |
| | | | | | HYPOTHETICAL 37.6 KD PROTEIN IN XPAC-ABRB | | | |
| | | | | | NTERGENIC REGION. | | | |
| 255 | 5 | 3600 | 2818 | gi\|1486244 | unknown [Bacillus subtilis] | 63 | 47 | |
| 258 | 1 | 3 | 449 | gi\|1041115 | TRAC [Plasmid pPD1] | 63 | 38 | |
| 259 | 4 | 2842 | 2342 | gnl\|PID\|e290788 | unknown [Mycobacterium tuberculos] | 63 | 42 | |
| 265 | 8 | 3313 | 3480 | gi\|694074 | emml gene product [Streptococcus pyogenes] | 63 | 42 | |
| 276 | 18 | 12505 | 11654 | gi\|601878 | beta-1,3-glucanase bg1H [Bacillus | 63 | 36 | |
| | | | | | circulans] | | | |
| 294 | 5 | 2012 | 2275 | gi\|288661 | ORF5 product [Bacteriophage P2] | 63 | 40 | |
| 301 | 7 | 7063 | 6704 | gnl\|PID\|e290998 | unknown [Mycobacteriurn tuberculos] | 63 | 41 | |
| 345 | 2 | 2279 | 2725 | gi\|413940 | ipa-16d gene product [Bacillus subtilis] | 63 | 39 | |
| 351 | 8 | 4361 | 3306 | gi\|398120 | TDP-glucose oxireductase [Xanthomonas | 63 | 47 | |
| | | | | | campestris] | | | |
| 359 | 1 | 526 | 14 | gi\|1001605 | 3-hydroxyisobutyrate dehydrogenase | 63 | 36 | |
| | | | | | [Synechocystis sp.] | | | |
| 364 | 6 | 6741 | 7277 | gi\|1736473 | ORF_ID:o335#13; similar to [SwissProt | 63 | 42 | |
| | | | | | Accession Number P36088] [Escherichia | | | |
| | | | | | coli] | | | |
| 378 | 2 | 683 | 1414 | gi\|529016 | aminoglycoside 6-adenylyltransferase | 63 | 41 | |
| | | | | | [Bacillus subtilis] pir\|JU0059\|XXBSG | | | |
| | | | | | aminoglycoside 6-adenylyltransferase (EC | | | |
| | | | | | 2.7.7.-) Bacillus subtilis | | | |
| 392 | 2 | 783 | 1646 | gi\|1772644 | orfR gene product [Bacillus subtilis] | 63 | 34 | |
| 399 | 2 | 574 | 1407 | gi\|40023 | B.subtilis genes rpmH, rnpA, 50kd, gidA | 63 | 42 | |
| | | | | | and gidB [Bacillus subtilis] i\|467388 | | | |
| | | | | | stage III sporulation [Bacillus subtilis] | | | |
| | | | | | ir\|S18073\|S18073 spoIIIJ protein - | | | |
| | | | | | Bacillus subtilis | | | |
| 403 | 1 | 754 | 2 | gi\|1303938 | YqiS [Bacillus subtilis] | 63 | 52 | |
| 404 | 5 | 4149 | 3745 | gi\|142450 | ahrC protein [Bacillus subtilis] | 63 | 42 | |
| 430 | 1 | 2 | 1222 | gi\|1046082 | M. genitalium predicted coding region | 63 | 40 | |
| | | | | | MG372 [Mycoplasma genitalium] | | | |
| 432 | 1 | 3 | 1241 | gi\|1001328 | UDP-MurNac-tripeptide synthetase | 63 | 33 | |
| | | | | | [Synechocystis sp.] | | | |
| 432 | 4 | 1970 | 3016 | gi\|1161061 | dioxygenase [Methylobacterium extorquens] | 63 | 41 | |
| 463 | 2 | 1324 | 851 | gi\|1573163 | hypothetical [Haemophilus influenzae] | 63 | 40 | |
| 466 | 4 | 2843 | 3730 | gnl\|PID\|e261988 | putative ORF [Bacillus subtilis] | 63 | 41 | |
| 472 | 1 | 527 | 3 | gi\|556885 | Unknown [Bacillus subtilis] | 63 | 50 | |
| 517 | 3 | 2803 | 1646 | gi\|531265 | lipophilic protein which affects bacterial | 63 | 38 | |
| | | | | | lysis rate and ethicillin resistance level | | | |
| | | | | | [Staphylococcus aureus] pir\|A55856\|A55856 | | | |
| | | | | | llm protein - Staphylococcus aureus | | | |
| 538 | 1 | 206 | 3 | gi\|172657 | serine-protein kinase [Saccharomyces | 63 | 47 | |
| | | | | | cerevisiae] | | | |
| 539 | 4 | 2997 | 3851 | gi\|973230 | gamma-glutatnyl kinase [Lycopersicon | 63 | 43 | |
| | | | | | esculentum] | | | |
| 565 | 3 | 756 | 1010 | gi\|1303724 | YgaF [Bacillus subtilis] | 63 | 51 | |
| 573 | 7 | 4518 | 3709 | gi\|1652352 | dihydropteroate pyrophosphorylase | 63 | 45 | |
| | | | | | [Synechocystis sp.] | | | |
| 579 | 2 | 361 | 1344 | gi\|1573114 | beta-ketoacyl-acyl carrier protein | 63 | 41 | |
| | | | | | synthase III (fabH) [Haemophilus | | | |
| | | | | | influenzae] | | | |
| 593 | 2 | 390 | 1037 | gi\|409286 | bmrU [Bacillus subtilis] | 63 | 33 | |
| 707 | 1 | 647 | 171 | gi\|511596 | interleukin-2 [Canis familiaris] | 63 | 33 | |
| 714 | 1 | 2 | 268 | gnl\|PID\|e213832 | putative inner membrane protein [Bacillus | 63 | 38 | |
| | | | | | licheniformis] | | | |
| 724 | 1 | 562 | 239 | gnl\|PID\|e255315 | unknown [Mycobacterium tuberculosis] | 63 | 49 | |
| 759 | 1 | 681 | 4 | gi\|437639 | [Plasmodium falciparum 3′end.], gene | 63 | 28 | |
| | | | | | product [Plasmodium alciparum] | | | |
| 794 | 1 | 981 | 313 | gi\|451201 | ORF1 [Bacillus subtilis] | 63 | 37 | |
| 811 | 2 | 609 | 184 | gi\|150553 | regulatory protein [Plasmid pCF10] | 63 | 30 | |
| 835 | 1 | 2 | 262 | gi\|1736496 | RpiR protein. [Escherichia coli] | 63 | 41 | |
| 11 | 1 | 2 | 1144 | gi\|143150 | levR [Bacillus subtilis] | 62 | 48 | |
| 12 | 5 | 8710 | 7673 | gi\|1486244 | unknown ]Bacillus subtilis] | 62 | 43 | |
| 15 | 3 | 1167 | 2957 | gi\|1592101 | adenine deaminase [Methanococcus | 62 | 40 | |
| | | | | | jannaschii] | | | |
| 16 | 4 | 2572 | 4092 | gi\|1109685 | ProW [Bacillus subtilis] | 62 | 37 | |
| 23 | 4 | 1279 | 2067 | gi\|41432 | fepC gene product [Escherichia coli] | 62 | 35 | |
| 23 | 26 | 16176 | 16454 | gi\|154499 | carbon dioxide concentrating mechanism | 62 | 41 | |
| | | | | | protein [Synechococcus sp.] | | | |
| | | | | | pir\|C36904\|C36904 carbon dioxide | | | |
| | | | | | concentrating mechanism protein cmL - | | | |
| | | | | | Synechococcus sp. (PCC 7942) | | | |
| 31 | 6 | 5322 | 5774 | gi\|532309 | 25 kDa protein [Escherichia coli] | 62 | 38 | |
| 68 | 4 | 1606 | 2778 | gi\|1732203 | GlcNAc 6-P deacetylase [Vibrio furnissii] | 62 | 44 | |
| 72 | 1 | 1 | 540 | gi\|1573097 | glucosamine-6-phosphate deaminase protein | 62 | 26 | |
| | | | | | (nagB) [Haemophilus influenzae] | | | |
| 76 | 3 | 1937 | 2227 | gi\|928830 | ORF75; putative [Lactococcus lactis phage | 62 | 34 | |
| | | | | | BK5 -T] | | | |
| 83 | 16 | 11700 | 12272 | gi\|1592161 | N-terminal acetyltransferase complex, | 62 | 33 | |
| | | | | | subunit ARD1 [Methanococcus jannaschii] | | | |
| 83 | 19 | 12685 | 13737 | gi\|1653193 | sialoglycoprotease [Synechocystis sp.] | 62 | 42 | |
| 91 | 6 | 3232 | 3789 | gi\|1762962 | FemA [Staphylococcus simulans] | 62 | 37 | |
| 100 | 43 | 29676 | 29317 | gi\|963033 | orf1 gene product [Enterococcus hirae] | 62 | 45 | |
| 101 | 8 | 7410 | 6481 | gi\|1161061 | dioxygenase [Methylobacterium extorguens] | 62 | 45 | |
| 110 | 3 | 653 | 871 | gi\|992683 | mdm2-D [Homo sapiens] | 62 | 37 | |
| 110 | 8 | 8440 | 5810 | gi\|784897 | beta-N-acetylhexosaminidase [Streptococcus | 62 | 46 | |
| | | | | | pneumoniae] pir\|A56390\|A56390 mannosyl- | | | |
| | | | | | glycoprotein ndo-beta-N- | | | |
| | | | | | acetylglucosaminidase (EC 3.2.1.96) | | | |
| | | | | | precursor - treptococcus pneumoniae | | | |
| 111 | 2 | 1057 | 287 | gnl\|PID\|e253280 | ORF YDL238c [Saccharomyces cerevisiae] | 62 | 45 | |
| 114 | 5 | 6886 | 7662 | gi\|152719 | flavocytochrome c [Shewanella | 62 | 37 | |
| | | | | | putrefaciens] | | | |
| 115 | 4 | 1401 | 1994 | gi\|1303978 | YgkA [Bacillus subtilis] | 62 | 46 | |
| 118 | 1 | 545 | 225 | gi\|39431 | oligo-1,6-glucosidase [Bacillus cereus] | 62 | 40 | |
| 119 | 8 | 4625 | 4356 | gi\|1522673 | type I restriction enzyme [Methanococcus | 62 | 33 | |
| | | | | | jannaschii] | | | |
| 120 | 2 | 257 | 1270 | gnl\|PID\|e235823 | unknown [Schizosaccharomyces pombe] | 62 | 41 | |
| 121 | 8 | 7543 | 8034 | gi\|39475 | formamidopyrimidine-DNA glycosylase | 62 | 48 | |
| | | | | | [Bacillus firmus] ir\|A11489\|S11489 | | | |
| | | | | | formamidopyrimidine-DNA glycosidase (EC | | | |
| | | | | | 3.2.2.23) Bacillus firmus | | | |
| 123 | 2 | 1677 | 592 | gi\|882252 | conjugated bile acid hydrolase | 62 | 40 | |
| | | | | | [Clostridium perfringens] | | | |
| | | | | | sp\|P54965\|CBH_CLOPE CHOLOYLOLYCINE | | | |
| | | | | | HYDROLASE (EC 3.5.1.24) CONJUGATED BILE | | | |
| | | | | | ACID HYDROLASE) (CBAH) (BILE SALT | | | |
| | | | | | HYDROLASE). | | | |
| 128 | 16 | 10895 | 9408 | gi\|1742834 | PTS system, cellobiose-specific IIC | 62 | 43 | |
| | | | | | component (EIIC-CEL) (Cellobiose- permease | | | |
| | | | | | IIC component) (Phosphotransferase enzyme | | | |
| | | | | | II, C component) . [Escherichia coli] | | | |
| 128 | 29 | 24254 | 23544 | gi\|1518680 | minicell-associated protein DivIVA | 62 | 37 | |
| | | | | | [Bacillus subtilis] | | | |
| 128 | 35 | 28843 | 28103 | gi\|142940 | ftsA [Bacillus subtilis] | 62 | 42 | |
| 133 | 4 | 3434 | 4165 | gnl\|PID\|e235174 | unknown [Mycobacterium tuberculosis] | 62 | 38 | |
| 134 | 2 | 1679 | 933 | gi\|155032 | ORF B [Plasmid pEa34] | 62 | 36 | |
| 146 | 6 | 4923 | 4651 | gi\|153675 | tagatose 6-P kinase [Streptococcus mutans] | 62 | 48 | |
| 149 | 5 | 3318 | 2527 | gi\|1591587 | pantothenate metabolism flavoprotein | 62 | 35 | |
| | | | | | [Methanococcus jannaschii] | | | |
| 152 | 9 | 4830 | 5747 | gi\|1652461 | lactose transport system permease protein | 62 | 39 | |
| | | | | | LacF [Synechocystis sp.] | | | |
| 163 | 2 | 1341 | 544 | gi\|533098 | DnaD protein [Bacillus subtilis] | 62 | 41 | |
| 164 | 14 | 9567 | 9322 | gi\|1118060 | coded for by C. elegans cDNA yk3d11.5; | 62 | 27 | |
| | | | | | coded for by C. elegans cDNA yk5f4.5 | | | |
| | | | | | [Caenorhabditis elegans] | | | |
| 172 | 8 | 6613 | 7146 | gi\|915199 | ggaB [Bacillus subtilis] | 62 | 33 | |
| 173 | 13 11127 | 9736 | gi\|1653484 | hypothetical protein [Synechocystis sp.] | 62 | 44 | | |
| 177 | 1 | 1077 | 364 | gi\|1572994 | 2-keto-3-deoxy-6-phosphogluconate aldolase | 62 | 38 | |
| | | | | | (eda) [Haemophilus influenzae] | | | |
| 178 | 4 | 1683 | 1318 | gnl\|PID\|e155310 | Orf2 [Bacteriophage TP901-1] | 62 | 51 | |
| 179 | 5 | 6425 | 7576 | gi\|1161933 | DltB [Lactobacillus casei] | 62 | 44 | |
| 180 | 13 | 12470 | 10842 | sp\|P37047\|YAEG_ECO | HYPOTHETICAL 44.3 KD PROTEIN IN HTRA-DAPD | 62 | 38 | |
| | | | | LI | INTERGENIC REGION. | | | |
| 181 | 14 | 11649 | 10735 | gi\|1742758 | Shikimate 5-dehydrogenase (EC 1.1.1.25). | 62 | 41 | |
| | | | | | [Escherichia coli] | | | |
| 197 | 2 | 516 | 1442 | gi\|623476 | transcriptional activator [Providencia | 62 | 34 | |
| | | | | | stuartii] sp\|P43463\|AARP_PROST | | | |
| | | | | | TRANSCRIPTIONAL ACTIVATOR AARP. | | | |
| 206 | 5 | 2728 | 1790 | gnl\|PID\|e265638 | unknown [Mycobacterium tuberculosis] | 62 | 37 | |
| 210 | 2 | 938 | 2290 | gi\|528991 | unknown [Bacillus subtilis] | 62 | 41 | |
| 221 | 15 | 7083 | 7280 | gnl\|PID\|e219154 | K08F4.5 [Caenorhabditis elegans] | 62 | 44 | |
| 222 | 11 | 7141 | 8022 | gi\|537034 | ORF_o488 [Escherichia coli] | 62 | 39 | |
| 223 | 9 | 6924 | 6358 | gnl\|PID\|e283128 | unknown, highly similar to E. coli YecD | 62 | 42 | |
| | | | | | hypothtical 21.8 KD protein in aspS | | | |
| | | | | | 5′region and to isochorismatase [Bacillus | | | |
| | | | | | subtilis] | | | |
| 225 | 4 | 2055 | 2885 | gi\|18724 | pyrroline-5-carboxylate reductase (AA 1- | 62 | 39 | |
| | | | | | 274) [Glycine max] ir\|S10186\|S10186 | | | |
| | | | | | pyrroline-5-carboxylate reductase (EC | | | |
| | | | | | 1.5.1.2) - ybean | | | |
| 229 | 11 | 11428 | 10670 | gnl\|PID\|e235745 | hypothetical protein [Mycobacterium | 62 | 36 | |
| | | | | | leprae] | | | |
| 231 | 1 | 1244 | 3 | gi\|48808 | dciAE gene product [Bacillus subtilis] | 62 | 45 | |
| 233 | 1 | 801 | 4 | gi\|143391 | ORF2 [Bacillus subtilis] | 62 | 42 | |
| 233 | 13 | 10471 | 9431 | gi\|887825 | ORF_f541 [Escherichia coli] | 62 | 35 | |
| 242 | 1 | 3 | 149 | gi\|532549 | ORF16 [Enterococcus faecalis] | 62 | 44 | |
| 255 | 2 | 443 | 1009 | gi\|639789 | ORF9 [Mycoplasma pneumoniae] | 62 | 44 | |
| 266 | 6 | 2349 | 2158 | gnl\|PID\|e194945 | yeast sds22 homolog [Homo sapiens] | 62 | 37 | |
| 270 | 1 | 3 | 314 | gi\|1303827 | YqfI [Bacillus subtilis] | 62 | 35 | |
| 270 | 7 | 5136 | 4447 | gi\|1303958 | YgIG [Bacillus subtilis] | 62 | 41 | |
| 279 | 1 | 271 | 2 | gnl\|PID\|e185372 | ceuC gene product [Campylobacter coli] | 62 | 44 | |
| 301 | 11 | 9598 | 8798 | gi\|1303863 | YggP [Bacillus subtilis] | 62 | 45 | |
| 306 | 2 | 750 | 1202 | gi\|148771 | ribosomal protein HmaS4 [Haloarcula | 62 | 41 | |
| | | | | | marismortui] | | | |
| 308 | 3 | 2328 | 1684 | gnl\|PID\|e238666 | hypothetical protein [Bacillus subtilis] | 62 | 40 | |
| 309 | 5 | 8806 | 8573 | gi\|1591861 | M. jannaschii predicted coding region | 62 | 37 | |
| | | | | | MJ1230 [Methanococcus jannaschii] | | | |
| 318 | 3 | 2278 | 1283 | gi\|1256134 | YbbE [Bacillus subtilis] | 62 | 37 | |
| 321 | 3 | 1433 | 1792 | gi\|606080 | ORF_o290; Geneplot suggests frameshift | 62 | 37 | |
| | | | | | linking to o267, not found Escherichia | | | |
| | | | | | coli] | | | |
| 338 | 13 | 11175 | 12770 | gi\|467446 | similar to SpoVB [Bacillus subtilis] | 62 | 38 | |
| 345 | 11 | 10519 | 11793 | gi\|1736789 | Collagenase precursor (EC 3.4.-.-). | 62 | 40 | |
| | | | | | [Escherichia coli] | | | |
| 345 | 21 | 22459 | 22947 | gi\|1657794 | 6-hydroxymethyl-7,8-dihydropterin | 62 | 47 | |
| | | | | | pyrophosphokinase [Methylobacterium | | | |
| | | | | | extorguens] | | | |
| 358 | 1 | 902 | 36 | gi\|409241 | penicillin-binding protein 2 | 62 | 44 | |
| | | | | | [Staphylococcus aureus] | | | |
| 362 | 6 | 2930 | 3493 | gnl\|PID\|e255091 | hypothetical protein [Bacillus subtilis] | 62 | 37 | |
| 363 | 2 | 3242 | 1581 | gnl\|PID\|e254997 | hypothetical protein [Bacillus subtilis] | 62 | 40 | |
| 365 | 2 | 400 | 1770 | gi\|143150 | levR [Bacillus subtilis] | 62 | 42 | |
| 372 | 5 | 2525 | 4489 | gi\|1045736 | fructose-permease IIBC component | 62 | 43 | |
| | | | | | [Mycoplasma genitalium] | | | |
| 373 | 1 | 3 | 851 | gi\|438462 | transmembrane protein [Bacillus subtilis] | 62 | 36 | |
| 375 | 1 | 2 | 1336 | gi\|732813 | branched-chain amino acid carrier | 62 | 43 | |
| | | | | | [Lactobacillus delbrueckii] | | | |
| | | | | | pir\|S60180\|S60180 branched-chain amino | | | |
| | | | | | acid carrier brnQ - actobacillus | | | |
| | | | | | delbrueckii | | | |
| 375 | 3 | 2592 | 1831 | gi\|1644206 | unknown [Bacillus subtilis] | 62 | 43 | |
| 391 | 2 | 142 | 510 | gi\|151776 | ORF3 [Escherichia coli] | 62 | 31 | |
| 396 | 2 | 254 | 1051 | gi\|410131 | ORFX7 [Bacillus subtilis] | 62 | 41 | |
| 423 | 1 | 197 | 6 | pir\|A33592\|A33592 | repressor protein catM - Acinetobacter | 62 | 38 | |
| | | | | | calcoaceticus | | | |
| 436 | 1 | 704 | 3 | gi\|455376 | unidentified reading frame L (ORFL) | 62 | 32 | |
| | | | | | (putative); putative [Transposon n10] | | | |
| 466 | 8 | 9320 | 10480 | gi\|147402 | mannose permease subunit III-Man | 62 | 44 | |
| | | | | | [Escherichia coli] | | | |
| 488 | 5 | 2175 | 2927 | gi\|532546 | ORF13 [Enterococcus faecalis] | 62 | 40 | |
| 510 | 4 | 2572 | 3078 | gi\|43941 | EIII-B Sor PTS [Klebsiella pneumoniae] | 62 | 35 | |
| 517 | 2 | 1533 | 736 | gi\|559388 | epsX gene product [Acinetobacter | 62 | 53 | |
| | | | | | calcoaceticus] | | | |
| 519 | 1 | 2 | 1084 | gi\|1652876 | hypothetical protein [Synechocystis sp.] | 62 | 41 | |
| 535 | 1 | 353 | 69 | gi\|1196922 | unknown protein [Insertion sequence IS861] | 62 | 33 | |
| 579 | 1 | 1 | 363 | gi\|535052 | involved in protein secretion [Bacillus | 62 | 22 | |
| | | | | | subtilis] | | | |
| 656 | 5 | 5351 | 5956 | gnl\|PID\|e290931 | unknown [Mycobacterium tuberculosis] | 62 | 40 | |
| 666 | 1 | 445 | 128 | gi\|483940 | transcription regulator [Bacillus | 62 | 42 | |
| | | | | | subtilis] | | | |
| 682 | 1 | 597 | 172 | gi\|146724 | enzyme III-Man function protein (manX | 62 | 37 | |
| | | | | | (ptsL)) [Escherichia coli] gi\|41976 manX | | | |
| | | | | | gene product (AA 1-315) [Escherichia coli] | | | |
| 771 | 1 | 3 | 365 | gi\|1773086 | similar to S. typhimurium ProY | 62 | 44 | |
| | | | | | [Escherichia coli] | | | |
| 831 | 1 | 390 | 94 | gnl\|PID\|e255000 | hypothetical protein [Bacillus subtilis] | 62 | 55 | |
| 15 | 5 | 4421 | 5260 | gnl\|PID\|e214719 | PlcR protein [Bacillus thuringiensis] | 61 | 38 | |
| 16 | 6 | 4705 | 4938 | gi\|758425 | complement component C3 [Xenopus | 61 | 44 | |
| | | | | | laevis/gilli] | | | |
| 23 | 16 | 10279 | 11214 | sp\|P19265\|EUTC_SAL | ETHANOLAMINE ANMONIA-LYASE LIGHT CHAIN (EC | 61 | 46 | |
| | | | | TY | 4.3.1.7). | | | |
| 33 | 2 | 1789 | 2205 | gi\|413958 | ipa-34d gene product [Bacillus subtilis] | 61 | 36 | |
| 33 | 5 | 4756 | 6594 | gi\|1001823 | cadmium-transporting ATPase [Synechocystis | 61 | 38 | |
| | | | | | sp.] | | | |
| 37 | 4 | 2813 | 3295 | gi\|1256140 | YbbK [Bacillus subtilis] | 61 | 51 | |
| 37 | 7 | 5973 | 5215 | gnl\|PID\|e269488 | Unknown [Bacillus subtilis] | 61 | 33 | |
| 49 | 4 | 1567 | 1839 | gnl\|PID\|e139445 | major tail protein [Bacteriophage B1] | 61 | 43 | |
| 56 | 1 | 108 | 641 | gi\|1574067 | H. influenzae predicted coding region | 61 | 35 | |
| | | | | | H11034 [Haemophilus influenzae] | | | |
| 59 | 1 | 1 | 1002 | gi\|763513 | ORF4; putative [Streptomyces | 61 | 37 | |
| | | | | | violaceoruber] | | | |
| 69 | 7 | 4837 | 5523 | gnl\|PID\|e254877 | unknown [Mycobacterium tuberculosis] | 61 | 34 | |
| 72 | 11 | 9262 | 10476 | gi\|1591272 | ferrous iron transport protein B | 61 | 45 | |
| | | | | | [Methanococcus jannaschii] | | | |
| 83 | 2 | 731 | 1549 | gi\|755152 | highly hydrophobic integral membrane | 61 | 41 | |
| | | | | | protein [Bacillus subtilis] | | | |
| | | | | | sp\|P42953\|TAGG_BACSU TEICHOIC ACID | | | |
| | | | | | TRANSLOCATION PERMEASE PROTEIN AGG. | | | |
| 87 | 2 | 2067 | 925 | gi\|1573129 | hypothetical [Haemophilus influenzae] | 61 | 46 | |
| 103 | 5 | 2689 | 3495 | gi\|1685111 | orf1091 [Streptococcus thermophilus] | 61 | 45 | |
| 110 | 13 | 11455 | 11820 | gi\|100182S5 transcriptional repressor SmtB | 61 | 42 | | |
| | | | | | [Synechocystis sp.] | | | |
| 110 | 15 | 14048 | 12588 | gi\|1573583 | H. influenzae predicted coding region | 61 | 38 | |
| | | | | | H10594 [Haemophilus influenzae] | | | |
| 111 | 3 | 1675 | 1055 | gnl\|PID\|e253280 | ORF YDL238c [Saccharomyces cerevisiae] | 61 | 34 | |
| 111 | 4 | 1838 | 2518 | gi\|1574513 | hypothetical [Haemophilus influenzae] | 61 | 50 | |
| 111 | 5 | 2535 | 3158 | gi\|537235 | Kenn Rudd identifies as gpmB [Escherichia | 61 | 40 | |
| | | | | | coli] | | | |
| 121 | 1 | 3 | 1397 | gi\|290643 | ATPase [Enterococcus hirae] | 61 | 50 | |
| 123 | 28 | 25608 | 27734 | gi\|143150 | levR [Bacillus subtilis] | 61 | 39 | |
| 125 | 5 | 3455 | 2589 | gi\|148921 | LicD protein [Haemophilus influenzae] | 61 | 47 | |
| 128 | 14 | 9382 | 9146 | gi\|575361 | protein kinase PkpA [Phycomyces | 61 | 38 | |
| | | | | | blakesleeanus] | | | |
| 138 | 32 | 23151 | 21628 | gi\|1184262 | GadC [Shigella flexneri] | 61 | 34 | |
| 144 | 8 | 6311 | 5325 | gi\|710422 | cmp-binding-factor 1 [Staphylococcus | 61 | 39 | |
| | | | | | aureus] | | | |
| 171 | 4 | 4601 | 5566 | gi\|41500 | ORF 3 (AA 1-352); 38 kD (put. ftsX) | 61 | 31 | |
| | | | | | [Escherichia coli] | | | |
| 172 | 3 | 2006 | 2848 | gi\|303560 | ORF271 [Escherichia coli] | 61 | 42 | |
| 173 | 7 | 5146 | 6228 | gi\|1256134 | YbbE [Bacillus subtilis] | 61 | 31 | |
| 197 | 8 | 9183 | 8182 | gi\|143803 | GerC3 [Bacillus subtilis] | 61 | 33 | |
| 217 | 5 | 3007 | 3462 | gi\|1749414 | unnamed protein product | 61 | 43 | |
| | | | | | [Schizosaccharomyces pombe] | | | |
| 217 | 8 | 6099 | 5464 | gi\|143456 | rpoE protein (ttg start codon) [Bacillus | 61 | 37 | |
| | | | | | subtilis] | | | |
| 222 | 6 | 3400 | 3927 | gnl\|PID\|e255118 | hypothetical protein [Bacillus subtilis] | 61 | 41 | |
| 225 | 3 | 1946 | 981 | gi\|1574660 | xylose operon regluatory protein (xylR) | 61 | 43 | |
| | | | | | [Haemophilus influenzae] | | | |
| 237 | 2 | 203 | 952 | gi\|1019108 | alternate start at bp 59; ORF | 61 | 52 | |
| | | | | | [Bacteriophage phi-80] | | | |
| 237 | 7 | 3058 | 3279 | gnl\|PID\|e246904 | ORF YPL169c [Saccharomyces cerevisiae] | 61 | 32 | |
| 262 | 1 | 20 | 913 | gnl\|PID\|e214719 | PlcR protein [Bacillus thuringiensis] | 61 | 35 | |
| 271 | 17 | 12725 | 13504 | gi\|143057 | ORF39 [Bacillus subtilis] | 61 | 31 | |
| 275 | 8 | 5370 | 3697 | gi\|1542975 | AbcB [Thermoanaerobacterium | 61 | 41 | |
| | | | | | thermosulfurigenes] | | | |
| 280 | 2 | 692 | 3079 | gi\|1001352 | ABC transporter [Synechocystis sp.] | 61 | 42 | |
| 294 | 7 | 2276 | 2767 | gi\|662792 | single-stranded DNA binding protein | 61 | 44 | |
| | | | | | [unidentified eubacterium] | | | |
| 301 | 12 | 9965 | 9519 | gi\|1303861 | YqgN [Bacillus subtilis] | 61 | 41 | |
| 308 | 1 | 1471 | 26 | gi\|1276882 | EpsI [Streptococcus thermophilus] | 61 | 36 | |
| 314 | 2 | 475 | 1662 | gi\|975351 | PatB [Bacillus subtilis] | 61 | 42 | |
| 321 | 9 | 3762 | 4193 | gi\|1732202 | PTS permease for mannose subunit IIIMan N | 61 | 40 | |
| | | | | | terminal domain [Vibrio furnissii] | | | |
| 323 | 5 | 5118 | 5537 | gi\|532540 | ORF7 [Enterococcus faecalis] | 61 | 28 | |
| 324 | 7 | 4800 | 5156 | gi\|146122 | H-protein [Escherichia coli] | 61 | 39 | |
| 338 | 3 | 1456 | 1989 | pir\|A47071\|A47071 | orfi immediately 5′ of nifS - Bacillus | 61 | 43 | |
| | | | | | subtilis | | | |
| 341 | 2 | 342 | 947 | gi\|1736577 | Octopine transport system permease protein | 61 | 41 | |
| | | | | | OccM. [Escherichia coli] | | | |
| 349 | 3 | 1788 | 1363 | pir\|G64143\|G64143 | hypothetical protein HI0143 - Haemophilus | 61 | 38 | |
| | | | | | influenzae (strain Rd KW20) | | | |
| 369 | 2 | 1261 | 587 | gi\|153744 | ORF X; putative [Streptococcus mutans] | 61 | 33 | |
| 371 | 2 | 1801 | 1562 | gi\|48836 | xylulokinase [Staphylococcus xylosus] | 61 | 40 | |
| 372 | 4 | 1575 | 2543 | gi\|149395 | lacC [Lactococcus lactis] | 61 | 43 | |
| 379 | 11 | 12683 | 11727 | gi\|887829 | D21141 uses 2nd start; frame determined by | 61 | 40 | |
| | | | | | Lac fusion [Escherichia oli] | | | |
| 383 | 5 | 5625 | 3820 | gi\|624072 | similar to Escherichia coli | 61 | 36 | |
| | | | | | glycerophosphoryl diester | | | |
| | | | | | hosphodiesterase, Swiss-Prot Accession | | | |
| | | | | | Number p10908 [Paramecium ursaria | | | |
| | | | | | Chlorella virus 1] | | | |
| 395 | 2 | 771 | 517 | gnl\|PID\|e276251 | T23G11.6 [Caenorhabditis elegans] | 61 | 42 | |
| 399 | 20 | 15621 | 15812 | gi\|472527 | protein phosphatase 1 [Schizosaccharomyces | 61 | 44 | |
| | | | | | pombe] | | | |
| 413 | 1 | 3 | 749 | gnl\|PID\|e289144 | ywpE [Bacillus subtilis] | 61 | 42 | |
| 427 | 1 | 1079 | 288 | gi\|403373 | glycerophosphoryl diester | 61 | 42 | |
| | | | | | phosphodiesterase [Bacillus subtilis] | | | |
| | | | | | pir\|S37251\|S37251 glycerophosphoryl | | | |
| | | | | | diester phosphodiesterase - acillus | | | |
| | | | | | subtilis | | | |
| 436 | 4 | 2045 | 1761 | gi\|48669 | pot. ORF B [Shigella sonnei] | 61 | 38 | |
| 437 | 1 | 1158 | 244 | gi\|580866 | ipa-12d gene product [Bacillus subtilis] | 61 | 47 | |
| 482 | 2 | 1676 | 1167 | bbs\|158786 | 4A11 antigen, sperm tail membrane | 61 | 42 | |
| | | | | | antigen=putative sucrose-specific | | | |
| | | | | | phosphotransferase enzyme II homolog | | | |
| | | | | | [mice, testis, Peptide Partial, 172 aa] | | | |
| | | | | | [Mus sp.] | | | |
| 490 | 3 | 1291 | 1094 | gnl\|PID\|e248473 | putative phosphate permease [Arabidopsis | 61 | 35 | |
| | | | | | thaliana] | | | |
| 514 | 1 | 687 | 142 | gi\|1742775 | msm operon regulatory protein. | 61 | 36 | |
| | | | | | [Escherichia coli] | | | |
| 541 | 1 | 758 | 3 | gi\|1591732 | cobalt transport ATP-binding protein 0 | 61 | 39 | |
| | | | | | [Methanococcus jannaschii] | | | |
| 551 | 3 | 2163 | 1600 | gi\|671632 | unknown [Staphylococcus aureus] | 61 | 38 | |
| 603 | 2 | 163 | 564 | gi\|1408587 | relaxase [Lactococcus lactis lactis] | 61 | 39 | |
| 637 | 8 | 4539 | 4769 | gi\|143559 | subtilin [Bacillus subtilis] | 61 | 38 | |
| 765 | 1 | 34 | 681 | gi\|408888 | orfA 5′ of intG [Lactobacillus | 61 | 40 | |
| | | | | | bacteriophage phi adh] pir\|PN0468\|PN0468 | | | |
| | | | | | hypothetical protein 106 - Lactobacillus | | | |
| | | | | | gasseri fragment) | | | |
| 773 | 1 | 53 | 1207 | gi\|143841 | xylose repressor [Bacillus subtilis] | 61 | 36 | |
| 798 | 1 | 175 | 381 | gi\|187572 | located at OATL1 [Homo sapiens] | 61 | 32 | |
| 5 | 2 | 303 | 998 | gi\|1783264 | homologous to DNA glycosylases; | 60 | 50 | |
| | | | | | hypothetical [Bacillus subtilis] | | | |
| 8 | 8 | 5891 | 6550 | gi\|1777939 | Pfs [Treponema pallidum] | 60 | 40 | |
| 11 | 7 | 4096 | 4935 | gi\|147404 | mannose permease subunit II-M-Man | 60 | 41 | |
| | | | | | [Escherichia coli] | | | |
| 11 | 8 | 4919 | 5254 | gi\|467125 | glmS; L-Glucosamine:D-fructose-6-Phosphate | 60 | 30 | |
| | | | | | aminotransferase; 229_C3_238 | | | |
| | | | | | [Mycobacterium leprae] | | | |
| 17 | 9 | 7736 | 8203 | gi\|496514 | orf zeta [Streptococcus pyogenes] | 60 | 42 | |
| 20 | 1 | 3 | 443 | gi\|861137 | chitin binding protein [Streptomyces | 60 | 40 | |
| | | | | | olivaceoviridis] pir\|S55001\|S55001 CHB1 | | | |
| | | | | | protein - Streptomyces olivaceoviridis | | | |
| | | | | | {SUB −30} | | | |
| 21 | 3 | 1970 | 684 | gi\|1778520 | hypothetical protein [Escherichia coli] | 60 | 43 | |
| 23 | 11 | 5357 | 5953 | gi\|619066 | NAST [Azotobacter vinelandii] | 60 | 31 | |
| 34 | 4 | 6662 | 3279 | gi\|153952 | polymerase III polymerase subunit (dnaE) | 60 | 37 | |
| | | | | | [Salmonella typhimurium] | pir\|A45915\|A45915 | | |
| | | | | | DNA-directed DNA polymerase (EC 2.7.7.7) | | | |
| | | | | | III lpha chain - Salmonella typhimurium | | | |
| 39 | 1 | 47 | 466 | gi\|1561567 | Unknown [Bacillus subtilis] | 60 | 35 | |
| 39 | 4 | 1855 | 1361 | gi\|298045 | Orf154 [Streptomyces ambofaciens] | 60 | 41 | |
| 48 | 4 | 2554 | 4128 | gi\|1255259 | o-succinylbenzoic acid (OSB) CoA ligase | 60 | 40 | |
| | | | | | [Staphylococcus aureus] | | | |
| 56 | 9 | 6682 | 5795 | gi\|413940 | ipa-16d gene product [Bacillus subtilis] | 60 | 40 | |
| 65 | 3 | 2105 | 2593 | gi\|1573061 | hypothetical [Haemophilus influenzae] | 60 | 34 | |
| 72 | 9 | 7854 | 8330 | gi\|606343 | CG Site No. 28964 [Escherichia coli] | 60 | 39 | |
| 81 | 3 | 2053 | 1406 | gi\|1574770 | phenylalanyl-tRNA synthetase beta-subunit | 60 | 46 | |
| | | | | | (pheT) [Haemophilus influenzae] | | | |
| 81 | 4 | 2987 | 2130 | gi\|147404 | mannose permease subunit II-M-Man | 60 | 34 | |
| | | | | | [Escherichia coli] | | | |
| 81 | 12 | 8280 | 7150 | gnl\|PID\|e254984 | hypothetical protein [Bacillus subtilis] | 60 | 44 | |
| 83 | 22 | 16887 | 16537 | gi\|509672 | repressor protein [Bacteriophage Tuc2009] | 60 | 33 | |
| 89 | 1 | 698 | 60 | gi\|840838 | hypothetical 21.7 kDa protein in ftsY 5′ | 60 | 36 | |
| | | | | | region [Pseudomonas eruginosa] | | | |
| 89 | 12 | 12641 | 11856 | gi\|1377843 | unknown [Bacillus subtilis] | 60 | 40 | |
| 89 | 17 | 18879 | 15844 | gi\|666069 | orf2 gene product [Lactobacillus | 60 | 37 | |
| | | | | | leichmannii] | | | |
| 94 | 6 | 2281 | 3384 | gi\|468760 | ORF334 [Rhizobium meliloti] | 60 | 36 | |
| 98 | 1 | 12 | 1970 | gi\|1652892 | ABC transporter [Synechocystis sp.] | 60 | 38 | |
| 99 | 3 | 978 | 1460 | gi\|473955 | DNA-binding protein [Lactobacillus sp.] | 60 | 31 | |
| 100 | 35 | 26818 | 26333 | gi\|347851 | junctional sarcoplasmic reticulum | 60 | 48 | |
| | | | | | glycoprotein [Oryctolagus uniculus] | | | |
| 100 | 45 | 30072 | 30449 | gi\|143547 | Sin regulatory protein (ttg start codon) | 60 | 43 | |
| | | | | | [Bacillus subtilis] gi\|1303886 SinR | | | |
| | | | | | [Baciilus subtilis] | | | |
| 102 | 8 | 5923 | 6561 | gi\|1633572 | Herpesvirus saimiri ORF73 homolog | 60 | 25 | |
| | | | | | [Kaposi's sarcoma-associated herpes-like | | | |
| | | | | | virus] | | | |
| 109 | 1 | 362 | 3 | pir\|S10655\|S10655 | hypothetical protein X - Pyrococcus woesei | 60 | 33 | |
| | | | | | (fragment) | | | |
| 110 | 16 | 14806 | 14087 | pir\|JH0364\|JH0364 | hypothetical protein 176 (SAGP 5′ region) | 60 | 35 | |
| | | | | | - Streptococcus pyogenes | | | |
| 110 | 20 | 18929 | 18414 | gi\|142450 | ahrC protein [Bacillus subtilis] | 60 | 39 | |
| 110 | 21 | 19124 | 19624 | gi\|142450 | ahrC protein [Bacillus subtilis] | 60 | 40 | |
| 111 | 1 | 289 | 2 | gi\|1256618 | transport protein [Bacillus subtilis] | 60 | 31 | |
| 122 | 7 | 5627 | 9589 | gi\|217191 | 5′-nucleotidase precursor [Vibrio | 60 | 39 | |
| | | | | | parahaemolyticus] | | | |
| 123 | 5 | 4390 | 3659 | gi\|1197667 | vitellogenin [Anolis pulchellus] | 60 | 27 | |
| 123 | 20 | 18102 | 18407 | gi\|1303705 | YrkF [Bacillus subtilis] | 60 | 34 | |
| 128 | 32 | 26229 | 25492 | gi\|1652485 | hypothetical protein [Synechocystis sp.] | 60 | 29 | |
| 129 | 5 | 4421 | 6259 | gi\|1303853 | YggF [Bacillus subtilis] | 60 | 36 | |
| 131 | 2 | 1112 | 2338 | gi\|699112 | ugpC gene product [Mycobacterium leprae] | 60 | 41 | |
| 131 | 4 | 3194 | 4036 | gi\|296356 | putative membrane transport protein | 60 | 32 | |
| | | | | | [Clostridium perfringens] | | | |
| | | | | | pir\|A56641\|A56641 probable membrane | | | |
| | | | | | transport protein - Clostridium erfringens | | | |
| 131 | 8 | 6669 | 7901 | gi\|537054 | 2′,3′-cyclic-nucleotide 2′- | 60 | 40 | |
| | | | | | phosphodiesterase [Escherichia coli] | | | |
| | | | | | pir\|S56438\|s56438 2′,3′-cyclic-nucleotide | | | |
| | | | | | 2-phosphodiesterase (EC .1.4.16) - | | | |
| | | | | | Escherichia coli | | | |
| 133 | 11 | 9854 | 10240 | gnl\|PID\|e249654 | YneR [Bacillus subtilis] | 60 | 37 | |
| 138 | 7 | 6793 | 6263 | gi\|1486247 | unknown [Bacillus subtilis] | 60 | 48 | |
| 146 | 4 | 2831 | 2328 | gi\|39979 | P18 [Bacillus subtilis] | 60 | 38 | |
| 149 | 6 | 3504 | 3316 | gi\|145173 | 35 kDa protein [Escherichia coli] | 60 | 47 | |
| 154 | 5 | 2599 | 3558 | gi\|1773109 | similar to S. typhimurium apbA | 60 | 41 | |
| | | | | | [Escherichia coli] | | | |
| 155 | 5 | 3061 | 4701 | gi\|388269 | traC [Plasmid pAD1] | 60 | 38 | |
| 155 | 11 | 8565 | 8927 | gi\|1197460 | MtfB [Escherichia coli] | 60 | 39 | |
| 158 | 10 | 11123 | 10032 | gi\|581809 | tmbC gene product [Treponema pallidum] | 60 | 39 | |
| 165 | 7 | 6131 | 5700 | gi\|1439527 | EIIA-man [Lactobacillus curvatus] | 60 | 35 | |
| 172 | 4 | 3169 | 3810 | gi\|1001342 | hypothetical protein [Synechocystis sp.] | 60 | 42 | |
| 174 | 2 | 1574 | 762 | gi\|1045808 | hypothetical protein (GB:U00021_19) | 60 | 35 | |
| | | | | | [Mycoplasma genitalium] | | | |
| 181 | 7 | 4975 | 4460 | gi\|683584 | shikimate kinase [Lactococcus lactis] | 60 | 33 | |
| 183 | 6 | 2719 | 2955 | gi\|1146198 | ferredoxin [Bacillus subtilis] | 60 | 37 | |
| 189 | 2 | 3528 | 2221 | gi\|396301 | matches PS00041: Bacterial regulatory | 60 | 35 | |
| | | | | | proteins, araC family ignature | | | |
| | | | | | [Escherichia coli] | | | |
| 193 | 5 | 3121 | 2600 | gi\|39788 | adaB [Bacillus subtilis] | 60 | 49 | |
| 195 | 11 | 4623 | 6569 | gnl\|PID\|e250887 | potential coding region [Clostridium | 60 | 39 | |
| | | | | | difficile] | | | |
| 202 | 2 | 1837 | 1607 | gi\|693939 | membrane ATPase [Haloferax volcanii] | 60 | 32 | |
| 206 | 7 | 4794 | 3754 | gi\|1574702 | hypothetical [Haemophilus influenzae] | 60 | 42 | |
| 209 | 2 | 1308 | 433 | pir\|A38587\|A38587 | collagen, corneal - chicken (fragment) | 60 | 51 | |
| 220 | 3 | 4263 | 1213 | gi\|437706 | alternative truncated translation product | 60 | 41 | |
| | | | | | from E.coli [Streptococcus neumoniae] | | | |
| 222 | 9 | 6019 | 6522 | gi\|882463 | protein-N(pi)-phosphohistidine-sugar | 60 | 47 | |
| | | | | | phosphotransferase [Escherichia oli] | | | |
| 222 | 12 | 8001 | 8336 | gi\|537035 | ORF_o101 [Escherichia coli] | 60 | 33 | |
| 233 | 2 | 1294 | 827 | gi\|145091 | flavodoxin [Desulfovibrio salexigens] | 60 | 39 | |
| 242 | 11 | 7370 | 7627 | gi\|1353404 | cytochrome oxidase subunit I [Metridium | 60 | 28 | |
| | | | | | senile] | | | |
| 249 | 3 | 1109 | 1768 | gi\|143156 | membrane bound protein [Bacillus subtilis] | 60 | 41 | |
| 251 | 3 | 4053 | 1933 | gi\|1235662 | RfbC [Myxococcus xanthus] | 60 | 42 | |
| 256 | 4 | 2614 | 3867 | gi\|532612 | ecotropic retrovirus receptor [Mus | 60 | 37 | |
| | | | | | musculus] | | | |
| 260 | 2 | 1539 | 802 | gi\|1208447 | metahloprotease transporter [Serratia | 60 | 35 | |
| | | | | | marcescens] | | | |
| 261 | 5 | 4528 | 3179 | gnl\|PID\|e246728 | histidine kinase [Streptococcus gordonii] | 60 | 25 | |
| 269 | 3 | 2723 | 1563 | gi\|1591618 | M. jannaschii predicted coding region | 60 | 39 | |
| | | | | | MJ0951 [Methanococcus jannaschii] | | | |
| 269 | 4 | 3541 | 2780 | gi\|1303794 | YgeM [Bacillus subtilis] | 60 | 36 | |
| 269 | 11 | 7164 | 6595 | gi\|1303787 | YgeG [Bacillus subtilis] | 60 | 38 | |
| 271 | 2 | 677 | 1651 | gnl\|PID\|e269877 | riboflavin kinase [Bacillus subtilis] | 60 | 43 | |
| 271 | 3 | 1639 | 2247 | gi\|537148 | ORF_f181 [Escherichia coli] | 60 | 41 | |
| 271 | 18 | 13502 | 13762 | pir\|S3934\|S39341 | grpE protein - Lactococcus lactis | 60 | 40 | |
| 277 | 2 | 1662 | 979 | gi\|1773109 | similar to S. typhimurium apbA | 60 | 41 | |
| | | | | | [Escherichia coli] | | | |
| 279 | 13 | 10627 | 9773 | gi\|290545 | f270 [Escherichia coli] | 60 | 41 | |
| 290 | 2 | 790 | 1695 | gi\|152886 | elongation factor Ts (tsf) [Spiroplasma | 60 | 38 | |
| | | | | | citri] | | | |
| 291 | 4 | 3571 | 2612 | gnl\|PID\|e257610 | sugar-binding transport protein | 60 | 40 | |
| | | | | | [Anaerocellum thermophilum] | | | |
| 295 | 3 | 1309 | 2094 | gi\|1000453 | TreR [Bacillus subtilis] | 60 | 37 | |
| 301 | 15 | 11063 | 11344 | gi\|535274 | ORF1 [Streptococcus thermophilus] | 60 | 36 | |
| 310 | 3 | 2903 | 1266 | gi\|809765 | aspartate aminotransferase (AA 1-402) | 60 | 44 | |
| | | | | | [Sulfolobus solfataricus] | | | |
| | | | | | pir\|S07088\|S07088 aspartate transaminase | | | |
| | | | | | (EC 2.6.1.1) - Sulfolobus olfataricus | | | |
| 316 | 2 | 319 | 119 | bbs\|115298 | polyprotein(coat protein) [raspberry | 60 | 28 | |
| | | | | | ringspot virus RRV, Peptide, 1107 aa] | | | |
| | | | | | [Raspberry ringspot virus] | | | |
| 320 | 4 | 3085 | 2483 | gi\|143002 | proton glutamate symnport protein [Bacillus | 60 | 26 | |
| | | | | | caldotenax] pir\|S26246\|S26246 | | | |
| | | | | | glutamate/aspartate transport protein - | | | |
| | | | | | Bacillus aldotenax | | | |
| 323 | 1 | 1 | 681 | gi\|1477486 | transposase [Burkholderia cepacia] | 60 | 44 | |
| 330 | 4 | 3361 | 4488 | gi\|1778517 | glycerol dehydrogenase homolog | 60 | 48 | |
| | | | | | [Escherichia coli] | | | |
| 356 | 3 | 2471 | 2205 | gi\|57633 | neuronal myosin heavy chain [Rattus | 60 | 40 | |
| | | | | | rattus] | | | |
| 362 | 5 | 2458 | 2925 | gnl\|PID\|e255090 | hypothetical protein [Bacillus subtilis] | 60 | 36 | |
| 364 | 4 | 4096 | 5349 | gi\|1657522 | hypothetical protein [Escherichia coli] | 60 | 41 | |
| 383 | 1 | 654 | 4 | gn\|PID\|e288399 | F56H6.k [Caenorhabditis elegans] | 60 | 39 | |
| 383 | 2 | 2208 | 853 | gi\|143536 | sigma factor 54 [Bacillus subtilis] | 60 | 37 | |
| 386 | 2 | 130 | 510 | gi\|1046053 | hypothetical protein (SP:P32049) | 60 | 42 | |
| | | | | | [Mycoplasma genitalium] | | | |
| 399 | 26 | 25892 | 27757 | gi\|895747 | putative cel operon regulator [Bacillus | 60 | 30 | |
| | | | | | subtilis] | | | |
| 399 | 27 | 27721 | 28239 | gi\|146281 | gut operon activator (gutM) [Escherichia | 60 | 35 | |
| | | | | | coli] | | | |
| 401 | 4 | 2081 | 3523 | gi\|142833 | ORF2 [Bacillus subtilis] | 60 | 36 | |
| 405 | 2 | 1353 | 763 | gi\|633113 | ORF3 [Streptococcus sobrinus] | 60 | 42 | |
| 407 | 7 | 4380 | 4589 | gi\|1674126 | (AE000043) Mycoplasma pneumoniae, MG280 | 60 | 39 | |
| | | | | | homolog, from M. genitalium [Mycoplasma | | | |
| | | | | | pneumoniae] | | | |
| 408 | 1 | 12 | 539 | gi\|455006 | orf6 [Rhodococcus fascians] | 60 | 42 | |
| 421 | 7 | 4113 | 3925 | gi\|60020 | ORF31 (AA1-868) [Human herpesvirus 3] | 60 | 43 | |
| 452 | 3 | 712 | 2223 | gi\|532554 | ORF21 [Enterococcus faecalis] | 60 | 38 | |
| 462 | 3 | 2066 | 1551 | gi\|1015903 | ORE YJR151c [Sacoharomyces cerevisiae] | 60 | 37 | |
| 480 | 1 | 12 | 272 | gi\|468715 | sss gene product [Pseudomonas aeruginosa] | 60 | 34 | |
| 487 | 1 | 1091 | 3 | gi\|388269 | traC [Plasmid pAD1] | 60 | 39 | |
| 490 | 5 | 2108 | 1479 | gi\|699379 | glvr-1 protein [Mycobacterium leprae] | 60 | 29 | |
| 507 | 1 | 221 | 751 | gi\|1303952 | YqjA [Bacillus subtilis] | 60 | 37 | |
| 511 | 1 | 449 | 63 | gi\|391610 | farnesyl diphosphate synthase [Bacillus | 60 | 42 | |
| | | | | | stearothermophilus] pir\|JX0257\|JX0257 | | | |
| | | | | | geranyltranstransferase (EC 2.5.1.10) - | | | |
| | | | | | Bacillus tearothermophilus | | | |
| 551 | 2 | 1521 | 604 | gi\|1256648 | putative [Bacillus subtilis] | 60 | 37 | |
| 552 | 1 | 887 | 63 | gi\|537235 | Kenn Rudd identifies as gpmB [Escherichia | 60 | 40 | |
| | | | | | coli] | | | |
| 610 | 1 | 1 | 792 | gi\|1321625 | exo-alpha-1, 4-glucosidase [Bacillus | 60 | 45 | |
| | | | | | stearothermophilus] | | | |
| 642 | 1 | 402 | 214 | gi\|992964 | thioredoxin [Arabidopsis thaliana] | 60 | 36 | |
| 646 | 1 | 642 | 265 | gi\|1041115 | TRAC [Plasmid pPD1] | 60 | 32 | |
| 661 | 2 | 305 | 943 | gi\|1651536 | 3-oxoacyl-[acyl-carrier-protein] reductase | 60 | 37 | |
| | | | | | [Escherichia coli] | | | |
| 678 | 1 | 536 | 3 | gi\|532554 | ORF21 [Enterococcus faecalis] | 60 | 39 | |
| 716 | 1 | 799 | 305 | gi\|886040 | ORFtxel [Clostridium difficile] | 60 | 38 | |
| 717 | 1 | 2 | 472 | gi\|1402529 | ORF8 [Enterococcus faecalis] | 60 | 31 | |
| 727 | 1 | 516 | 82 | gi\|471283 | ORF [Synechococcus PCC6301] | 60 | 41 | |
| 770 | 1 | 327 | 4 | gi\|467451 | unknown [Bacillus subtilis] | 60 | 33 | |
| 843 | 1 | 234 | 4 | gi\|2819 | transferase (GAL10) (AA 1 - 687) | 60 | 37 | |
| | | | | | [Kluyveromyces lactis] r\|S01407\|XUVKG | | | |
| | | | | | UDPglucose 4-epimerase (EC 5.1.3.2) - | | | |
| | | | | | yeast uyveromyces marxianus var. lactis) | | | |
| 21 | 1 | 341 | 3 | gi\|1778519 | hypothetical protein [Escherichia coli] | 59 | 47 | |
| 23 | 2 | 290 | 1303 | gi\|1407800 | ABC-type permease [Yersinia pestis] | 59 | 36 | |
| 23 | 13 | 6720 | 7388 | gi\|1652472 | ethylene response sensor protein | 59 | 37 | |
| | | | | | [Synechocystis sp.] | | | |
| 23 | 18 | 11892 | 12413 | gi\|825627 | malor carboxysome shell protein | 59 | 42 | |
| | | | | | [Thiobacillus neapolitanus] | | | |
| | | | | | pir\|S60136\|S60136 malor carboxysome shell | | | |
| | | | | | protein - Thiobacillus eapolitanus | | | |
| 29 | 4 | 1989 | 2852 | gi\|1742383 | ORF_D:o276#3; similar to [PIR Accession | 59 | 48 | |
| | | | | | Number S11432] [Escherichia coli] | | | |
| 32 | 8 | 4504 | 4064 | gi\|1046081 | hypothetical protein (GB:D26185_10) | 59 | 33 | |
| | | | | | [Mycoplasma genitalium] | | | |
| 37 | 9 | 6670 | 6284 | gi\|290561 | o188 [Escherichia coli] | 59 | 44 | |
| 47 | 1 | 2 | 2743 | gnl\|PID\|e248792 | unknown [Mycobacterium tuberculosis] | 59 | 46 | |
| 48 | 5 | 4017 | 5492 | gi\|1185288 | isochorismate synthase [Bacillus subtilis] | 59 | 40 | |
| 49 | 5 | 1797 | 2093 | gi\|496280 | structural protein [Bacteriophage Tuc2009] | 59 | 41 | |
| 59 | 8 | 3324 | 5057 | gi\|1486244 | unknown \|Bacillus subtilis] | 59 | 35 | |
| 72 | 14 | 13937 | 13434 | gi\|532540 | ORF7 [Enterococcus faecalis] | 59 | 25 | |
| 81 | 20 | 14659 | 14219 | gi\|39978 | P16 [Bacillus subtilis] | 59 | 38 | |
| 98 | 2 | 1961 | 2617 | gi\|41519 | P30 protein (AA 1-240) [Escherichia coli] | 59 | 39 | |
| 102 | 3 | 2542 | 3774 | gi\|1674376 | (AE000062) Mycoplasma pneumoniae, MG148 | 59 | 30 | |
| | | | | | homolog, from M. genitalium [Mycoplasma | | | |
| | | | | | pneumoniae] | | | |
| 116 | 2 | 907 | 1458 | gi\|1146225 | putative [Bacillus subtilis] | 59 | 37 | |
| 116 | 7 | 3532 | 4842 | gi\|1146238 | poly(A) polymerase [Bacillus subtilis] | 59 | 41 | |
| 128 | 20 | 15626 | 14310 | gi\|1001719 | ATP-dependent RNA helicase DeaD | 59 | 34 | |
| | | | | | [Synechocystis sp.] | | | |
| 134 | 4 | 3158 | 3850 | gi\|1477486 | transposase [Burkholderia cepacia] | 59 | 40 | |
| 137 | 1 | 1 | 999 | gi\|1065948 | similar to thymidine diphosphoglucose 4,6- | 59 | 40 | |
| | | | | | dehydratase [Caenorhabditis elegans] | | | |
| 138 | 8 | 7489 | 6827 | gnl\|PID\|e264435 | Putative orf YCLX8c, len:192 | 59 | 36 | |
| | | | | | [Saccharomyces cerevisiae] | | | |
| 140 | 1 | 3 | 656 | gnl\|PID\|e254943 | unknown [Mycobacterium tuberculosis] | 59 | 32 | |
| 165 | 13 | 10427 | 9849 | gi\|1732199 | PTS permease for mannose subunit IIIMan C | 59 | 37 | |
| | | | | | terminal domain [Vibrio furnissii] | | | |
| 167 | 1 | 2 | 1045 | gi\|1573128 | hypothetical [Haemophilus influenzae] | 59 | 38 | |
| 173 | 2 | 430 | 2160 | gi\|1486244 | unknown [Bacillus subtilis] | 59 | 31 | |
| 179 | 10 | 10432 | 11199 | gi\|288299 | ORF1 gene product [Bacillus megaterium] | 59 | 34 | |
| 179 | 12 | 12117 | 13148 | gi\|1045964 | hypothetical protein (GB:U14003_297) | 59 | 41 | |
| | | | | | [Mycoplasma genitalium] | | | |
| 181 | 11 | 9684 | 8575 | gi\|1653152 | 3-dehydroquinate synthase [Synechocystis | 59 | 41 | |
| | | | | | sp.] | | | |
| 223 | 24 | 20736 | 21974 | gi\|1573051 | succinyl-diaminopimelate desuccinylase | 59 | 48 | |
| | | | | | (dapE) [Haemophilus influenzae] | | | |
| 229 | 12 | 12818 | 11421 | gi\|1652035 | fmu and fmv protein [Synechocystis sp.] | 59 | 39 | |
| 244 | 3 | 2836 | 1565 | gi\|1303959 | YqjH [Bacillus subtilis] | 59 | 45 | |
| 265 | 9 | 4116 | 3868 | gi\|311100 | translational activator [Saccharomyces | 59 | 28 | |
| | | | | | cerevisiae] | | | |
| 272 | 1 | 1 | 546 | gi\|490320 | Y gene product [unidentified] | 59 | 41 | |
| 279 | 16 | 14774 | 14370 | gi\|1389549 | ORF3 [Bacillus subtilis] | 59 | 46 | |
| 283 | 8 | 3222 | 3401 | gi\|153047 | lysostaphin (ttg start codon) | 59 | 43 | |
| | | | | | [Staphylococcus simulans] | | | |
| | | | | | pir\|A25881\|A25881 lysostaphin precursor - | | | |
| | | | | | Staphylococcus simulans | | | |
| | | | | | sp\|P10547\|LSTP_STASI LYSOSTAPHIN PRECURSOR | | | |
| | | | | | (EC 3.5.1.-). | | | |
| 288 | 5 | 2617 | 3144 | gi\|1142714 | phosphoenolpyruvate:mannose | 59 | 45 | |
| | | | | | phosphotransferase element IIB | | | |
| | | | | | [Lactobacillus curvatus] | | | |
| 292 | 19 | 14837 | 16792 | gi\|495646 | ATPase [Transposon Tn5422] | 59 | 40 | |
| 295 | 1 | 49 | 495 | gi\|533098 | DnaD protein [Bacillus subtilis] | 59 | 39 | |
| 315 | 2 | 907 | 653 | gi\|1574802 | hypothetical [Haemophilus influenzae\| | 59 | 38 | |
| 318 | 6 | 4549 | 4058 | gi\|43941 | EIII-B Sor PTS [Klebsiella pneumoniae] | 59 | 35 | |
| 345 | 3 | 2707 | 3507 | gi\|895749 | putative cellobiose phosphotransferase | 59 | 38 | |
| | | | | | enzyme II″ [Bacillus ubtilis] | | | |
| 351 | 5 | 2646 | 2371 | gi\|1666506 | RfbC [Leptospira interrogans] | 59 | 30 | |
| 355 | 21 | 15237 | 17222 | gi\|515738 | ORF2; putative [Oenococcus oeni] | 59 | 35 | |
| 384 | 1 | 14 | 754 | gi\|1162959 | homologous to HI0365 in Haemophilus | 59 | 34 | |
| | | | | | influenzae; ORF1 [Pseudomonas aeruginosa] | | | |
| 385 | 1 | 3 | 533 | gi\|1146197 | utative [Bacillus subtilis] | 59 | 36 | |
| 394 | 13 | 13137 | 12160 | gnl\|PID\|e243582 | ORF YGR263c [Saccharomyces cerevisiae] | 59 | 36 | |
| 399 | 1 | 224 | 580 | gi\|580904 | homologous to E.coli rnpA [Bacillus | 59 | 38 | |
| | | | | | subtilis] | | | |
| 412 | 1 | 3 | 2927 | gi\|1620648 | surface protein Rib [Streptococcus | 59 | 43 | |
| | | | | | agalactiae] | | | |
| 412 | 2 | 2918 | 3559 | gi\|1620648 | surface protein Rib [Streptococcus | 59 | 43 | |
| | | | | | agalactiae] | | | |
| 416 | 6 | 5283 | 3940 | gi\|1100076 | PTS-dependent enzyme II [Clostridium | 59 | 38 | |
| | | | | | longisporum] | | | |
| 437 | 2 | 1561 | 1136 | gi\|580866 | ipa-12d gene product [Bacillus subtilis] | 59 | 44 | |
| 495 | 2 | 438 | 614 | gi\|1500472 | M. jannaschii predicted coding region | 59 | 45 | |
| | | | | | MJ1577 [Methanococcus jannaschii] | | | |
| 502 | 1 | 853 | 188 | gi\|1063248 | No homologous protein [Bacillus subtilis] | 59 | 25 | |
| 573 | 8 | 5092 | 4493 | gi\|1573226 | hypothetical [Haemophilus influenzae] | 59 | 39 | |
| 579 | 4 | 1716 | 2717 | gnl\|PID\|e280724 | unknown [Mycobacterium tuberculosis] | 59 | 41 | |
| 600 | 1 | 1 | 504 | gi\|49386 | internal region of the penicillin-binding | 59 | 40 | |
| | | | | | protein 2B gene treptococcus pneumoniae] | | | |
| 616 | 3 | 904 | 533 | gi\|289265 | [Bacillus sp. (KSM 64) endo-1,4-beta- | 59 | 44 | |
| | | | | | glucanase gene, complete cds.], ene | | | |
| | | | | | products [Bacillus sp.] | | | |
| 657 | 1 | 432 | 4 | gi\|1651338 | PnuC protein [Escherichia coli] | 59 | 37 | |
| 699 | 1 | 416 | 165 | gnl\|PID\|e199096 | PepR1 [Lactobacillus deibrueckii] | 59 | 23 | |
| 713 | 4 | 3709 | 2660 | gi\|515738 | ORF2; putative [Oenococcus oeni] | 59 | 37 | |
| 715 | 1 | 698 | 84 | gi\|1176399 | EpiF [Staphylococcus epidermidis] | 59 | 42 | |
| 737 | 2 | 660 | 199 | gi\|666000 | hypothetical protein [Bacillus subtilis] | 59 | 43 | |
| 744 | 1 | 395 | 3 | gi\|1732057 | MUC.CL-1 [Trypanosoma cruzi] | 59 | 45 | |
| 746 | 1 | 3 | 554 | gi\|141858 | replication-associated protein [Plasmid | 59 | 36 | |
| | | | | | pAD1] | | | |
| 869 | 1 | 2 | 250 | gi\|1432153 | cellobiose-specific PTS permease | 59 | 40 | |
| | | | | | [Klebsiella oxytoca] | | | |
| 4 | 8 | 6948 | 6067 | gi\|147516 | ribokinase [Escherichia coli] | 58 | 42 | |
| 11 | 6 | 3312 | 4121 | gi\|1732200 | PTS permease for mannose subunit IIPMan | 58 | 35 | |
| | | | | [Vibrio furnissii] | | | | |
| 16 | 9 | 7684 | 6932 | gnl\|PID\|e233879 | hypothetical protein [Bacillus subtilis] | 58 | 48 | |
| 23 | 14 | 7440 | 8903 | gi\|142940 | ftsA [Bacillus subtilis] | 58 | 39 | |
| 30 | 2 | 570 | 1283 | gi\|1644202 | unknown [Bacillus subtilis] | 58 | 37 | |
| 48 | 7 | 7186 | 8037 | gi\|1573247 | hypothetical [Haemophilus influenzae] | 58 | 35 | |
| 49 | 7 | 2395 | 2871 | gnl\|PID\|e210884 | c2 gene product [Bacteriophage B1] | 58 | 34 | |
| 54 | 1 | 1014 | 91 | gi\|46645 | ORF (rlx) [Staphylococcus aureus] | 58 | 46 | |
| 55 | 3 | 1221 | 511 | gi\|726443 | No definition line found [Caenorhabditis | 58 | 41 | |
| | | | | | elegans] | | | |
| 58 | 1 | 1904 | 696 | gi\|1591564 | molybdenum cofactor biosynthesis moeA | 58 | 39 | |
| | | | | | protein [Methanococcus jannaschii] | | | |
| 58 | 8 | 7238 | 6996 | gi\|1279769 | FdhC [Methanobacterium thermoformicicum] | 58 | 54 | |
| 72 | 12 | 12117 | 10897 | gi\|763052 | integrase [Bacteriophage T270] | 58 | 37 | |
| 77 | 2 | 1155 | 1910 | gi\|1245464 | YfeA [Yersinia pestis] | 58 | 34 | |
| 78 | 1 | 2589 | 49 | gi\|40663 | sialidase [Clostridium septicum] | 58 | 40 | |
| 88 | 9 | 5854 | 6528 | gi\|1619623 | hemin binding protein [Yersinia | 58 | 37 | |
| | | | | | enterocolitica] | | | |
| 93 | 6 | 2639 | 2863 | gi\|405133 | putative [Bacillus subtilis] | 58 | 33 | |
| 98 | 13 | 13523 | 12432 | gi\|147329 | transport protein [Escherichia coli] | 58 | 41 | |
| 100 | 12 | 8550 | 8224 | gi\|1736642 | Invasin. [Escherichia coli] | 58 | 47 | |
| 102 | 7 | 5688 | 5969 | gi\|808869 | human gcp372 [Homo sapiens] | 58 | 30 | |
| 105 | 5 | 3716 | 4501 | gi\|143729 | transcription activator [Bacillus | 58 | 40 | |
| | | | | | subtilis] | | | |
| 107 | 1 | 511 | 2 | gi\|1303827 | YqfI [Bacillus subtilis] | 58 | 34 | |
| 108 | 2 | 1040 | 1732 | gi\|1592142 | ABC transporter, probable ATP-binding | 58 | 37 | |
| | | | | | subunit [Methanococcus jannaschii] | | | |
| 114 | 6 | 7608 | 8444 | gi\|152719 | flavocytochrome c [Shewanella | 58 | 40 | |
| | | | | | putrefaciens] | | | |
| 117 | 14 | 11813 | 11115 | gi\|1575577 | DNA-binding response regulator [Thermotoga | 58 | 42 | |
| | | | | | maritima] | | | |
| 122 | 1 | 1 | 936 | gi\|393269 | adhesion protein [Streptococcus | 58 | 38 | |
| | | | | | pneumoniae] | | | |
| 123 | 23 | 20379 | 21617 | gi\|1653948 | hypothetical protein [Synechocystis sp.] | 58 | 38 | |
| 133 | 8 | 7362 | 8480 | gi\|143498 | degS protein [Bacillus subtilis] | 58 | 38 | |
| 133 | 9 | 8437 | 9087 | gi\|143089 | iep protein [Bacillus subtilis] | 58 | 31 | |
| 138 | 3 | 3551 | 2898 | gi\|216114 | DNA polymerase [Bacteriophage SPO1] | 58 | 41 | |
| 138 | 5 | 5819 | 5049 | gnl\|PID\|e289148 | highly similar to phosphotransferase | 58 | 38 | |
| | | | | | system regulator [Bacillus subtilis] | | | |
| 138 | 17 | 11419 | 10379 | gi\|1674137 | (A5000044) Mycoplasma pneumnoniae, lipoate | 58 | 37 | |
| | | | | | protein ligase; similar to Swiss-Prot | | | |
| | | | | | Accession Number P32099, from E. coli | | | |
| | | | | | [Mycoplasma pneumnoniae] | | | |
| 139 | 8 | 5002 | 4808 | gi\|153607 | dpnD gene product [Streptococcus | 58 | 43 | |
| | | | | | pneumoniae] | | | |
| 146 | 9 | 7817 | 6627 | gi\|606076 | ORF_o384 [Escherichia coli] | 58 | 43 | |
| 150 | 10 | 7529 | 7894 | gi\|141852 | sialidase [Actinomyces viscosus] | 58 | 28 | |
| 152 | 10 | 5717 | 6637 | gi\|296356 | putative membrane transport protein | 58 | 36 | |
| | | | | | [Clostridium perfringens] | | | |
| | | | | | pir\|A56641\|A56641 probable membrane | | | |
| | | | | | transport protein - Clostridium erfringens | | | |
| 162 | 10 | 11009 | 11185 | gi\|42655 | pi protein [Escherichia coli] | 58 | 37 | |
| 164 | 3 | 1793 | 1608 | gi\|881499 | parathion hydrolase (phosphotriesterase)- | 58 | 41 | |
| | | | | | related protein [Mus usculus] | | | |
| 165 | 6 | 5640 | 4975 | gi\|1146190 | 2-keto-3-deoxy-6-phosphogluconate aldolase | 58 | 39 | |
| | | | | | [Bacillus subtilis] | | | |
| 165 | 10 | 9038 | 8199 | gi\|606080 | ORF_290; Geneplot suggests frameshift | 58 | 35 | |
| | | | | | linking to o267, not found Escherichia | | | |
| | | | | | coli] | | | |
| 168 | 1 | 1 | 657 | gi\|413930 | ipa-6d gene product [Bacillus subtilis] | 58 | 41 | |
| 170 | 1 | 923 | 234 | gi\|1573505 | hypothetical [Haemophilus influenzae] | 58 | 30 | |
| 176 | 1 | 1 | 1101 | gi\|1652379 | cation-transporting P-ATPase | 58 | 30 | |
| | | | | | [Synechocystis sp.] | | | |
| 180 | 12 | 10237 | 10410 | gi\|408123 | V-ATPase 14kD subunit peptide [Drosophila | 58 | 33 | |
| | | | | | melanogaster]pir\|S38436\|S38436 H+- | | | |
| | | | | | transporting ATPase (EC 3.6.1.35) 14K | | | |
| | | | | | chain - ruit fly (Drosophila melanogaster) | | | |
| 193 | 3 | 2077 | 1388 | gi\|1256633 | putative [Bacillus subtilis] | 58 | 39 | |
| 193 | 4 | 2602 | 2075 | gi\|147920 | 3-methyladenine-DNA glycosylase I (tag) | 58 | 33 | |
| | | | | | [Escherichia coli] | | | |
| 194 | 9 | 6492 | 5500 | sp\|P09997\|YIDA_ECO | HYPOTHETICAL 29.7 KD PROTEIN IN IBPA-GYRB | 58 | 38 | |
| | | | | LI | INTERGENIC REGION. | | | |
| 201 | 5 | 5152 | 4466 | gi\|755152 | highly hydrophobic integral membrane | 58 | 28 | |
| | | | | | protein [Bacillus subtilis] | | | |
| | | | | | sp\|P42953\|TAGG_BACSU TEICHOIC ACID | | | |
| | | | | | TRANSLOCATION PERMEASE PROTEIN AGG. | | | |
| 210 | 9 | 6546 | 7265 | gi\|466520 | pocR [Salmonella typhimurium] | 58 | 36 | |
| 220 | 1 | 3 | 569 | gi\|467441 | expressed at the end of exponential growyh | 58 | 38 | |
| | | | | | under condtions in which he enzymes of the | | | |
| | | | | | TCA cycle are repressed [Bacillus | | | |
| | | | | | subtilis] sp\|P14194\|CTC_BACSU GENERAL | | | |
| | | | | | STRESS PROTEIN CTC. {SUB 2-204} gi\|40219 | | | |
| | | | | | partial ctc gene product (AA 1-186) | | | |
| | | | | | [Bacillus subtilis] | | | |
| 222 | 10 | 6520 | 7143 | gi\|1674024 | (AE000033) Mycoplasma pneumoniae, | 58 | 41 | |
| | | | | | hypothetical protein (yjfS) homolog; | | | |
| | | | | | similar to Swiss-Prot Accession Number | | | |
| | | | | | P39301, from E. coli [Mycoplasma | | | |
| | | | | | pneumoniae] | | | |
| 233 | 7 | 4984 | 3944 | gi\|147806 | selenium metabolism protein [Escherichia | 58 | 45 | |
| | | | | coli] | | | | |
| 238 | 14 | 12128 | 12910 | gi\|1736468 | Pectin degradation repressor protein KdgR. | 58 | 37 | |
| | | | | | [Escherichia coli] | | | |
| 244 | 11 | 8102 | 7809 | gi\|467418 | unknown [Bacillus subtilis] | 58 | 37 | |
| 246 | 1 | 1 | 276 | gi\|65291 | receptor tyrosine kiase preprotein | 58 | 32 | |
| | | | | | [Xiphophorus sp.] ir\|S06142\|S06142 kinase- | | | |
| | | | | | related transforming protein (Tu) (EC | | | |
| | | | | | 7.1.-) precursor - southern platyfish | | | |
| 255 | 4 | 2927 | 2559 | gi\|1652384 | ABC transporter [Synechocystis sp.] | 58 | 41 | |
| 258 | 9 | 8025 | 8966 | gi\|147402 | mannose permease subunit III-Man | 58 | 35 | |
| | | | | | [Escherichia coli] | | | |
| 259 | 2 | 1801 | 893 | gi\|1591564 | molybdenum cofactor biosynthesis moeA | 58 | 39 | |
| | | | | | protein [Methanococcus jannaschii] | | | |
| 260 | 3 | 1754 | 2254 | gi\|580841 | F1 [Bacillus subtilis] | 58 | 38 | |
| 271 | 4 | 2382 | 2738 | gi\|40067 | X gene product [Bacillus sphaericus] | 58 | 37 | |
| 279 | 8 | 6237 | 6536 | gi\|1783243 | homologous to jojc gene product (B. | 58 | 34 | |
| | | | | | subtilis; prf:2111327a); hypothetical | | | |
| | | | | | [Bacillus subtilis] | | | |
| 301 | 1 | 753 | 175 | gi\|499196 | ORF1 [Streptomyces lincolnensis] | 58 | 37 | |
| 304 | 1 | 100 | 849 | gi\|1653322 | hypothetical protein [Synechocystis sp.] | 58 | 41 | |
| 313 | 2 | 748 | 1650 | gi\|1658371 | cyclic beta-1,2-glucan modification | 58 | 36 | |
| | | | | | protein [Rhizobium meliloti] | | | |
| 321 | 11 | 6033 | 6533 | gi\|1573292 | hypothetical [Haemophilus influenzae] | 58 | 34 | |
| 322 | 6 | 3819 | 5069 | gi\|23897 | 5′-nucleotidase [Homo sapiens] | 58 | 34 | |
| 324 | 5 | 3259 | 4452 | gi\|1469784 | putative cell division protein ftsW | 58 | 37 | |
| | | | | | [Enterococcus hirae] | | | |
| 328 | 1 | 1 | 270 | gi\|882579 | CG Site No. 29739 [Escherichia coli] | 58 | 43 | |
| 330 | 8 | 6228 | 6758 | gi\|43941 | EIII-B Sor PTS [Klebsiella pneumoniae] | 58 | 37 | |
| 334 | 4 | 3634 | 3963 | gi\|1001306 | hypothetical protein [Synechocystis sp.] | 58 | 34 | |
| 345 | 17 18899 | 20044 | gi\|853809 | ORF3 [Clostridium perfringens] | 58 | 30 | | |
| 363 | 7 | 8475 | 9944 | gi\|348056 | trans-acting positive regulator [Bacillus | 58 | 33 | |
| | | | | | anthracis] | | | |
| 375 | 7 | 6472 | 5279 | gi\|1408501 | homologous to N-acyl-L-amino acid | 58 | 42 | |
| | | | | | amidohydrolase of Bacillus | | | |
| | | | | | stearothermophilus [Bacillus subtilis] | | | |
| 394 | 12 | 10689 | 12095 | gi\|537034 | ORF_o488 [Escherichia coli] | 58 | 32 | |
| 399 | 3 | 1383 | 2198 | gi\|580905 | B.subtilis genes rpmH, rnpA, 50kd, gidA | 58 | 36 | |
| | | | | | and gidB [Bacillus subtilis]gi\|580919 Jag | | | |
| | | | | | [Bacillus subtilis] | | | |
| 399 | 16 | 11544 | 12098 | gi\|1572965 | hypothetical [Haemophilus influenzae] | 58 | 39 | |
| 399 | 19 | 14776 | 15654 | gi\|1778530 | CitG homolog [Escherichia coli] | 58 | 40 | |
| 407 | 2 | 738 | 553 | gi\|170553 | pyruvate kinase [Trichoderma reesei] | 58 | 38 | |
| 416 | 5 | 4045 | 3389 | gi\|475112 | enzyme IIabc [Pediococcus pentosaceus] | 58 | 41 | |
| 449 | 4 | 1421 | 879 | gi\|928834 | integrase [Lactococcus lactis phage BK5-T] | 58 | 32 | |
| 497 | 1 | 3 | 458 | gi\|160628 | reticulocyte binding protein 2 [Plasmodium | 58 | 30 | |
| | | | | | vivax] | | | |
| 594 | 1 | 285 | 4 | gi\|1353874 | unknown [Rhodobacter capsulatus] | 58 | 39 | |
| 637 | 6 | 3451 | 2765 | pir\|D61615\|D61615 | sericin MG-1 - greater wax moth (fragment) | 58 | 52 | |
| 653 | 1 | 595 | 245 | gi\|1408585 | LtrD [Lactococcus lactis lactis] | 58 | 41 | |
| 656 | 4 | 3713 | 5209 | sp\|P13692\|P54_ENTF | P54 PROTEIN PRECURSOR. | 58 | 37 | |
| | | | | C | | | | |
| 656 | 6 | 5988 | 6467 | gi\|1017818 | phosphotyrosine protein phosphatase | 58 | 48 | |
| | | | | | [Streptomyces coelicolor] | | | |
| 667 | 1 | 88 | 1467 | bbs\|177441 | OsNramp1=Nramp1 homolog/Bcg product | 58 | 40 | |
| | | | | | homolog [Oryza sativa, indica, cv. IR 36, | | | |
| | | | | | etiolated shoots, Peptide, 517 aa] [Oryza | | | |
| | | | | | sativa] | | | |
| 686 | 1 | 892 | 233 | pir\|A24255\|A24255 | chorion class A protein L11 precursor - | 58 | 38 | |
| | | | | | silkworm | | | |
| 706 | 1 | 1002 | 607 | gi\|1001762 | hypothetical protein [Synechocystis sp.] | 58 | 32 | |
| 801 | 1 | 254 | 12 | gnl\|PID\|e243641 | unknown [Mycobacterium tuberculosis] | 58 | 29 | |
| 848 | 1 | 212 | 3 | gnl\|PID\|e254644 | membrane protein [Streptococcus | 58 | 37 | |
| | | | | | pneumoniae] | | | |
| 975 | 1 | 3 | 422 | gi\|290545 | f270 [Escherichia coli] | 58 | 35 | |
| 11 | 4 | 2345 | 2833 | gi\|1439527 | EIIA-man [Lactobacillus curvatis] | 57 | 46 | |
| 16 | 2 | 1426 | 365 | gi\|780550 | acetyl transferase [Rhizobium loti] | 57 | 35 | |
| 18 | 3 | 1593 | 925 | gnl\|PID\|e137594 | xerC recombinase [Lactobacillus | 57 | 36 | |
| | | | | | leichmannii] | | | |
| 19 | 15 | 8058 | 8267 | gi\|1590922 | cell division inhibitor [Methanococcus | 57 | 42 | |
| | | | | | jannaschii] | | | |
| 19 | 23 | 11938 | 12318 | gi\|1294760 | structural protein; orfL3; putative | 57 | 46 | |
| | | | | | [Bacteriophage phi-41] | | | |
| 25 | 9 | 7743 | 6958 | gnl\|PID\|e255000 | hypothetical protein [Bacillus subtilis] | 57 | 40 | |
| 47 | 3 | 3857 | 4462 | gi\|1353540 | ORF23 [Bacteriophage rlt] | 57 | 35 | |
| 65 | 10 | 7100 | 8919 | gi\|496254 | fibronectin/fibrinogen-binding protein | 57 | 40 | |
| | | | | | [Streptococcus pyogenes] | | | |
| 68 | 7 | 3923 | 3705 | gi\|336656 | ribosomal protein secY [Cyanophora | 57 | 28 | |
| | | | | | paradoxa] | | | |
| 70 | 4 | 2317 | 3645 | pir\|S11158\|YESAEE | erythromycin resistance protein - | 57 | 40 | |
| | | | | | Staphylococcus epidermidis plasmid pULSOSO | | | |
| 76 | 1 | 55 | 1095 | gi\|1353562 | Structural protein [Bacteriophage rlt] | 57 | 41 | |
| 91 | 11 | 9070 | 8849 | gi\|550321 | beta-fructofuranosidase [Chenopodium | 57 | 30 | |
| | | | | | rubrum] | | | |
| 94 | 4 | 1740 | 1495 | gif 47406 | penicillin-binding protein 1a | 57 | 30 | |
| | | | | | [Streptococcus pneumoniae] | | | |
| | | | | | ir\|S28031\|528031 penicillin-binding | | | |
| | | | | | protein 1a - Streptococcus eumoniae | | | |
| | | | | | (strain 456) (fragment) | | | |
| 98 | 6 | 7766 | 6849 | gi\|409286 | bmrU [Bacillus subtilis] | 57 | 31 | |
| 100 | 22 | 17294 | 15912 | gnl\|PID\|e289150 | member of the SNF2 helicase family | 57 | 30 | |
| | | | | | [Bacillus subtilis] | | | |
| 102 | 1 | 66 | 2465 | gi\|405564 | traE [Plasmid pSK41] | 57 | 28 | |
| 110 | 14 | 11757 | 12497 | gi\|854601 | unknown [Schizosaccharomyces pombe] | 57 | 38 | |
| 114 | 9 | 10291 | 11139 | gi\|853777 | product similar to E.coli PRFA2 protein | 57 | 38 | |
| | | | | | [Bacillus subtilis] pir\|555438\|S55438 ywkE | | | |
| | | | | | protein - Bacillus subtilis | | | |
| | | | | | sp\|P45873\|HEMK_BACSU POSSIBLE | | | |
| | | | | | PROTOPORPHYRINOGEN OXIDASE (EC .3.3.-). | | | |
| 115 | 3 | 955 | 1461 | gi\|396347 | alternate name yjaB [Escherichia coli] | 57 | 33 | |
| 123 | 3 | 1925 | 2932 | gi\|1001731 | low affinity sulfate transporter | 57 | 39 | |
| | | | | | [Synechocystis sp.] | | | |
| 124 | 7 | 6026 | 5118 | gi\|1674310 | (AE000058) Mycoplasma pneumoniae, MG085 | 57 | 30 | |
| | | | | | homolog, from M. genitalium [Mycoplasma | | | |
| | | | | | pneumoniae] | | | |
| 128 | 9 | 7530 | 6235 | gi\|413940 | ipa-16d gene product [Bacillus subtilis] | 57 | 36 | |
| 128 | 31 | 25487 | 25206 | gi\|1651915 | hypothetical protein [Synechocystis sp.] | 57 | 42 | |
| 128 | 33 | 26878 | 26150 | gi\|1001387 | hypothetical protein [Synechocystis sp.] | 57 | 30 | |
| 128 | 37 | 30730 | 29600 | gi\|406877 | DivIB protein [Bacillus licheniformis] | 57 | 35 | |
| 130 | 9 | 7408 | 8556 | gi\|343539 | NADH dehydrogenase subunit 4 [Trypanosoma | 57 | 27 | |
| | | | | | brucei] | | | |
| 144 | 1 | 1013 | 219 | gi\|1652518 | hypothetical protein [Synechocystis sp.] | 57 | 45 | |
| 144 | 6 | 4145 | 5254 | gi\|149581 | maturation protein [Lactobacillus | 57 | 38 | |
| | | | | | paracasei] | | | |
| 146 | 1 | 617 | 192 | gi\|147402 | mannose permease subunit III-Man | 57 | 33 | |
| | | | | | [Escherichia coli] | | | |
| 153 | 1 | 83 | 991 | gi\|147336 | transmembrane protein [Escherichia coli] | 57 | 33 | |
| 160 | 8 | 4718 | 4134 | gi\|305333 | zeta-crystallin [Cavia porcellus] | 57 | 39 | |
| 167 | 8 | 14891 | 14688 | gi\|206354 | protein kinase C, zeta subspecies [Rattus | 57 | 39 | |
| | | | | | norvegicus] pir\|A30314\|A30314 protein | | | |
| | | | | | kinase C (EC 2.7.1.-) zeta - rat | | | |
| | | | | | sp\|P09217\|KPCZ_RAT PROTEIN KINASE C, ZETA | | | |
| | | | | | TYPE (EC 2.7.1.-) NPKC-ZETA). | | | |
| 174 | 1 | 760 | 2 | gnl\|PID\|e191403 | ORFA gene product [Chloroflexus | 57 | 42 | |
| | | | | | aurantiacus] | | | |
| 176 | 4 | 3347 | 3568 | gi\|1236529 | cyclomaltodextrinase [Bacillus sp.] | 57 | 46 | |
| 194 | 8 | 4786 | 5457 | gi\|405516 | This ORF is homologous to nitroreductase | 57 | 26 | |
| | | | | | from Enterobacter cloacae, ccession Number | | | |
| | | | | | A38686, and Salmonella, Accession Number | | | |
| | | | | | P15888 Mycoplasma-like organism] | | | |
| 199 | 3 | 3207 | 3764 | gi\|216350 | ORF [Bacillus subtilis] | 57 | 38 | |
| 202 | 5 | 3356 | 3664 | gi\|1183841 | Holliday junction binding protein | 57 | 34 | |
| | | | | | [Pseudomonas aeruginosa] | | | |
| 202 | 12 | 10911 | 10192 | gi\|971338 | anaerobic regulatory protein [Bacillus | 57 | 27 | |
| | | | | | subtilis] | | | |
| 205 | 3 | 1022 | 468 | gi\|1783240 | hypothetical [Bacillus subtilis] | 57 | 38 | |
| 223 | 2 | 779 | 1501 | gi\|1208965 | hypothetical 23.3 kd protein [Escherichia | 57 | 32 | |
| | | | | | coli] | | | |
| 223 | 3 | 1499 | 2332 | gi\|303560 | ORF271 [Escherichia coli] | 57 | 35 | |
| 223 | 11 | 8404 | 12198 | gi\|158079 | period protein [Drosophila serrata] | 57 | 40 | |
| 237 | 9 | 3685 | 3906 | gi\|514919 | phosphofructokinase [Drosophila | 57 | 31 | |
| | | | | | melanogaster] | | | |
| 242 | 7 | 5760 | 5020 | gi\|1574596 | H. influenzae predicted coding region | 57 | 33 | |
| | | | | | HI1738 [Haemophilus influenzae] | | | |
| 250 | 2 | 1243 | 1485 | gnl\|PID\|e275819 | K08G2.8 [Caenorhabditis elegans] | 57 | 47 | |
| 276 | 28 | 16565 | 16332 | gi\|886375 | variant-specific surface protein | 57 | 47 | |
| | | | | | [Plasmodium falciparum] | | | |
| 288 | 6 | 3157 | 3363 | gi\|147403 | mannose permease subunit II-P-Man | 57 | 39 | |
| | | | | | [Escherichia coli] | | | |
| 289 | 1 | 141 | 818 | gi\|1742822 | Phosphoglycolate phosphatase (EC | 57 | 40 | |
| | | | | | 3.1.3.18). [Escherichia coli] | | | |
| 292 | 20 | 15930 | 15721 | gi\|854201 | putative polymerase [Infectious bursal | 57 | 47 | |
| | | | | | disease virus] | | | |
| 294 | 4 | 1454 | 2014 | gi\|454303 | LDJ2 gene product [Allium porrum] | 57 | 41 | |
| 295 | 4 | 2052 | 2342 | pir\|S48588\|S48588 | hypothetical protein - Mycoplasma | 57 | 39 | |
| | | | | | capricolum (SGC3) (fragment) | | | |
| 301 | 14 | 10921 | 10148 | gnl\|PID\|e262045 | putative orf [Bacillus subtilis] | 57 | 38 | |
| 306 | 1 | 2 | 793 | gi\|216715 | HpaI methyltransferase [Haemophilus | 57 | 36 | |
| | | | | | parainfluenzae] pir\|S28681\|S28681 site- | | | |
| | | | | | specific DNA-methyltransferase adenine- | | | |
| | | | | | specific) (EC 2.1.1.72) HpaI - Haemophilus | | | |
| | | | | | parainfluenzae sp\|P29538\|MTH1_HAEPA | | | |
| | | | | | MODIFICATION METHYLASE HPAI (EC 2.1.1.72) | | | |
| | | | | | ADENINE-SPECIFIC MET | | | |
| 306 | 8 | 5418 | 5663 | gi\|1591542 | M. jannaschii predicted coding region | 57 | 42 | |
| | | | | | MJ0857 [Methanococcus jannaschii] | | | |
| 308 | 2 | 1732 | 1487 | gi\|1518045 | FlbF protein [Borrelia burgdorferi] | 57 | 28 | |
| 321 | 2 | 1030 | 1458 | gi\|606080 | ORF_o290; Geneplot suggests frameshift | 57 | 30 | |
| | | | | | linking to o267, not found Escherichia | | | |
| | | | | | coli] | | | |
| 351 | 4 | 2342 | 1587 | gi\|1591853 | M. jannaschii predicted coding region | 57 | 37 | |
| | | | | | MJ1222 [Methanococcus jannaschii] | | | |
| 355 | 30 | 20619 | 20861 | gi\|1136394 | There are three putative hydrophobic | 57 | 42 | |
| | | | | | domains in the central region. [Homo | | | |
| | | | | | sapiens] | | | |
| 364 | 10 | 9415 | 8852 | gi\|38722 | precursor (aa −20 to 381) [Acinetobacter | 57 | 32 | |
| | | | | | calcoaceticus] ir\|29277\|A29277 aldose 1- | | | |
| | | | | | epimerase (EC 5.1.3.3) - Acinetobacter | | | |
| | | | | | lcoaceticus | | | |
| 365 | 3 | 4715 | 1812 | gi\|914990 | Similar to DEAD box family helicases | 57 | 35 | |
| | | | | | [Saccharomyces cerevisiae] | | | |
| | | | | | pir\|S59797\|S59797 hypothetical protein | | | |
| | | | | | P9798.1 - yeast Saccharomyces cerevisiae) | | | |
| 378 | 1 | 615 | 10 | gi\|1652989 | hypothetical protein [Synechocystis sp.] | 57 | 35 | |
| 379 | 1 | 1457 | 114 | gi\|1256618 | transport protein [Bacillus subtilis] | 57 | 36 | |
| 390 | 1 | 1426 | 2 | gi\|387880 | collagen adhesin [Staphylococcus aureus] | 57 | 37 | |
| 422 | 1 | 2 | 409 | gi\|1591837 | M. jannaschii predicted coding region | 57 | 37 | |
| | | | | | MJ1207 [Methanococcus jannaschii] | | | |
| 447 | 1 | 397 | 131 | gi\|214566 | keratin protein XK81 [Xenopus laevis] | 57 | 33 | |
| 454 | 2 | 1095 | 889 | gi\|1783256 | sigma factor [Bacillus subtilis] | 57 | 28 | |
| 504 | 2 | 641 | 1426 | gi\|42081 | nagD gene product (AA 1-250) [Escherichia | 57 | 32 | |
| | | | | | coli] | | | |
| 524 | 2 | 963 | 577 | gi\|143724 | putative [Bacillus subtilis] | 57 | 43 | |
| 535 | 4 | 4862 | 4305 | gi\|146549 | kdpC [Escherichia coli] | 57 | 40 | |
| 547 | 2 | 426 | 719 | gi\|533098 | DnaD protein [Bacillus subtilis] | 57 | 33 | |
| 548 | 1 | 316 | 717 | gi\|397973 | Mg2+ transport ATPase [Salmonella | 57 | 33 | |
| | | | | | typhimurium] | | | |
| 639 | 2 | 359 | 105 | gnl\|PID\|e247390 | P-type ATPase [Dictyostelium discoideum] | 57 | 31 | |
| 641 | 1 | 941 | 180 | gnl\|PID\|e261990 | putative orf [Bacillus subtilis] | 57 | 36 | |
| 686 | 3 | 1298 | 3259 | gi\|496506 | orf gamma [Streptococcus pyogenes] | 57 | 37 | |
| 686 | 6 | 2200 | 2847 | gi\|404800 | putative [Saccharopolyspora erythraea] | 57 | 47 | |
| 782 | 2 | 591 | 860 | gi\|1591270 | alanyl-tRNA synthetase [Methanococcus | 57 | 32 | |
| | | | | | jannaschii] | | | |
| 844 | 1 | 3 | 182 | gi\|849217 | Weak similarity to Streptococcus Protein | 57 | 34 | |
| | | | | | V, a type-II IgG receptor PIR accession | | | |
| | | | | | number S17354) and Giardia lamblia median | | | |
| | | | | | body rotein (PIR accession number S33821) | | | |
| | | | | | [Saccharomyces cerevisiae] | | | |
| | | | | | pir\|S61181\|S61181 hypothetical protein | | | |
| | | | | | D9740.10 - yeast Sacchar | | | |
| 859 | 1 | 174 | 4 | gi\|1762584 | polygalacturonase isoenzyme 1 beta subunit | 57 | 28 | |
| | | | | | homolog [Arabidopsis thaliana] | | | |
| 967 | 1 | 381 | 4 | gi\|309662 | pheromone binding protein [Plasmid pCF10] | 57 | 40 | |
| 11 | 5 | 2817 | 3314 | gi\|43941 | EIII-B Sor PTS [Klebsiella pneumoniae] | 56 | 30 | |
| 15 | 1 | 80 | 892 | gi\|1574803 | spermidine/putrescine-binding periplasmic | 56 | 32 | |
| | | | | | protein precursor (potD) [Haemophilus | | | |
| | | | | | influenzae] | | | |
| 37 | 8 | 6327 | 6088 | gi\|290561 | o188 [Escherichia coli] | 56 | 41 | |
| 44 | 2 | 1169 | 1360 | gi\|16096 | peroxidase [Armoracia rusticana] | 56 | 37 | |
| 56 | 3 | 1881 | 1363 | gi\|49272 | Asparaginase [Bacillus licheniformis] | 56 | 33 | |
| 65 | 1 | 102 | 887 | gi\|1377832 | unknown [Bacillus subtilis] | 56 | 41 | |
| 75 | 9 | 5817 | 4306 | gi\|1235712 | polyprotein [Infectious pancreatic | 56 | 30 | |
| | | | | | necrosis virus] | | | |
| 83 | 7 | 3260 | 4051 | gi\|1652645 | phosphoglycolate phosphatase | 56 | 30 | |
| | | | | | [Synechocystis sp.] | | | |
| 95 | 3 | 1793 | 2389 | pir\|C53610\|C53610 | ntpE protein - Enterococcus hirae | 56 | 28 | |
| 100 | 3 | 5076 | 1915 | gi\|1353559 | ORF42 [Bacteriophage rlt] | 56 | 35 | |
| 100 | 16 | 10581 | 10369 | gi\|868224 | No definition line found [Caenorhabditis | 56 | 35 | |
| | | | | | elegans] | | | |
| 100 | 48 | 31841 | 32770 | gi\|460025 | ORF2, putative [Streptococcus pneumoniae] | 56 | 38 | |
| 108 | 5 | 4007 | 3336 | gi\|288301 | ORF2 gene product [Bacillus megaterium] | 56 | 34 | |
| 109 | 2 | 1032 | 325 | gi\|413976 | ipa-52r gene product [Bacillus subtilis] | 56 | 36 | |
| 119 | 7 | 3958 | 5304 | gi\|498842 | VirS [Clostridium perfringens] | 56 | 35 | |
| 123 | 32 | 29479 | 30345 | gi\|39981 | [Bacillus subtilis] | 56 | 38 | |
| 126 | 1 | 521 | 3 | gi\|147403 | mannose permease subunit II-P-Man | 56 | 29 | |
| | | | | | [Escherichia coli] | | | |
| 130 | 6 | 4296 | 6104 | gi\|308854 | oligopeptide binding protein [Lactococcus | 56 | 33 | |
| | | | | | lactis] | | | |
| 131 | 7 | 5267 | 6613 | gi\|466589 | CG Site No. 39 [Escherichia coli] | 56 | 32 | |
| 133 | 5 | 4358 | 5758 | gi\|1573431 | ammnodeoxychonismate lyase (pabC) | 56 | 40 | |
| | | | | | [Haemophilus influenzae] | | | |
| 138 | 20 | 13680 | 12670 | gi\|1590951 | UDP-glucose 4-epimerase [Methanococcus | 56 | 40 | |
| | | | | | jannaschii] | | | |
| 138 | 29 | 19764 | 18823 | gi\|44864 | H.8 outer membrane protein (AA −17 to 71) | 56 | 33 | |
| | | | | | [Neisseria gonorrhoeae] ir\|S02720\|S02720 | | | |
| | | | | | outer membrane protein H.8 precursor - | | | |
| | | | | | Neisseria norrhoeae | | | |
| 145 | 7 | 5611 | 7179 | gi\|1652892 | ABC transporter [Synechocystis sp.] | 56 | 33 | |
| 146 | 10 | 8545 | 7811 | gi\|41519 | P30 protein (AA 1-240) | [Escherichia coli] | 56 | 28 |
| 150 | 4 | 2979 | 4637 | gi\|309662 | pheromone binding protein [Plasmid pCF10] | 56 | 32 | |
| 159 | 5 | 5362 | 5066 | gi\|576733 | apocytochrome b [Trypanoplasma borreli] | 56 | 43 | |
| 164 | 13 | 8864 | 15031 | gi\|1654116 | protein F2 [Streptococcus pyogenes] | 56 | 43 | |
| 179 | 7 | 7790 | 9118 | gi\|413926 | ipa-2r gene product [Bacillus subtilis] | 56 | 33 | |
| 187 | 4 | 2239 | 1667 | gi\|1573061 | hypothetical [Haemophilis influenzae] | 56 | 18 | |
| 200 | 19 | 11473 | 10724 | gi\|498817 | ORF8; homologous to small subunit of phage | 56 | 35 | |
| | | | | | terminases [Bacillus ubtilis] | | | |
| 206 | 6 | 3766 | 2759 | gi\|474837 | ORF1 [Thermoanaerobacterium | 56 | 34 | |
| | | | | | thermosulfurigenes] sp\|P3854\|YAMB_THETU | | | |
| | | | | | HYPOTHETICAL 35.6 KD PROTEIN IN AMYB | | | |
| | | | | | 5′REGION ORF1). | | | |
| 207 | 2 | 2091 | 1672 | gi\|1204258 | soluble protein [Escherichia coli] | 56 | 40 | |
| 217 | 9 | 6661 | 6158 | gi\|1017427 | elastic titin [Homo sapiens] | 56 | 28 | |
| 225 | 7 | 6007 | 5099 | gi\|1742675 | Phosphotransferase system enzyme II (EC | 56 | 46 | |
| | | | | | 2.7.1.69) MalX [Escherichia coli] | | | |
| 230 | 3 | 595 | 3153 | gi\|437706 | alternative truncated translation product | 56 | 34 | |
| | | | | | from E.coli [Streptococcus neumoniae] | | | |
| 236 | 2 | 1486 | 515 | gi\|415664 | catabolite control protein [Bacillus | 56 | 35 | |
| | | | | | megaterium] sp\|P46828\|CCPA_BACME GLUCOSE- | | | |
| | | | | | RESISTANCE AMYLASE REGULATOR CATABOLITE | | | |
| | | | | | CONTROL PROTEIN). | | | |
| 236 | 7 | 9255 | 8599 | gi\|343544 | ATPase 6 [Trypanosoma brucei] | 56 | 48 | |
| 238 | 15 | 13059 | 13718 | gi\|1146190 | 2-keto-3-deoxy-6-phosphogluconate aldolase | 56 | 37 | |
| | | | | | [Bacillus subtilis] | | | |
| 238 | 20 | 17734 | 18756 | gi\|1574060 | hypothetical [Haemophilus influenzae] | 56 | 32 | |
| 238 | 23 | 21613 | 20726 | gi\|151361 | member of the AraC/XylS family of | 56 | 36 | |
| | | | | | transcriptional regulators Pseudomonas | | | |
| | | | | | aeruginosa] | | | |
| 242 | 6 | 4103 | 4477 | gi\|886858 | nicotinic acetylcholine receptor | 56 | 35 | |
| | | | | | [Caenorhabditis elegans] pir\|S57648\|S57648 | | | |
| | | | | | nicotinic acetylcholine receptor - | | | |
| | | | | | Caenorhabditis legans | | | |
| 260 | 5 | 3170 | 3781 | gnl\|PID\|e58151 | F3 [Bacillus subtilis] | 56 | 43 | |
| 279 | 6 | 5140 | 2831 | gi\|581100 | gamma-glutamylcysteine synthetase (aa 1- | 56 | 42 | |
| | | | | | 518) [Escherichia coli] pir\|A24136\|SYECEC | | | |
| | | | | | glutamate--cysteine ligase (EC 6.3.2.2) - | | | |
| | | | | | scherichia coli | | | |
| 279 | 9 | 6434 | 7228 | gi\|1783243 | homologous to jojC gene product (B. | 56 | 29 | |
| | | | | | subtilis; prf:2111327a); hypothetical | | | |
| | | | | | [Bacillus subtilis] | | | |
| 292 | 14 | 10719 | 11504 | gi\|45738 | ORFC [Enterococcus faecalis] | 56 | 37 | |
| 313 | 3 | 3039 | 1831 | gi\|474915 | orf 337; translated orf similarity to SW: | 56 | 31 | |
| | | | | | BCR_ECOLI bicyclomycin esistance protein | | | |
| | | | | | of Escherichia coli [Coxiella burnetii] | | | |
| | | | | | pir\|S44207\|44207 hypothetical protein 337 | | | |
| | | | | | - Coxiella burnetti {SUB -338} | | | |
| 313 | 5 | 4233 | 3589 | gi\|405883 | yeiL [Escherichia coli] | 56 | 30 | |
| 322 | 5 | 1994 | 3715 | gi\|1377831 | unknown [Bacillus subtilis] | 56 | 34 | |
| 353 | 2 | 2353 | 1310 | gnl\|PID\|e254644 | membrane protein [Streptococcus | 56 | 26 | |
| | | | | | pneumoniae] | | | |
| 394 | 14 | 13289 | 14143 | gi\|142836 | repressor protein [Bacillus subtilis] | 56 | 30 | |
| 399 | 32 | 30208 | 30891 | gi\|396293 | similar to Bacillus subtilis hypoth. 20 | 56 | 38 | |
| | | | | | kDa protein, in tsr 3′ egion [Escherichia | | | |
| | | | | | coli] | | | |
| 402 | 2 | 1267 | 914 | gi\|170710 | alpha-type gliadin precursor protein | 56 | 45 | |
| | | | | | [Triticum aestivum] | | | |
| 408 | 4 | 2825 | 2220 | gnl\|PID\|e257696 | collagen binding protein [Lactobacillus | 56 | 36 | |
| | | | | | reuteri] | | | |
| 432 | 5 | 3105 | 3302 | gi\|11678 | atpE gene product [Marchantia polymorpha] | 56 | 33 | |
| 443 | 2 | 844 | 1089 | gi\|1256138 | YbbI [Bacillus subtilis] | 56 | 36 | |
| 499 | 2 | 875 | 1666 | gi\|1499876 | magnesium and cobalt transport protein | 56 | 30 | |
| | | | | | [Methanococcus jannaschii] | | | |
| 510 | 6 | 3864 | 4733 | gi\|147404 | mannose permease subunit II-M-Man | 56 | 34 | |
| | | | | | [Escherichia coli] | | | |
| 543 | 6 | 3706 | 3113 | gi\|563812 | XCAP-C [Xenopus laevis] | 56 | 32 | |
| 609 | 2 | 390 | 653 | gi\|48745 | principal sigma subunit (AA 1-442) | 56 | 37 | |
| | | | | | [Streptomyces coelicolor] ir\|S11712\|S11712 | | | |
| | | | | | translation initiation factor sigma hrdB - | | | |
| | | | | | reptomyces coelicolor | | | |
| 626 | 2 | 1124 | 2104 | gi\|950197 | unknown [Corynebacterium glutamicum] | 56 | 40 | |
| 787 | 1 | 2 | 634 | gnl\|PID\|e283826 | orf c04012 [Sulfolobus solfataricus] | 56 | 26 | |
| 820 | 1 | 1220 | 3 | gi\|44001 | galactose-1-P-uridyl transferase | 56 | 35 | |
| | | | | | [Lactobacillus helveticus] | | | |
| | | | | | ir\|B47032\|B47032 galactose-1-phosphate | | | |
| | | | | | uridyl transferase - ctobacillus | | | |
| | | | | | helveticus | | | |
| 875 | 1 | 1 | 144 | gi\|455178 | 16K protein [Escherichia coli] | 56 | 46 | |
| 906 | 2 | 307 | 846 | gi\|144858 | ORF A [Clostridium perfringens] | 56 | 34 | |
| 941 | 1 | 3 | 335 | gi\|160299 | glutamic acid-rich protein [Plasmodium | 56 | 23 | |
| | | | | | falciparum] pir\|A54514\|A54514 glutamnic | | | |
| | | | | | acid-rich protein precursor - Plasmodium | | | |
| | | | | | alciparum | | | |
| 5 | 5 | 2451 | 2951 | gi\|1303811 | YgeU [Bacillus subtilis] | 55 | 39 | |
| 8 | 10 | 8312 | 7947 | gi\|1196907 | daunorubicin resistance protein | 55 | 29 | |
| | | | | | [Streptomyces peucetius] | | | |
| 17 | 24 | 23626 | 24465 | gnl\|PID\|e285322 | RecX rotein [Mycobacterium smegmatis] | 55 | 28 | |
| 17 | 31 | 31027 | 30344 | gi″143830 | xpaC [Bacillus subtilis] | 55 | 22 | |
| 17 | 34 | 31991 | 32302 | gnl\|PID\|e229183 | C11G6.3 [Caenorhabditis elegans] | 55 | 34 | |
| 30 | 1 | 2 | 478 | pir\|S10655\|S10655 | hypothetical protein X - Pyrococcus woesei | 55 | 34 | |
| | | | | | (fragment) | | | |
| 49 | 14 | 9998 | 10411 | gi\|455154 | ORE D [Clostridium perfringens] | 55 | 36 | |
| 54 | 3 | 955 | 1332 | gnl\|PID\|e238660 | hypothetical protein [Bacillus subtilis] | 55 | 32 | |
| 54 | 10 | 3527 | 3231 | pir\|JQ0405\|JQ0405 | hypothetical 119.5K protein (uvrA region) | 55 | 45 | |
| | | | | | - Micrococcus luteus | | | |
| 67 | 4 | 2313 | 3044 | gi\|555750 | unknown [Neisseria gonorrhoeae] | 55 | 42 | |
| 69 | 4 | 2250 | 2020 | gnl\|PID\|e259955 | K04G11.5 [Caenorhabditis elegans] | 55 | 33 | |
| 77 | 5 | 3954 | 2938 | gi\|1001634 | hypothetical protein [Synechocystis sp.] | 55 | 34 | |
| 80 | 4 | 4806 | 2482 | gi\|466952 | B1620_F1_30 [Mycobacterium leprae] | 55 | 35 | |
| 81 | 6 | 4212 | 3730 | gi\|606073 | ORF_o169 [Escherichia coli] | 55 | 34 | |
| 83 | 1 | 66 | 737 | gi\|216064 | morphogenesis protein B [Bacteriophage | 55 | 36 | |
| | | | | | PZA] | | | |
| 89 | 10 | 9486 | 7714 | gi\|148221 | DNA-dependent ATPase, DNA helicase | 55 | 35 | |
| | | | | | [Escherichia coli] pir\|JS0137\|BVECRQ recQ | | | |
| | | | | | protein - Escherichia coli | | | |
| 91 | 5 | 2507 | 3289 | gi\|153015 | FemA protein [Staphylococcus aureus] | 55 | 35 | |
| 100 | 14 | 9974 | 9393 | gi\|558603 | synaptonemal complex protein 1 [Mus | 55 | 30 | |
| | | | | | musculus] | | | |
| 116 | 1 | 1 | 909 | gi\|473901 | ORF1 [Lactococcus lactis] | 55 | 33 | |
| 122 | 3 | 1801 | 2655 | gi\|1016216 | putative protein of 299 amino acids | 55 | 28 | |
| | | | | | [Cyanophora paradoxa] | | | |
| 123 | 30 | 28191 | 28721 | gi\|1142714 | phosphoenolpyruvate:mannose | 55 | 29 | |
| | | | | | phosphotransferase element IIB | | | |
| | | | | | [Lactobacillus curvatus] | | | |
| 128 | 22 | 16664 | 16029 | gi\|606025 | ORF_o221 [Escherichia coli] | 55 | 42 | |
| 150 | 7 | 5949 | 6521 | gi\|39573 | P20 (AA 1-178) [Bacillus licheniformis] | 55 | 32 | |
| 155 | 7 | 5767 | 6660 | gi\|1763974 | DPPA [Bacillus methanolicus] | 55 | 31 | |
| 157 | 1 | 867 | 70 | gi\|1067010 | M153.1 [Caenorhabditis elegans] | 55 | 34 | |
| 160 | 9 | 6090 | 4804 | gi\|1592141 | M. jannaschii predicted coding region | 55 | 31 | |
| | | | | | MJ1507 [Methanococcus jannaschii] | | | |
| 176 | 3 | 2060 | 3349 | gi\|153858 | wall-associated protein [Streptococcus | 55 | 37 | |
| | | | | | mutans] | | | |
| 201 | 2 | 3277 | 413 | gi\|1235662 | RfbC [Myxococcus xanthus] | 55 | 36 | |
| 202 | 9 | 6199 | 8001 | gi\|606018 | ORF_o783 [Escherichia coli] | 55 | 42 | |
| 222 | 7 | 4803 | 4021 | gnl\|PID\|e289148 | highly similar to phosphotransferase | 55 | 40 | |
| | | | | | system regulator [Bacillus subtilis] | | | |
| 238 | 12 | 11465 | 9942 | gnl\|PID\|e266573 | unknown [Mycobacterium tuberculosis] | 55 | 27 | |
| 238 | 13 | 11527 | 12027 | gi\|1129093 | unknown protein [Bacillus sp.] | 55 | 36 | |
| 240 | 4 | 1988 | 1215 | gnl\|PID\|e252616 | DcuC protein [Escherichia coli] | 55 | 34 | |
| 246 | 2 | 433 | 792 | gnl\|PID\|e233868 | hypothetical protein [Bacillus subtilis] | 55 | 25 | |
| 253 | 5 | 1827 | 1549 | gi\|142540 | aspartokinase II [Bacillus sp.] | 55 | 48 | |
| 259 | 1 | 895 | 74 | gi\|1006621 | molybdate-binding periplasmic protein | 55 | 37 | |
| | | | | | [Synechocystis sp.] | | | |
| 267 | 1 | 1183 | 2 | gi\|882672 | ORF_o313 [Escherichia coli] | 55 | 27 | |
| 292 | 16 | 12843 | 13325 | gi\|561746 | cyclin-dependent protein kinase [Mus | 55 | 26 | |
| | | | | | musculus] | | | |
| 294 | 9 | 3390 | 3752 | gi\|984582 | DinJ [Escherichia coli] | 55 | 26 | |
| 300 | 5 | 3914 | 3582 | gi\|1591957 | M. jannaschii predicted coding region | 55 | 38 | |
| | | | | | MJ1318 [Methanococcus jannaschii] | | | |
| 305 | 3 | 2769 | 3527 | gi\|606309 | ORF_o265; gtg start [Escherichia coli] | 55 | 36 | |
| 320 | 6 | 4479 | 3475 | gi\|1591732 | cobalt transport ATP-binding protein O | 55 | 32 | |
| | | | | | [Methanococcus jannaschii] | | | |
| 355 | 24 | 18149 | 18322 | gi\|344751 | MDV TK gene product [unidentified] | 55 | 40 | |
| 364 | 2 | 2083 | 386 | gi\|1573045 | hypothetical [Haemophilus influenzae] | 55 | 40 | |
| 364 | 9 | 8796 | 8575 | gnl\|PID\|e252108 | ORF YOR255w [Saccharomyces cerevisiae] | 55 | 27 | |
| 379 | 8 | 8248 | 6872 | gi\|1330236 | dihydropyrimidinase [Homo sapiens] | 55 | 37 | |
| 386 | 6 | 3847 | 4332 | gi\|976025 | HrsA [Escherichia coli] | 55 | 27 | |
| 441 | 2 | 939 | 1730 | gi\|144859 | ORF B [Clostridium perfringens] | 55 | 28 | |
| 482 | 6 | 3515 | 3156 | gi\|606162 | ORF_f229 [Escherichia coli] | 55 | 39 | |
| 497 | 9 | 4885 | 5937 | gi\|1041637 | replication initiator protein | 55 | 33 | |
| | | | | | [Staphylococcus xylosus] | | | |
| 546 | 1 | 1 | 1104 | gi\|467446 | similar to SpoVB [Bacillus subtilis] | 55 | 36 | |
| 634 | 4 | 2132 | 1524 | gi\|431950 | similar to a B.subtilis gene (GB: | 55 | 27 | |
| | | | | | BACHEMEHY_5) [Clostridium asteurianum] | | | |
| 660 | 2 | 249 | 401 | gnl\|PID\|e254995 | hypothetical protein [Bacillus subtilis] | 55 | 35 | |
| 671 | 1 | 288 | 58 | gi\|38722 | precursor (aa −20 to 381) [Acinetobacter | 55 | 33 | |
| | | | | | calcoaceticus] ir\|A29277\|A29277 aldose 1- | | | |
| | | | | | epimerase (EC 5.1.3.3) - Acinetobacter | | | |
| | | | | | lcoaceticus | | | |
| 686 | 2 | 245 | 1141 | gi\|1633572 | Herpesvirus saimiri ORF73 homolog | 55 | 36 | |
| | | | | | [Kaposi's sarcoma-associated herpes-like | | | |
| | | | | | virus] | | | |
| 713 | 3 | 2742 | 1438 | gnl\|PID\|e8901 | RESA NF7 Ag13 [Plasmodium falciparum] | 55 | 25 | |
| 815 | 1 | 2 | 226 | gi\|1113815 | histidine kinase [Borrelia burgdorferi] | 55 | 36 | |
| 857 | 1 | 2 | 520 | gi\|143024 | glucose-resistance amylase regulator | 55 | 31 | |
| | | | | | [Bacillus subtilis] pir\|515318\|S15318 ccpA | | | |
| | | | | | protein - Bacillus subtilis | | | |
| | | | | | sp\|P25144 CCPA_BACSU GLUCOSE-RESISTANCE | | | |
| | | | | | AMYLASE REGULATOR CATABOLITE CONTROL | | | |
| | | | | | PROTEIN). | | | |
| 931 | 1 | 3 | 557 | gi\|1098508 | putative spore germination apparatus | 55 | 32 | |
| | | | | | protein [Bacillus megaterium] | | | |
| 17 | 7 | 6379 | 7218 | gnl\|PID\|e250887 | potential coding region [Clostridium | 54 | 35 | |
| | | | | | difficile] | | | |
| 21 | 9 | 7265 | 6348 | gi\|13441 | NADH dehydrogenase subunit 4L [Phoca | 54 | 29 | |
| | | | | | vitulina] | | | |
| 28 | 2 | 2727 | 3425 | gi\|1001792 | hypothetical protein [Synechocystis sp.] | 54 | 29 | |
| 32 | 6 | 4044 | 3523 | gi\|1673660 | (AE000002) Mycoplasma pneumoniae, | 54 | 36 | |
| | | | | | hypothetical 28K protein; similar to | | | |
| | | | | | GenBank Accession Number JS0068, from M. | | | |
| | | | | | pneumoniae [Mycoplasma pneumoniae] | | | |
| 33 | 3 | 2274 | 3767 | gnl\|PID\|e245024 | unknown [Mycobacterium tuberculosis] | 54 | 36 | |
| 40 | 1 | 1 | 915 | gi\|773349 | BirA protein [Bacillus subtilis] | 54 | 32 | |
| 49 | 6 | 2120 | 2485 | gnl\|PID\|e139446 | a2 gene product [Bacteriophage Bi] | 54 | 38 | |
| 54 | 17 | 8969 | 8661 | gi\|334068 | ORF2 [Suid herpesvirus 1] | 54 | 51 | |
| 65 | 2 | 1311 | 2120 | gi\|537207 | ORF_277 [Escherichia coli] | 54 | 27 | |
| 72 | 20 | 21986 | 22435 | gi\|928848 | ORF70′; putative [Lactococcus lactis phage | 54 | 34 | |
| | | | | | BK5-T] | | | |
| 105 | 4 | 3039 | 3827 | gnl\|PID\|e205174 | orf2 gene product [Lactobacillus | 54 | 30 | |
| | | | | | helveticus] | | | |
| 127 | 1 | 884 | 150 | gi\|726443 | No definition line found [Caenorhabditis | 54 | 31 | |
| | | | | | elegans] | | | |
| 148 | 1 | 1204 | 62 | gi\|467456 | unknown [Bacillus subtilis] | 54 | 37 | |
| 156 | 4 | 4360 | 3167 | gi\|1032483 | unidentified ORF downstream of hydrogenase | 54 | 30 | |
| | | | | | cluster; ORF5 [Anabaena variabilis] | | | |
| 160 | 4 | 1523 | 2077 | gnl\|PID\|e255111 | hypothetical protein [Bacillus subtilis] | 54 | 27 | |
| 160 | 7 | 4260 | 3745 | gi\|1184121 | auxin-induced protein [Vigna radiata] | 54 | 30 | |
| 165 | 5 | 4996 | 3971 | gi\|1772652 | 2-keto-3-deoxygluconate kinase [Haloferax | 54 | 36 | |
| | | | | | alicantei] | | | |
| 176 | 2 | 1044 | 1937 | gi\|162201 | P-type ATPase [Trypanosoma brucei] | 54 | 38 | |
| 180 | 29 | 30833 | 29853 | gnl\|PID\|e254644 | membrane protein [Streptococcus | 54 | 29 | |
| | | | | | pneumoniae] | | | |
| 200 | 16 | 7933 | 6656 | gi\|1574238 | traN protein (traN) [Haemophilus | 54 | 31 | |
| | | | | | influenzae] | | | |
| 206 | 1 | 232 | 2 | gi\|1220501 | Rickettsia tsutsugamushi (strain Kp47) | 54 | 31 | |
| | | | | | gene, complete cds [Rickettsia | | | |
| | | | | | tsutsugamushi] | | | |
| 220 | 4 | 5235 | 4342 | gi\|606080 | ORF_o290; Geneplot suggests frameshift | 54 | 31 | |
| | | | | | linking to o267, not found Escherichia | | | |
| | | | | | coli] | | | |
| 220 | 5 | 5821 | 5135 | gi\|43942 | first subunit of EII-Sor [Klebsiella | 54 | 36 | |
| | | | | | pneumoniae] | | | |
| 223 | 20 | 17253 | 17747 | gi\|47932 | tonB protein [Salmonella typhimurium] | 54 | 38 | |
| 228 | 7 | 4866 | 4033 | gi\|1736828 | Thi4 protein [Escherichia coli] | 54 | 34 | |
| 229 | 4 | 5050 | 3371 | gi\|1046078 | M. genitalium predicted coding region | 54 | 42 | |
| | | | | | MG369 [Mycoplasma genitalium] | | | |
| 236 | 3 | 4777 | 1496 | gi\|152271 | 319-kDA protein [Rhizobium meliloti] | 54 | 28 | |
| 236 | 5 | 7822 | 6944 | gnl\|PID\|e285031 | Hyp1 protein [Hydra vulgaris] | 54 | 20 | |
| 238 | 30 | 27964 | 27746 | gnl\|PID\|e217586 | PlnM [Lactobacillus plantarum] | 54 | 42 | |
| 242 | 5 | 3508 | 4050 | gi\|149502 | beta-lactamase [Lactococcus lactis] | 54 | 35 | |
| 257 | 1 | 296 | 120 | gi\|1498064 | AtE1 [Arabidopsis thaliana] | 54 | 50 | |
| 257 | 6 | 6745 | 5633 | gi\|343949 | var1(40.0) [Saccharomyces cerevisiae] | 54 | 42 | |
| 258 | 8 | 7839 | 7114 | gi\|41519 | P30 protein (AA 1-240) [Escherichia coli] | 54 | 31 | |
| 276 | 20 | 13101 | 12880 | gi\|155322 | icsB gene product [Plasmid pWR100] | 54 | 37 | |
| 280 | 1 | 618 | 106 | gi\|467356 | unknown [Bacillus subtilis] | 54 | 21 | |
| 288 | 4 | 2183 | 2632 | gi\|39978 | P16 [Bacillus subtilis] | 54 | 39 | |
| 316 | 1 | 3 | 767 | gi\|143264 | membrane-associated protein [Bacillus | 54 | 34 | |
| | | | | | subtilis] | | | |
| 318 | 7 | 5035 | 4565 | gi\|606080 | ORF_o290; Geneplot suggests frameshift | 54 | 28 | |
| | | | | | linking to o267, not found Escherichia | | | |
| | | | | | coli] | | | |
| 319 | 3 | 1393 | 2163 | gi\|148327 | vancomycin response regulator | 54 | 34 | |
| | | | | | [Enterococcus faecium] | | | |
| 323 | 2 | 1256 | 2560 | gi\|413940 | ipa-16d gene product [Bacillus subtilis] | 54 | 26 | |
| 364 | 7 | 7335 | 7724 | gnl\|PID\|e250171 | F18C12.1 [Caenorhabditis elegans] | 54 | 31 | |
| 386 | 5 | 2399 | 3844 | gi\|155369 | PTS enzyme-II fructose [Xanthomonas | 54 | 37 | |
| | | | | | campestris] | | | |
| 392 | 3 | 2004 | 3353 | gi\|872306 | integral membrane protein [Streptomyces | 54 | 32 | |
| | | | | | pristinaespiralis] pir\|557509\|S57509 | | | |
| | | | | | integral membrane protein - Streptomyces | | | |
| | | | | | ristinaespiralis | | | |
| 424 | 5 | 1553 | 1371 | gi\|160316 | major merozoite surface antigen | 54 | 37 | |
| | | | | | [Plasmodium falciparum] | | | |
| | | | | sp\|P50495\|MSP1_PLAFP MEROZOITE SURFACE | | | | |
| | | | | | PROTEIN 1 PRECURSOR MEROZOITE SURFACE | | | |
| | | | | | ANTIGENS) (PMMSA) (GP195) | | | |
| 445 | 2 | 1897 | 1178 | gi\|1781503 | MigA [Pseudomonas aeruginosa] | 54 | 31 | |
| 452 | 5 | 2506 | 2805 | gi\|216292 | neopullulanase [Bacillus sp.] | 54 | 34 | |
| 457 | 2 | 2178 | 1024 | gi\|405570 | TraK protein shares sequence similarity | 54 | 35 | |
| | | | | | with a family of proteins ncoded on Gram- | | | |
| | | | | | negative gene transfer systems such as | | | |
| | | | | | TraD from the plasmid [Plasmid pSK41] | | | |
| 461 | 3 | 627 | 1418 | gi\|797332 | MocD [Agrobacterium tumefaciens] | 54 | 38 | |
| 466 | 5 | 5419 | 3770 | gi\|1652892 | ABC transporter [Synechocystis sp.] | 54 | 29 | |
| 475 | 3 | 2745 | 1990 | gi\|532546 | ORF13 [Enterococcus faecalis] | 54 | 35 | |
| 495 | 1 | 2 | 295 | gi\|304990 | ORF_o290 [Escherichia coli] | 54 | 21 | |
| 502 | 4 | 3518 | 3216 | gi\|1573270 | hemolysin (tlyC) [Haemophilus influenzae] | 54 | 33 | |
| 510 | 5 | 3089 | 3931 | gi\|1732200 | PTS permease for mannose subunit IIPMan | 54 | 29 | |
| | | | | | [Vibria furnissii] | | | |
| 570 | 1 | 1 | 930 | gi\|1001582 | penicillin-binding protein 1A | 54 | 31 | |
| | | | | | [Synechocystis sp.] | | | |
| 573 | 6 | 2763 | 3164 | gi\|416197 | homologous to plasmid R100 pemK gene | 54 | 35 | |
| | | | | | [Escherichia coli] | | | |
| 590 | 1 | 433 | 2 | gi\|532309 | 25 kDa protein [Escherichia coli] | 54 | 33 | |
| 643 | 2 | 1202 | 1477 | gnl\|PID\|e125689 | 256 kD golgin [Homo sapiens] | 54 | 29 | |
| 705 | 1 | 2 | 682 | gi\|148921 | LicD protein [Haemophilus influenzae] | 54 | 39 | |
| 730 | 1 | 370 | 167 | gnl\|PID\|e245531 | ORF YLR068w [Saccharornyces cerevisiae] | 54 | 29 | |
| 745 | 1 | 502 | 209 | gi\|581140 | NADH dehydrogenase [Escherichia coli] | 54 | 37 | |
| 749 | 1 | 413 | 3 | gi\|664840 | TagB [Dictyostelium discoideum] | 54 | 44 | |
| 932 | 1 | 3 | 320 | gi\|537207 | ORF_f277 [Escherichia coli] | 54 | 27 | |
| 4 | 6 | 5671 | 4748 | gi\|216267 | ORF2 [Bacillus megaterium] | 53 | 34 | |
| 16 | 8 | 6231 | 6806 | gi\|517105 | spermidine acetyltransferase [Escherichia | 53 | 35 | |
| | | | | | coli] | | | |
| 17 | 1 | 2 | 2497 | gi\|387880 | collagen adhesin [Staphylococcus aureus] | 53 | 35 | |
| 42 | 4 | 2942 | 3529 | gi\|1633572 | Herpesvirus saimiri ORF73 homolog | 53 | 20 | |
| | | | | | [Kaposi's sarcoma-associated herpes-like | | | |
| | | | | | virus] | | | |
| 69 | 6 | 3149 | 4879 | gi\|1486244 | unknown [Bacillus subtilis] | 53 | 30 | |
| 72 | 3 | 1455 | 2063 | gi\|1592197 | M. jannaschii predicted coding region | 53 | 32 | |
| | | | | | MJ1576 [Methanococcus jannaschii] | | | |
| 79 | 1 | 83 | 592 | gi\|633757 | pr2 [Mycoplasma hyopneumoniae] | 53 | 28 | |
| 83 | 8 | 5179 | 4412 | gi\|496100 | unknown function; putative [Bacteriophage | 53 | 39 | |
| | | | | | phi-LC3] | | | |
| 85 | 10 | 7180 | 6764 | gil 1303940 | YgiU [Bacillus subtilis] | 53 | 35 | |
| 92 | 2 | 789 | 986 | gi\|1372996 | Rho [Borrelia burgdorferi] | 53 | 28 | |
| 95 | 10 | 7546 | 7734 | gi\|162379 | variant surface glycoprotein [Trypanosoma | 53 | 28 | |
| | | | | | brucei] | | | |
| 99 | 4 | 1391 | 1861 | gi\|1499620 | M. jannaschii predicted coding region | 53 | 34 | |
| | | | | | MJ0798 [Methanococcus jannaschii] | | | |
| 100 | 44 | 29982 | 29749 | gi\|1590997 | M. jannaschii predicted coding region | 53 | 35 | |
| | | | | | MJ0272 [Methanococcus jannaschii] | | | |
| 102 | 5 | 4787 | 5089 | gi\|1399011 | immunogenic secreted protein precursor | 53 | 40 | |
| | | | | | [Streptococcus pyogenes] | | | |
| 113 | 1 | 825 | 4 | gnl\|PID\|e264148 | unknown [Mycobacterium tuberculosis] | 53 | 24 | |
| 114 | 4 | 6555 | 5113 | gi\|487282 | Na+ −ATPase subunit J [Enterococcus hirae] | 53 | 33 | |
| 119 | 6 | 3581 | 3994 | gi\|473707 | positive regulator for virulence factors | 53 | 31 | |
| | | | | | [Clostridium perfringens] | | | |
| 123 | 19 | 16463 | 18115 | gi\|1591361 | NADH oxidase [Methanococcus jannaschii] | 53 | 33 | |
| 136 | 1 | 381 | 4 | gi\|152744 | IpaD protein [Shigella flexneri] | 53 | 32 | |
| 138 | 9 | 8079 | 7594 | gi\|467371 | LACI family of transcriptional repreesor | 53 | 29 | |
| | | | | | (probable) [Bacillus ubtilis] | | | |
| 142 | 8 | 4594 | 4007 | gi\|755216 | N-acetylmuramidase [Lactococcus lactis] | 53 | 38 | |
| 162 | 12 | 12482 | 11937 | gi\|1063250 | low homology to P20 protein of Bacillus | 53 | 36 | |
| | | | | | lichiniformis and bleomycin | | | |
| | | | | | acetyltransferase of Streptomyces | | | |
| | | | | | verticillus [Bacillus subtilis] | | | |
| 163 | 1 | 546 | 31 | gi\|153767 | ORF [Streptococcus pneumoniae] | 53 | 34 | |
| 163 | 7 | 4973 | 3453 | gi\|29468 | beta-myosin heavy chain (1151 AA) [Homo | 53 | 36 | |
| | | | | | sapiens] | | | |
| 167 | 2 | 1038 | 2006 | gi\|413930 | ipa-6d gene product [Bacillus subtilis] | 53 | 27 | |
| 173 | 11 | 8865 | 7843 | gi\|1778569 | YaaF homolog [Escherichia coli] | 53 | 39 | |
| 190 | 8 | 6842 | 3549 | gi\|387880 | collagen adhesin [Staphylococcus aureus] | 53 | 38 | |
| 199 | 2 | 2725 | 950 | gi\|1652570 | nitrate transport protein NrtB | 53 | 32 | |
| | | | | | [Synechocystis sp.] | | | |
| 200 | 13 | 6184 | 5954 | gi\|1652679 | hypothetical protein [Synechocystis sp.] | 53 | 40 | |
| 200 | 17 | 9287 | 7890 | gi\|1574246 | H. influenzae predicted coding region | 53 | 35 | |
| | | | | | HI1409 [Haemophilus influenzae] | | | |
| 205 | 6 | 2048 | 3229 | gi\|148026 | topoisomerase III [Escherichia coli] | 53 | 32 | |
| 211 | 2 | 270 | 1052 | gi\|483940 | transcription regulator [Bacillus | 53 | 30 | |
| | | | | | subtilis] | | | |
| 221 | 10 | 5119 | 5994 | gi\|1353529 | ORF12 [Bacteriophage rlt] | 53 | 44 | |
| 232 | 7 | 4344 | 3925 | gi\|1665759 | Similar to Schistosoma mansoni amino acid | 53 | 35 | |
| | | | | | permease (L25068). [Homo sapiens] | | | |
| 238 | 21 | 18705 | 19247 | gi\|1574062 | hypothetical [Haemophilus influenzae] | 53 | 30 | |
| 239 | 1 | 2 | 1636 | gi\|433932 | activator of (R)-hydroxyglutaryl-CoA | 53 | 35 | |
| | | | | | dehydratase [Acidaminococcus ermentans] | | | |
| 250 | 1 | 1469 | 318 | gi\|987094 | membrane transport protein [Streptomyces | 53 | 22 | |
| | | | | | hygroscopicus] | | | |
| 253 | 4 | 1759 | 1028 | gi\|537245 | aspartokinase I-homoserine dehydrogenase I | 53 | 35 | |
| | | | | | [Escherichia coli] pir\|556629\|S56629 | | | |
| | | | | | aspartate kinase (EC 2.7.2.4)/homoserine | | | |
| | | | | | ehydrogenase (EC 1.1.1.3) - Escherichia | | | |
| | | | | | coli | | | |
| 271 | 8 | 4649 | 5800 | gi\|413966 | ipa-42d gene product [Bacillus subtilis] | 53 | 27 | |
| 276 | 26 | 15786 | 15112 | gi\|1699017 | ErpB2 [Borrelia burgdorferi] | 53 | 26 | |
| 279 | 11 | 8309 | 7797 | gi\|1651934 | hypothetical protein [Synechocystis sp.] | 53 | 35 | |
| 288 | 8 | 3997 | 4872 | gi\|43943 | second subunit of EII-Sor [Klebsiella | 53 | 32 | |
| | | | | | pneumoniae] | | | |
| 290 | 6 | 4391 | 5680 | gi\|466882 | pps1; B1496_C2_189 [Mycobacterium leprae] | 53 | 29 | |
| 294 | 3 | 1197 | 1481 | gi\|173004 | topoisomerase I [Saccharomyces cerevisiae] | 53 | 40 | |
| 330 | 3 | 2351 | 3367 | gi\|466691 | No definition line found [Escherichia | 53 | 34 | |
| | | | | | coli] | | | |
| 334 | 8 | 8172 | 9182 | gi\|1652483 | hypothetical protein [Synechocystis sp.] | 53 | 29 | |
| 368 | 1 | 620 | 102 | gi\|487273 | Na+ ATPase subunit I [Enterococcus hirae] | 53 | 29 | |
| 377 | 4 | 2424 | 2260 | gi\|221407 | FPS [Fowlpox virus] | 53 | 35 | |
| 382 | 1 | 257 | 36 | gi\|1592016 | M. jannaschii predicted coding region | 53 | 32 | |
| | | | | | MJ1371 [Methanococcus jannaschii] | | | |
| 387 | 1 | 2 | 460 | gi\|1574317 | repressor protein (GP:L22692_1) | 53 | 30 | |
| | | | | | [Haemophilus influenzae] | | | |
| 394 | 10 | 8379 | 10412 | gi\|882463 | protein-N(pi)-phosphohistidine-sugar | 53 | 34 | |
| | | | | | phosphotransferase [Escherichia oli] | | | |
| 399 | 4 | 2349 | 3098 | gi\|453287 | OmpR protein [Escherichia coli] | 53 | 27 | |
| 420 | 2 | 1378 | 719 | gi\|1437473 | nitrate transporter [Bacillus subtilis] | 53 | 28 | |
| 441 | 6 | 5361 | 7937 | gi\|1592205 | M. jannaschii predicted coding region | 53 | 38 | |
| | | | | | MJ1595 [Methanococcus jannaschii] | | | |
| 461 | 1 | 6 | 512 | gi\|1651800 | L-glutamine:D-fructose-6-P | 53 | 29 | |
| | | | | | amidotransferase [Synechocystis sp.] | | | |
| 497 | 3 | 1700 | 1960 | gi\|4328 | RIF1 gene product [Saccharomyces | 53 | 33 | |
| | | | | | cerevisiae] | | | |
| 503 | 1 | 669 | 4 | gnl\|PID\|e202290 | unknown [Lactobacillus sake] | 53 | 30 | |
| 538 | 2 | 1053 | 262 | gi\|1613769 | response regulator [Streptococcus | 53 | 30 | |
| | | | | | pneumoniae] | | | |
| 539 | 6 | 6172 | 5183 | gi\|567887 | putative repressor [Streptomyces | 53 | 32 | |
| | | | | | peucetius] | | | |
| 551 | 1 | 629 | 162 | gi\|1256649 | putative [Bacillus subtilis] | 53 | 26 | |
| 557 | 1 | 9 | 695 | gi\|143177 | putative [Bacillus subtilis] | 53 | 31 | |
| 569 | 2 | 418 | 1158 | gi\|1184684 | MucD [Pseudomonas aeruginosa] | 53 | 26 | |
| 614 | 1 | 99 | 581 | gi\|485280 | 28.2 kDa protein [Streptococcus | 53 | 32 | |
| | | | | | pneumoniae] | | | |
| 660 | 1 | 1 | 279 | gnl\|PID\|e288480 | R10E8.f [Caenorhabditis elegans] | 53 | 34 | |
| 776 | 1 | 3 | 635 | gi\|151352 | mandelate racemase (EC 5.1.2.2) | 53 | 33 | |
| | | | | | [Pseudomonas putida] | | | |
| 11 | 2 | 1117 | 1656 | gi\|143150 | levR [Bacillus subtilis] | 52 | 29 | |
| 17 | 6 | 5327 | 6559 | gnl\|PID\|e250887 | potential coding region [Clostridium | 52 | 37 | |
| | | | | | difficile] | | | |
| 19 | 31 | 17760 | 17978 | gi\|1079556 | dShc [Drosophila melanogaster] | 52 | 42 | |
| 19 | 38 | 20306 | 22627 | gn\|PID\|e139448 | host interacting protein [Bacteriophage | 52 | 32 | |
| | | | | | B1] | | | |
| 25 | 4 | 2662 | 2087 | gi\|1072067 | PepE [Rhodobacter sphaeroides] | 52 | 23 | |
| 25 | 6 | 5596 | 3407 | gi\|1303866 | YggS [Bacillus subtilis] | 52 | 34 | |
| 49 | 3 | 1135 | 1569 | gi\|496279 | putative [Bacteriophage Tuc2009] | 52 | 25 | |
| 53 | 1 | 850 | 2 | sp\|P52697\|YBHE_ECO | HYPOTHETICAL 30.2 KD PROTEIN IN MODC | 52 | 35 | |
| | | | | LI | 3′REGION. | | | |
| 54 | 9 | 10909 | 2687 | gi\|1633572 | Herpesvirus saimiri ORF73 homolog | 52 | 30 | |
| | | | | | [Kaposi's sarcoma-associated herpes-like | | | |
| | | | | | virus] | | | |
| 57 | 6 | 4779 | 8402 | gi\|142439 | ATP-dependent nuclease [Bacillus subtilis] | 52 | 31 | |
| 58 | 6 | 6446 | 5949 | gnl\|PID\|e255921 | F53F4.10 [Caenorhabditis elegans] | 52 | 31 | |
| 72 | 13 | 13446 | 13195 | gi\|532541 | ORF8 [Enterococcus faecalis] | 52 | 37 | |
| 81 | 17 | 13692 | 12520 | gi\|1732203 | GlcNAc 6-P deacetylase [Vibrio furnissii] | 52 | 35 | |
| 84 | 1 | 3 | 1355 | gi\|64288 | fast skeletal muscle Ca-ATPase [Rana | 52 | 34 | |
| | | | | | esculenta] | | | |
| 100 | 2 | 1917 | 1027 | gi\|1353560 | ORF43 [Bacteriophage rlt] | 52 | 34 | |
| 101 | 1 | 30 | 1862 | gi\|405957 | yeeF [Escherichia coli] | 52 | 24 | |
| 106 | 8 | 8517 | 7600 | gi\|454904 | rfbG gene product [Shigella flexneri] | 52 | 41 | |
| 108 | 1 | 1 | 1059 | gnl\|PID\|e255337 | unknown [Mycobacterium tuberculosis] | 52 | 29 | |
| 123 | 4 | 2899 | 3495 | gi\|1305720 | prs-associated putative membrane protein | 52 | 24 | |
| | | | | | [Escherichia coli] | | | |
| 128 | 23 | 17561 | 16740 | gi\|473805 | ‘regulatory protein sfs1 involved in | 52 | 32 | |
| | | | | | maltose metabolism’ Escherichia coli] | | | |
| 130 | 8 | 6693 | 7481 | gi\|1552775 | ATP-binding protein [Escherichia coli] | 52 | 30 | |
| 138 | 1 | 40 | 1359 | gi\|1045867 | oligoendopeptidase F [Mycoplasma | 52 | 31 | |
| | | | | | genitalium] | | | |
| 138 | 2 | 2757 | 1384 | gi\|1591425 | hypothetical protein (GP:X91006_2) | 52 | 26 | |
| | | | | | [Methanococcus jannaschii] | | | |
| 138 | 6 | 6317 | 5940 | gi\|1486247 | unknown [Bacillus subtilis] | 52 | 36 | |
| 142 | 10 | 7337 | 5466 | gi\|1151158 | repeat organellar protein [Plasmodium | 52 | 34 | |
| | | | | | chabaudi] | | | |
| 149 | 1 | 33 | 1133 | gi\|1762962 | FemA [Staphylococcus simulans] | 52 | 31 | |
| 161 | 1 | 3 | 245 | gi\|151276 | histidine utilization genes repressor | 52 | 35 | |
| | | | | | protein (hut) [Pseudomonas utida] | | | |
| 163 | 4 | 2048 | 1320 | gi\|1064810 | function unknown [Bacillus subtilis] | 52 | 27 | |
| 164 | 8 | 4882 | 5103 | gi\|57251 | precursor (AA −35 to 1766) [Rattus | 52 | 38 | |
| | | | | | norvegicus] | | | |
| 165 | 9 | 7247 | 7474 | gi\|1652671 | hypothetical protein [Synechocystis sp.] | 52 | 28 | |
| 178 | 5 | 1887 | 1681 | gi\|220704 | cAMP-dependent protein kinase catalytic | 52 | 36 | |
| | | | | | subunit-beta [Rattus sp.]gi\|191177 cAMP- | | | |
| | | | | | dependent protein kinase beta-catalytic | | | |
| | | | | | subunit Cricetulus sp.] | | | |
| 180 | 24 | 22536 | 23774 | gi\|581052 | cytosine deaminase [Escherichia coli] | 52 | 28 | |
| 190 | 9 | 8891 | 7056 | gi\|1592079 | M. jannaschii predicted coding region | 52 | 39 | |
| | | | | | MJ1429 [Methanococcus jannaschii] | | | |
| 195 | 8 | 2000 | 2272 | gi\|868024 | HIC-1 gene product [Homo sapiens] | 52 | 52 | |
| 202 | 11 | 9189 | 10145 | gi\|141861 | traA gene product [Plasmid pAD1] | 52 | 33 | |
| 204 | 4 | 1361 | 2011 | gi\|1184118 | mevalonate kinase [Methanobacterium | 52 | 33 | |
| | | | | | thermoautotrophicum] | | | |
| 204 | 8 | 4018 | 5142 | gnl\|PID\|e283860 | carotenoid biosynthetic gene ERWCRTS | 52 | 31 | |
| | | | | | homolog [Sulfolobus solfataricus] | | | |
| 208 | 2 | 1112 | 2296 | gi\|1408501 | homologous to N-acyl-L-amino acid | 52 | 35 | |
| | | | | | amidohydrolase of Bacillus | | | |
| | | | | | stearothermophilus [Bacillus subtilis] | | | |
| 215 | 1 | 772 | 2 | gi\|1480429 | putative transcriptional regulator | 52 | 26 | |
| | | | | | [Bacillus stearothemophilus] | | | |
| 218 | 4 | 4072 | 3425 | gi\|862630 | glyceraldehyde-3-Phosphate dehydrogenase | 52 | 35 | |
| | | | | | [Buchnera aphidicola] sp\|Q07234\|G3P_BUCAP | | | |
| | | | | | GLYCERALDEHYDE 3-PHOSPHATE DEHYDROGENASE | | | |
| | | | | | (EC .2.1.12) (GAPDH). | | | |
| 228 | 1 | 1 | 741 | gnl\|PID\|e264148 | unknown [Mycobacterium tuberculosis] | 52 | 29 | |
| 230 | 2 | 149 | 634 | gi\|437705 | hyaluronidase [Streptococcus pneumoniae] | 52 | 28 | |
| 233 | 8 | 6166 | 4982 | gi\|1001708 | NifS [Synechocystis sp.] | 52 | 31 | |
| 240 | 3 | 725 | 967 | gi\|399655 | Ca2+ regulatory protein [Saccharomyces | 52 | 21 | |
| | | | | | cerevisiae]sp ( P35206 I CSG2 YEAST CSG2 | | | |
| | | | | | PROTEIN PRECURSOR. | | | |
| 288 | 7 | 3171 | 4028 | gi\|147403 | mannose permease subunit II-P-Man | 52 | 27 | |
| | | | | | [Escherichia coli] | | | |
| 318 | 1 | 7 | 819 | gi\|1303849 | YggB [Bacillus subtilis] | 52 | 33 | |
| 330 | 1 | 1062 | 154 | gi\|144859 | ORF B [Clostridium perfringens] | 52 | 29 | |
| 330 | 9 | 6815 | 7213 | gi\|1439527 | EIIA-man [Lactobacillus curvatus] | 52 | 31 | |
| 345 | 9 | 8348 | 9397 | gi\|606292 | ORF_o696 [Escherichia coli] | 52 | 27 | |
| 398 | 3 | 2671 | 1877 | gi\|144859 | ORF B [Clostridium perfringens] | 52 | 29 | |
| 411 | 1 | 992 | 3 | gnl\|PID\|e283950 | daunorubicin resistance ATP-binding | 52 | 27 | |
| | | | | | protein DrrA [Sulfolobus solfataricus] | | | |
| 422 | 2 | 1292 | 585 | gi\|537214 | yjjG gene product [Escherichia coli] | 52 | 32 | |
| 436 | 2 | 1669 | 1205 | gi\|507323 | ORF1 [Bacillus stearothermophilus] | 52 | 29 | |
| 450 | 1 | 119 | 754 | gi\|1573916 | multidrug resistance protein (emrB) | 52 | 32 | |
| | | | | | [Haemophilus influenzae] | | | |
| 453 | 1 | 190 | 381 | gi\|182021 | elastin [Homo sapiens] | 52 | 40 | |
| 455 | 7 | 5767 | 4634 | gnl\|PID\|e155312 | integrase [Bacteriophage TP901-1] | 52 | 34 | |
| 479 | 1 | 138 | 758 | gi\|1742859 | ORF_ID:o327#7; similar to [SwissProt | 52 | 27 | |
| | | | | | Accession Number P54449] [Escherichia | | | |
| | | | | | coli] | | | |
| 517 | 1 | 763 | 2 | gi\|152780 | rhamnosyl transferase II [Shigella | 52 | 29 | |
| | | | | | dysenteriae] | | | |
| 518 | 3 | 1735 | 848 | gi\|153858 | wall-associated protein [Streptococcus | 52 | 20 | |
| | | | | | mutans] | | | |
| 526 | 3 | 2297 | 1848 | gi\|147402 | mannose permease subunit III-Man | 52 | 27 | |
| | | | | | [Escherichia coli] | | | |
| 617 | 1 | 1 | 462 | gi\|142863 | replication initiation protein [Bacillus | 52 | 35 | |
| | | | | | subtilis] | | | |
| 639 | 3 | 1068 | 259 | gi\|1591153 | hypothetical protein (SP:P46348) | 52 | 30 | |
| | | | | | [Methanococcus jannaschii] | | | |
| 703 | 1 | 773 | 81 | gi\|793910 | surface antigen [Homo sapiens] | 52 | 31 | |
| 737 | 1 | 235 | 2 | gi\|666000 | hypothetical protein [Bacillus subtilis] | 52 | 29 | |
| 791 | 4 | 1368 | 1802 | gnl\|PID\|e269549 | Unknown [Bacillus subtilis] | 52 | 28 | |
| 825 | 1 | 1 | 300 | gi\|732538 | No definition line found [Caenorhabditis | 52 | 28 | |
| | | | | | elegans] | | | |
| 981 | 1 | 226 | 2 | gi\|951100 | P45016a-ms1 [Mus spretus] | 52 | 36 | |
| 17 | 23 | 23542 | 22163 | gi\|1652483 | hypothetical protein [Synechocystis sp.] | 51 | 32 | |
| 65 | 6 | 4302 | 3691 | gi\|397498 | Membrane Ribose Binding Protein [Bacillus | 51 | 31 | |
| | | | | | subtilis] pir\|S42714\|S42714 membrane | | | |
| | | | | | ribose-binding protein - Bacillus ubtilis | | | |
| 69 | 5 | 2926 | 2537 | gi\|1773150 | hypothetical 14.8kd protein [Escherichia | 51 | 30 | |
| | | | | | coli] | | | |
| 92 | 1 | 973 | 44 | gnl\|PID\|e243523 | ORF YGR130c [Saccharomyces cerevisae] | 51 | 29 | |
| 103 | 6 | 5272 | 3593 | gi\|312940 | threonine kinase [Streptococcus | 51 | 32 | |
| | | | | | equisimilis] | | | |
| 111 | 7 | 4195 | 3317 | pir\|G64143\|G64143 | hypothetical protein HI0143 - Haemophilus | 51 | 29 | |
| | | | | | influenzae (strain Rd KW20) | | | |
| 115 | 7 | 4526 | 3414 | gi\|405879 | yeiH [Escherichia coli] | 51 | 27 | |
| 123 | 29 | 27788 | 28207 gi\|147402 | mannose permease subunit III-Man | 51 | 27 | | |
| | | | | | [Escherichia coli] | | | |
| 125 | 1 | 223 | 2 | gi\|4482 | SLY1 gene product [Saccharomyces | 51 | 37 | |
| | | | | | cerevisiae] | | | |
| 128 | 21 | 16156 | 15638 | gi\|606026 | ORF_o115 [Escherichia coli] | 51 | 27 | |
| 137 | 4 | 3207 | 5369 | gi\|1673692 | (AE000005) Mycoplasma pneumoniae, | 51 | 26 | |
| | | | | | C09_orf422 Protein [Mycoplasma pneumoniae] | | | |
| 138 | 28 | 18295 | 18771 | gi\|149647 | ORFZ [Listeria monocytogenes] | 51 | 31 | |
| 145 | 6 | 4054 | 5271 | gi\|1653860 | N-acyl-L-amino acid amidohydrolase | 51 | 41 | |
| | | | | | [Synechocystis sp.] | | | |
| 155 | 4 | 3019 | 2273 | gi\|1486242 | unknown [Bacillus subtilis] | 51 | 41 | |
| 180 | 8 | 7951 | 9189 | gi\|1657522 | hypothetical protein [Escherichia coli] | 51 | 32 | |
| 186 | 2 | 859 | 1620 | gi\|511497 | oleoyl-acyl carrier protein thioesterase | 51 | 29 | |
| | | | | | [Coriandrum sativum] | | | |
| 186 | 3 | 1644 | 2060 | sp\|P37348\|YECE_ECO | HYPOTHETICAL PROTEIN IN ASPS 5 REGION | 51 | 38 | |
| | | | | LI | (FRAGMENT). | | | |
| 194 | 3 | 1521 | 1276 | gi\|332697 | fusion protein [Human parainfluenza virus | 51 | 32 | |
| | | | | | 2] | | | |
| 195 | 7 | 1986 | 3767 | gi\|405570 | TraK protein shares sequence similarity | 51 | 28 | |
| | | | | | with a family of proteins ncoded on Gram- | | | |
| | | | | | negative gene transfer systems such as | | | |
| | | | | | TraD from the plasmid [Plasmid pSK41] | | | |
| 197 | 1 | 3 | 494 | gi\|1592234 | DNA topoisomerase I [Methanococcus | 51 | 32 | |
| | | | | | jannaschii] | | | |
| 198 | 2 | 1521 | 862 | gi\|1196483 | unknown protein [Lactobacillus casei] | 51 | 32 | |
| 238 | 16 | 13630 | 14730 | gi\|1772652 | 2-keto-3-deoxygluconate kinase [Haloferax | 51 | 36 | |
| | | | | | alicantei] | | | |
| 257 | 5 | 5646 | 4513 | pir\|S43367\|S43367 | metallothionein - Green crab, common shore | 51 | 38 | |
| | | | | | crab | | | |
| 261 | 6 | 4950 | 4519 | gi\|581545 | orf 4 [Staphylococcus aureus] | 51 | 26 | |
| 270 | 5 | 4480 | 4220 | gi\|1066975 | F49E2.5a [Caenorhabditis elegans] | 51 | 28 | |
| 306 | 10 | 5928 | 6905 | gi\|1752736 | gene required for phosphoylation of | 51 | 28 | |
| | | | | | oligosaccharides/ has high homology with | | | |
| | | | | | YJR061w [Saccharomyces cerevisiae] | | | |
| 324 | 3 | 1590 | 2405 | gi\|409925 | VirR positive regulator [Streptococcus | 51 | 25 | |
| | | | | | pyogenes] | | | |
| 328 | 2 | 632 | 309 | gi\|466475 | putative phospho-beta-glucosidase | 51 | 30 | |
| | | | | | [Bacillus stearothermophilus] | | | |
| | | | | | pir\|D49898\|D49898 cellobiose | | | |
| | | | | | phosphotransferase system celC - acillus | | | |
| | | | | | stearothermophilus | | | |
| 340 | 2 | 898 | 1152 | gi\|40046 | phosphoglucose isomerase A (AA 1-449) | 51 | 39 | |
| | | | | | [Bacillus stearothermophilus] | | | |
| | | | | | ir\|S15936\|NUBSSA glucose-6-phosphate | | | |
| | | | | | isomerase (EC 5.3.1.9) A - cillus | | | |
| | | | | | stearothermophilus | | | |
| 340 | 4 | 3617 | 2445 | gi\|763052 | integrase [Bacteriophage T270] | 51 | 33 | |
| 379 | 10 | 11742 | 11311 | gi\|887829 | D21141 uses 2nd start; frame determined by | 51 | 34 | |
| | | | | | Lac fusion [Escherichia oli] | | | |
| 380 | 1 | 2 | 1123 | gi\|309662 | pheromone binding protein [Plasmid pCF10] | 51 | 34 | |
| 395 | 1 | 526 | 95 | gi\|490986 | phi 105 repessor orf2 [unidentified] | 51 | 27 | |
| 424 | 4 | 2512 | 995 | gi\|1633572 | Herpesvirus saimiri ORF73 homolog | 51 | 31 | |
| | | | | | [Kaposi's sarcoma-associated herpes-like | | | |
| | | | | | virus] | | | |
| 444 | 1 | 737 | 483 | gi\|1245376 | cardiac ryanodine receptor [Oryctolagus | 51 | 34 | |
| | | | | | cuniculus] | | | |
| 483 | 1 | 1 | 642 | gi\|1303981 | YgkD [Bacillus subtilis] | 51 | 29 | |
| 500 | 1 | 2 | 550 | gi\|987094 | membrane transport protein [Streptomyces | 51 | 23 | |
| | | | | | hygroscopicus] | | | |
| 525 | 3 | 492 | 983 | pir\|A57438\|A57438 | tryptophan-rich sensory protein - | 51 | 38 | |
| | | | | | Rhodobacter sphaeroides (strain 2.4.1) | | | |
| 534 | 1 | 2 | 1165 | gi\|147516 | ribokinase [Escherichia coli] | 51 | 33 | |
| 547 | 1 | 1 | 387 | gi\|1353528 | ORF11 [Bacteriophage rlt] | 51 | 33 | |
| 553 | 2 | 1728 | 1330 | pir\|B55124\|B55124 | thioredoxin - Chlorobium sp. | 51 | 27 | |
| 574 | 1 | 2291 | 2476 | bbs\|129435 | RprX=inner membrane signal-transducing | 51 | 36 | |
| | | | | | protein [Bacteroides fragilis, Peptide, | | | |
| | | | | | 519 aa] [Bacteroides fragilis] | | | |
| 574 | 2 | 3145 | 3420 | gi\|1732202 | PTS permease for mannose subunit IIIMan N | 51 | 29 | |
| | | | | | terminal domain [Vibrio furnissii] | | | |
| 594 | 2 | 530 | 225 | gi\|1657696 | tryptophan hydroxylase [Gallus gallus] | 51 | 40 | |
| 605 | 3 | 1220 | 1936 | gnl\|PID\|e289149 | similar to B. subtilis YcsE hypothetical | 51 | 32 | |
| | | | | | protein [Bacillus subtilis] | | | |
| 609 | 1 | 1027 | 74 | gi\|1226279 | strong similarity to Schistosoma amino | 51 | 26 | |
| | | | | | acid permease (GB:L25068) [Caenorhabditis | | | |
| | | | | | elegans] | | | |
| 656 | 2 | 2033 | 2950 | gi\|143213 | putative [Bacillus subtilis] | 51 | 26 | |
| 670 | 1 | 1508 | 369 | gi\|1652222 | hypothetical protein [Synechocystis sp.] | 51 | 25 | |
| 673 | 1 | 2 | 1135 | gi\|532553 | ORF20 [Enterococcus faecalis] | 51 | 27 | |
| 674 | 2 | 1158 | 778 | gi\|467451 | unknown [Bacillus subtilis] | 51 | 26 | |
| 735 | 2 | 477 | 725 | gi\|757791 | aromatic amino acid permease | 51 | 38 | |
| | | | | | [Corynebacterium glutamicum] | | | |
| | | | | | pir\|S52754\|S52754 aromatic amino acid | | | |
| | | | | | permease - Corynebacterium lutamicum | | | |
| 924 | 1 | 794 | 3 | gi\|40663 | sialidase [Clostridium septicum] | 51 | 35 | |
| 4 | 5 | 3811 | 4728 | gi\|413948 | ipa-24d gene product [Bacillus subtilis] | 50 | 29 | |
| 8 | 3 | 3310 | 2180 | gi\|1592205 | M. jannaschii predicted coding region | 50 | 28 | |
| | | | | | MJ1595 [Methanococcus jannaschii] | | | |
| 11 | 9 | 5269 | 5520 | gi\|1651800 | L-glutamine:D-fructose-6-P | 50 | 25 | |
| | | | | | amidotransferase [Synechocystis sp.] | | | |
| 12 | 6 | 9045 | 8662 | gnl\|PID\|e254943 | unknown [Mycobacterium tuberculosis] | 50 | 23 | |
| 15 | 4 | 2911 | 4269 | gi\|1592173 | N-ethylammeline chlorohydrolase | 50 | 28 | |
| | | | | | [Methanococcus jannaschii] | | | |
| 19 | 10 | 4934 | 5530 | gi\|825569 | unknown [Saccharomyces cerevisiae] | 50 | 20 | |
| 28 | 5 | 7515 | 7057 | gi\|1230586 | orf10; Method: conceptual translation | 50 | 38 | |
| | | | | | supplied by author [Vibrio cholerae O139] | | | |
| 45 | 9 | 4279 | 5019 | gi\|1591029 | thioredoxin/glutaredoxin [Methanococcus | 50 | 32 | |
| | | | | | jannaschii] | | | |
| 54 | 16 | 7739 | 7590 | gi\|1589837 | cuticle preprocollagen [Meloidogyne | 50 | 46 | |
| | | | | | incognita] | | | |
| 59 | 5 | 1551 | 2345 | gi\|144297 | acetyl esterase (XynC) [Caldocellum | 50 | 34 | |
| | | | | | saccharolyticum] pir\|B37202\|B37202 | | | |
| | | | | | acetylesterase (EC 3.1.1.6) (XynC) - | | | |
| | | | | | Caldocellum accharolyticum | | | |
| 62 | 3 | 1650 | 1360 | gnl\|PID\|e205266 | LEA76 homologue type2 [Arabidopsis | 50 | 31 | |
| | | | | | thaliana] | | | |
| 91 | 10 | 8858 | 7521 | gi\|758229 | integrase [Bacteriophage phi-13] | 50 | 31 | |
| 112 | 5 | 3548 | 2133 | gi\|1184262 | GadC [Shigella flexneri] | 50 | 25 | |
| 123 | 13 | 13099 | 14319 | gi\|178273 | alanine:glyoxylate aminotransferase [Homo | 50 | 31 | |
| | | | | | sapiens] | | | |
| 123 | 15 | 14395 | 15675 | gi\|467342 | unknown [Bacillus subtilis] | 50 | 28 | |
| 123 | 31 | 28700 | 29494 | gi\|43942 | first subunit of EII-Sor [Klebsiella | 50 | 27 | |
| | | | | | pneumoniae] | | | |
| 124 | 2 | 1666 | 1061 | gi\|556016 | similar to plant water stress proteins; | 50 | 34 | |
| | | | | | ORF2 [Bacillus subtilis gi\|556016 similar | | | |
| | | | | | to plant water stress proteins; ORF2 | | | |
| | | | | | [Bacillus ubtilis] | | | |
| 128 | 39 | 32767 | 31829 | gi\|39993 | UDP-N-acetylmuramoylalanine--D-glutamate | 50 | 33 | |
| | | | | | ligase [Bacillus subtilis] | | | |
| 135 | 11 | 8803 | 7694 | gi\|895747 | putative cel operon regulator [Bacillus | 50 | 26 | |
| | | | | | subtilis] | | | |
| 138 | 21 | 14648 | 13653 | gi\|1591472 | malic acid transport protein | 50 | 26 | |
| | | | | | [Methanococcus jannaschii] | | | |
| 146 | 3 | 2338 | 1415 | gi\|1732200 | PTS permease for mannose subunit IIPMan | 50 | 27 | |
| | | | | | [Vibrio furnissii] | | | |
| 160 | 2 | 724 | 1302 | gnl\|PID\|e264218 | F54F3.4 [Caenorhabditis elegans] | 50 | 30 | |
| 164 | 15 | 15432 | 16364 | gi\|409286 | bmrU Bacillus subtilis] | 50 | 27 | |
| 167 | 9 | 17082 | 15394 | gi\|143156 | membrane bound protein [Bacillus subtilis] | 50 | 30 | |
| 179 | 3 | 2350 | 4485 | gi\|1408485 | yxdM gene product [Bacillus subtilis] | 50 | 24 | |
| 180 | 30 | 31056 | 30643 | gnl\|PID\|e254644 | membrane protein [Streptococcus | 50 | 27 | |
| | | | | | pneumoniae] | | | |
| 184 | 1 | 2 | 1015 | gi\|854232 | cymE gene product [Klebsiella oxytoca] | 50 | 24 | |
| 194 | 7 | 4335 | 4817 | gi\|1256652 | 25% identity to the E.coli regulatory | 50 | 30 | |
| | | | | | protein MprA; putative [Bacillus subtilis] | | | |
| 195 | 29 | 11712 | 12422 | gi\|662263 | ORF5 [Plasmid pIP501] | 50 | 25 | |
| 204 | 1 | 2 | 166 | gi\|328656 | envelope polyprotein [Human | 50 | 45 | |
| | | | | | immunodeficiency virus type 1] | | | |
| 205 | 7 | 3118 | 3861 | gi\|437697 | traE [Plasmid RP4] | 50 | 31 | |
| 216 | 11 | 7181 | 7750 | gnl\|PID\|e254644 | membrane protein [Streptococcus | 50 | 30 | |
| | | | | | pneumoniae] | | | |
| 223 | 10 | 7036 | 8082 | gi\|606423 | T09B9.1 [Caenorhabditis elegans] | 50 | 30 | |
| 223 | 22 | 19257 | 19799 | gi\|1256141 | YbbL [Bacillus subtilis] | 50 | 29 | |
| 233 | 4 | 3102 | 2320 | gi\|887826 | GUG start [Escherichia coli] | 50 | 32 | |
| 238 | 6 | 5102 | 3906 | gi\|1161219 | hoinolgous to D-amino acid dehydrogenase | 50 | 29 | |
| | | | | | enzyme [Pseudomonas aeruginosa] | | | |
| 239 | 3 | 4449 | 5159 | gi\|41519 | P30 protein (AA 1-240) [Escherichia coli] | 50 | 31 | |
| 242 | 2 | 147 | 2210 | gi\|160299 | glutamic acid-rich protein [Plasmodium | 50 | 30 | |
| | | | | | falciparum] pir\|A54514\|A54514 glutamic | | | |
| | | | | | acid-rich protein precursor - Plasmodium | | | |
| | | | | | alciparum | | | |
| 248 | 2 | 263 | 712 | gi\|143725 | putative [Bacillus subtilis] | 50 | 32 | |
| 256 | 8 | 8531 | 7395 | gnl\|PID\|e250452 | C44H9.4 [Caenorhabditis elegans] | 50 | 38 | |
| 265 | 3 | 1150 | 893 | gi\|1402527 | ORF6 [Enterococcus faecalis] | 50 | 39 | |
| 276 | 24 | 14203 | 14000 | gi\|1591019 | M. jannaschii predicted coding region | 50 | 33 | |
| | | | | | MJ0297 [Methanococcus jannaschii] | | | |
| 276 | 32 | 20601 | 19924 | gi\|1334905 | BXLF2 late reading frame, encodes gp85; | 50 | 29 | |
| | | | | | homologous to RF 37 VZV and glycoprotein H | | | |
| | | | | | of HSV (gpIII of VZV) [Human herpesvirus | | | |
| | | | | | 4] | | | |
| 286 | 1 | 1 | 747 | gnl\|PID\|e257895 | homology with truncated ORF2 of pepF2 | 50 | 32 | |
| | | | | | [Lactococcus lactis] | | | |
| 301 | 17 | 11706 | 13313 | gi\|562039 | NADH dehydrogenase, subunit 2 | 50 | 26 | |
| | | | | | [Acanthamoeba castellanii] | | | |
| | | | | | pir\|S53835\|S53835 NADH dehydrogenase chain | | | |
| | | | | | 2 - Acanthamoeba astellanii mitochondrion | | | |
| | | | | | (SGC6) | | | |
| 338 | 5 | 2206 | 3729 | gi\|829194 | bacterial cell wall hydrolase | 50 | 34 | |
| | | | | | [Enterococcus faecalis] pir\|A38109\|A38109 | | | |
| | | | | | autolysin - Enterococcus faecalis | | | |
| | | | | | sp\|P37710\|ALYS_ENTFA AUTOLYSIN (EC | | | |
| | | | | | 3.5.1.28) N-ACETYLMURAMOYL-L-ALANINE | | | |
| | | | | | AMIDASE). | | | |
| 345 | 12 | 11781 | 13379 | gnl\|PID\|e235181 | unknown [Mycobacterium tuberculosis] | 50 | 32 | |
| 360 | 2 | 2879 | 408 | gi\|40782 | bps2 gene product [Desulfurolobus | 50 | 25 | |
| | | | | | ambivalens] | | | |
| 372 | 1 | 6 | 440 | gi\|1552733 | similar to voltage-gated chloride channel | 50 | 31 | |
| | | | | | protein [Escherichia coli] | | | |
| 372 | 2 | 391 | 738 | gi\|1591749 | TRK system potassium uptake protein A | 50 | 23 | |
| | | | | | [Methanococcus jannaschii] | | | |
| 377 | 3 | 2262 | 1846 | gi\|52797 | kinesin heavy chain [Mus musculus] | 50 | 22 | |
| 392 | 1 | 433 | 2 | gi\|147213 | phnP protein [Escherichia coli] | 50 | 33 | |
| 399 | 31 | 29803 | 30186 | gi\|146288 | PTS enzyme III glucitol [Escherichia coli] | 50 | 30 | |
| 518 | 4 | 2885 | 2040 | gi\|475107 | regulatory protein [Pediococcus | 50 | 29 | |
| | | | | | pentosaceus] | | | |
| 528 | 1 | 3 | 665 | gi\|215098 | excisionase [Bacteriophage 154a] | 50 | 38 | |
| 562 | 1 | 631 | 107 | gi\|1592205 | M. jannaschii predicted coding region | 50 | 28 | |
| | | | | | MJ1595 [Methanococcus jannaschii] | | | |
| 596 | 1 | 227 | 1153 | gi\|963039 | orf gene product [Enterococcus hirae] | 50 | 26 | |
| 680 | 1 | 2 | 1090 | gi\|1050297 | product p150Glued [Neurospora crassa] | 50 | 27 | |
| 755 | 1 | 2 | 430 | gi\|1736469 | Tetracenomycin C resistance and export | 50 | 33 | |
| | | | | | protein. [Escherichia coli] | | | |
| 838 | 1 | 428 | 3 | gi\|530424 | 50S ribosomal protein [Mycoplasma | 50 | 30 | |
| | | | | | capricolum] | | | |
| 14 | 2 | 3453 | 538 | gi\|47049 | asa1 gene product (AA 1-1296) | 49 | 25 | |
| | | | | | [Enterococcus faecalis] ir\|S10223\|HMSO1F | | | |
| | | | | | aggregation protein asa1 - Enterococcus | | | |
| | | | | | faecalis asmid pAD1 | | | |
| 56 | 7 | 5367 | 4822 | gi\|924754 | glycine reductase complex selenoprotein B | 49 | 31 | |
| | | | | | [Clostridium litorale] | | | |
| 68 | 9 | 4741 | 7389 | gi\|1591494 | M. jannaschii predicted coding region | 49 | 21 | |
| | | | | | MJ0797 [Methanococcus jannaschii] | | | |
| 94 | 10 | 9425 | 6633 | gi\|1146243 | 22.4% identity with Escherichia coli DNA- | 49 | 30 | |
| | | | | | damage inducible protein . . . ; putative | | | |
| | | | | | [Bacillus subtilis] | | | |
| 98 | 12 | 12306 | 11701 | gi\|1303784 | YqeD [Bacillus subtilis] | 49 | 26 | |
| 117 | 7 | 4789 | 6228 | gi\|435493 | orf4 gene product [Lactococcus lactis] | 49 | 26 | |
| 123 | 21 | 18576 | 19745 | gi\|298032 | EF [Streptococcus suis] | 49 | 29 | |
| 125 | 4 | 2358 | 1594 | gnl\|PID\|e237295 | unknown [Saccharomyces cerevisiae] | 49 | 27 | |
| 125 | 6 | 4235 | 3453 | gi\|1573885 | glycosyl transferase (lgtD) [Haemophilus | 49 | 32 | |
| | | | | | influenzae] | | | |
| 144 | 5 | 3715 | 4062 | gi\|507130 | emm64 gene product [Streptococcus | 49 | 30 | |
| | | | | | pyogenes] | | | |
| 162 | 8 | 10472 | 9120 | gi\|47045 | NADH oxidase [Enterococcus faecalis] | 49 | 34 | |
| 179 | 18 | 18426 | 17848 | gi\|40060 | DNA polymerase III (AA 1-1437) [Bacillus | 49 | 27 | |
| | | | | | subtilis] p\|P13267\|DP3A_BACSU DNA | | | |
| | | | | | POLYMEPASE III, ALPHA CHAIN (EC 2.7.7.7). | | | |
| 180 | 19 | 18727 | 19917 | gi\|143000 | proton glutamate symport protein [Bacillus | 49 | 31 | |
| | | | | | stearothermophilus] pir\|S26247\|S26247 | | | |
| | | | | | glutamate/aspartate transport protein - | | | |
| | | | | | Bacillus tearothermophilus | | | |
| 224 | 1 | 145 | 1371 | gi\|1103862 | TolA [Pseudomonas aeruginosa] | 49 | 32 | |
| 236 | 8 | 10955 | 9249 | gi\|431272 | lysis protein [Bacillus subtilis] | 49 | 28 | |
| 278 | 1 | 757 | 2 | gi\|467478 | unknown [Bacillus subtilis] | 49 | 29 | |
| 290 | 8 | 6860 | 7366 | gi\|466875 | nifU; B1496_C1_157 [Mycobacterium leprae] | 49 | 35 | |
| 318 | 5 | 4065 | 3190 | gi\|144859 | ORF B [Clostridium perfringens] | 49 | 25 | |
| 318 | 8 | 6052 | 5033 | gi\|1439528 | EIIC-man [Lactobacillus curvatus] | 49 | 30 | |
| 335 | 1 | 534 | 40 | gi\|216861 | 24K membrane protein [Pseudomonas | 49 | 24 | |
| | | | | | aeruginosa] | | | |
| 338 | 4 | 2861 | 2169 | gnl\|PID\|e288536 | F37H8.a [Caenorhabditis elegans] | 49 | 30 | |
| 346 | 4 | 1257 | 2273 | gi\|536970 | ORF_f543 [Escherichia coli] | 49 | 25 | |
| 355 | 20 | 12902 | 15262 | gi\|292836 | trichohyalin [Homo sapiens] | 49 | 20 | |
| 366 | 1 | 1 | 1437 | gi\|405857 | yehU [Escherichia coli] | 49 | 26 | |
| 375 | 8 | 7663 | 6470 | gi\|1573546 | H. influenzae predicted coding region | 49 | 30 | |
| | | | | | H10561 [Haemophilus influenzae] | | | |
| 377 | 2 | 1624 | 392 | gi\|532553 | ORF20 [Enterococcus faecalis] | 49 | 27 | |
| 399 | 5 | 3960 | 3142 | gi\|1742362 | nta operon transcriptional regulator. | 49 | 29 | |
| | | | | | [Escherichia coli] | | | |
| 456 | 1 | 1070 | 342 | gi\|290533 | similar to E. coli ORF adjacent to suc | 49 | 27 | |
| | | | | | operon; similar to gntR class f regulatory | | | |
| | | | | | proteins [Escherichia coli] | | | |
| 619 | 1 | 2 | 232 | gi\|665956 | ribosomal protein S20 homolog [Aeromonas | 49 | 41 | |
| | | | | | sobria] sp\|P45786\|RS20_AERHY 30S RIBOSOMAL | | | |
| | | | | | PROTEIN S20 (FRAGMENT). | | | |
| | | | | | sp\|P45788\|RS20_AERSO 30S RIBOSOMAL PROTEIN | | | |
| | | | | | S20 (FRAGMENT). | | | |
| 621 | 1 | 319 | 942 | gi\|149456 | nisin-resistance protein [Lactococcus | 49 | 29 | |
| | | | | | lactis] | | | |
| 630 | 1 | 3 | 1190 | gi\|537145 | ORF_f437 [Escherichia coli] | 49 | 34 | |
| 736 | 1 | 859 | 2 | gi\|1592020 | hypothetical protein (SP:P37555) | 49 | 27 | |
| | | | | | [Methanococcus jannaschii[ | | | |
| 849 | 1 | 232 | 11 | gi\|145514 | cyclopropane fatty acid synthase | 49 | 35 | |
| | | | | | [Escherichia coli] | | | |
| 47 | 11 | 14140 | 13307 | gi\|1045937 | M. genitalium predicted coding region | 48 | 34 | |
| | | | | | MG246 [Mycoplasma genitalium] | | | |
| 103 | 4 | 2492 | 1605 | gi\|1591514 | membrane protein [Methanococcus | 48 | 19 | |
| | | | | | jannaschii] | | | |
| 127 | 7 | 6836 | 5736 | gi\|1573128 | hypothetical [Haemophilus influenzae] | 48 | 24 | |
| 138 | 22 | 14742 | 15590 | gi\|580884 | ipa-89d gene product [Bacillus subtilis] | 48 | 33 | |
| 160 | 6 | 3048 | 3665 | gi\|1652295 | serine esterase [Synechocystis sp.] | 48 | 28 | |
| 162 | 3 | 3048 | 2491 | gn\|143830 | xpaC [Bacillus subtilis] | 48 | 13 | |
| 193 | 2 | 1257 | 310 | gi\|1591153 | hypothetical protein (SP:P46348) | 48 | 24 | |
| | | | | | [Methanococcus jannaschii] | | | |
| 219 | 1 | 61 | 573 | gnl\|PID\|e257628 | ORF [Lactococcus lactis] | 48 | 32 | |
| 221 | 11 | 5952 | 6428 | gi\|1303733 | YgaN [Bacillus subtilis] | 48 | 31 | |
| 232 | 4 | 2776 | 1712 | gi\|142707 | comG2 gene product [Bacillus subtilis] | 48 | 24 | |
| 236 | 6 | 8618 | 7689 | gi\|550075 | cephalosporin-C deacetylase [Bacillus | 48 | 26 | |
| | | | | | subtilis] | | | |
| 238 | 28 | 25896 | 26825 | gi\|47906 | rha regulatory protein [Salmonella | 48 | 31 | |
| | | | | | typhimurium] | | | |
| 251 | 2 | 1935 | 640 | gi\|1143026 | ORF10 [Spiroplasma virus] | 48 | 30 | |
| 252 | 1 | 2036 | 3 | gnl\|PID\|e228699 | homologous to yqb0 of the skin element | 48 | 37 | |
| | | | | | [Bacillus subtilis] | | | |
| 269 | 1 | 481 | 2 | gi\|1045975 | sensory rhodopsin II transducer | 48 | 28 | |
| | | | | | [Mycoplasma genitalium] | | | |
| 315 | 5 | 4604 | 2649 | gi\|396400 | similar to eukaryotic Na+/H+ exchangers | 48 | 30 | |
| | | | | | [Escherichia coli] sp\|P32703\|YJCE_ECOLI | | | |
| | | | | | HYPOTHETICAL 60.5 KD PROTEIN IN SOXR-ACS | | | |
| | | | | | NTERGENIC REGION (O549). | | | |
| 327 | 1 | 128 | 916 | gi\|216314 | esterase [Bacillus stearothermophilus] | 48 | 30 | |
| 330 | 6 | 4486 | 5337 | gi\|43942 | first subunit of EII-Sor [Klebsiella | 48 | 21 | |
| | | | | | pneumoniae] | | | |
| 330 | 7 | 5325 | 6230 | gi\|147404 | mannose permease subunit II-M-Man | 48 | 33 | |
| | | | | | [Escherichia coli] | | | |
| 345 | 10 | 9571 | 10521 | gi\|1736789 | Collagenase precursor (EC 3.4.-.-). | 48 | 26 | |
| | | | | | [Escherichia coli] | | | |
| 509 | 1 | 1 | 444 | gi\|606376 | ORF_o162 [Escherichia coli] | 48 | 33 | |
| 531 | 1 | 624 | 109 | sp\|P50848\|YPWA_BAC | HYPOTHETICAL 58.2 KD PROTEIN IN KDGT-XPT | 48 | 33 | |
| | | | | SU | INTERGENIC REGION. | | | |
| 549 | 3 | 962 | 369 | gi\|1001212 | molybdenum cofactor biosynthesis protein C | 48 | 32 | |
| | | | | | [Synechocystis sp.] | | | |
| 725 | 1 | 3 | 500 | gi\|1151158 | repeat organellar protein [Plasmodium | 48 | 25 | |
| | | | | | chabaudi] | | | |
| 789 | 1 | 133 | 717 | gi\|42724 | rhaS (AA 1-278) [Escherichia coli] | 48 | 39 | |
| 936 | 1 | 32 | 316 | gi\|532549 | ORF16 [Enterococcus faecalis] | 48 | 45 | |
| 2 | 2 | 2662 | 449 | gi\|929878 | J1027 gene product [Saccharomyces | 47 | 20 | |
| | | | | | cerevisiae] | | | |
| 4 | 2 | 1002 | 2192 | gi\|763052 | integrase [Bacteriophage T270] | 47 | 29 | |
| 21 | 8 | 6350 | 5355 | gi\|1066343 | mu-crystallin [Homo sapiens] | 47 | 29 | |
| 25 | 3 | 915 | 2048 | gi\|1064813 | homologous to sp:PHOR_BACSU [Bacillus | 47 | 21 | |
| | | | | | subtilis] | | | |
| 59 | 2 | 953 | 1378 | gi\|872306 | integral membrane protein [Streptomyces | 47 | 26 | |
| | | | | | pristinaespiralis] pir\|S57509\|S57509 | | | |
| | | | | | integral membrane protein - Streptomyces | | | |
| | | | | | ristinaespiralis | | | |
| 81 | 7 | 4970 | 4206 | gi\|1591754 | hypothetical protein (SP:P39364) | 47 | 22 | |
| | | | | | [Methanococcus jannaschii] | | | |
| 82 | 3 | 1534 | 866 | gi\|397526 | clumping factor [Staphylococcus aureus] | 47 | 21 | |
| 110 | 5 | 2313 | 3767 | gil 151928 | 48 kDa protein [Rhodobacter sphaeroides] | 47 | 26 | |
| 150 | 11 | 7839 | 9107 | gnl\|PID\|e275490 | C30H6.k [Caenorhabditis elegans] | 47 | 16 | |
| 161 | 2 | 116 | 1450 | gnl\|PID\|e283830 | aminotransferase [Sulfolobus solfataricus] | 47 | 23 | |
| 165 | 8 | 8081 | 6129 | gi\|924925 | heparinase III protein [Cytophaga | 47 | 29 | |
| | | | | | heparina] | | | |
| 180 | 31 | 31515 | 31054 | gi\|1591753 | N-acetylglucosamine-1-phosphate | 47 | 29 | |
| | | | | | transferase [Methanococcus jannaschii] | | | |
| 194 | 11 | 8247 | 9236 | gi\|1480429 | putative transcriptional regulator | 47 | 26 | |
| | | | | | [Bacillus stearothermophilus] | | | |
| 225 | 2 | 1039 | 701 | gi\|212992 | Protein sequence and annotation available | 47 | 33 | |
| | | | | | soon via Swiss-Prot; available at present | | | |
| | | | | | via e-mail from LABEIT@EMBL-Heidelberg.DE | | | |
| | | | | | [Homo sapiens] | | | |
| 232 | 1 | 196 | 969 | gi\|293033 | integrase [Bacteriophage phi-LC3] | 47 | 30 | |
| 232 | 6 | 3687 | 3340 | gi\|142706 | comGl gene product [Bacillus subtilis] | 47 | 28 | |
| 233 | 10 | 8424 | 6739 | gi\|887816 | possible start 13 codons upstream, for | 47 | 35 | |
| | | | | | o765 [Escherichia coli] | | | |
| 346 | 2 | 706 | 1083 | gi\|536970 | ORF_f543 [Escherichia coli] | 47 | 27 | |
| 352 | 1 | 112 | 843 | gi\|1591857 | H+-transporting ATPase [Methanococcus | 47 | 28 | |
| | | | | | jannaschii] | | | |
| 410 | 1 | 3 | 980 | gi\|1652869 | NADH dehydrogenase [Synechocystis sp.] | 47 | 30 | |
| 465 | 2 | 1976 | 1749 | gi\|211659 | p68 protein; c-rel proto-oncogene [Gallus | 47 | 30 | |
| | | | | | gallus] | | | |
| 491 | 3 | 3752 | 2466 | gi\|881434 | ORFP [Bacillus subtilis] | 47 | 24 | |
| 501 | 1 | 48 | 809 | gi\|467429 | unknown [Bacillus subtilis] | 47 | 33 | |
| 532 | 1 | 3 | 287 | gi\|755724 | alpha-toxin [Clostridium novyi] | 47 | 32 | |
| 578 | 1 | 707 | 81 | gi\|532547 | ORF14 [Enterococcus faecalis] | 47 | 30 | |
| 605 | 4 | 2051 | 2470 | gi\|1783233 | hypothetical [Bacillus subtilis] | 47 | 22 | |
| 626 | 3 | 2459 | 2169 | gi\|1573573 | 2′,3′-cyclic-nucleotide 2′- | 47 | 44 | |
| | | | | | phosphodiesterase (cpdB) [Haemophilus | | | |
| | | | | | influenzae] | | | |
| 650 | 1 | 1042 | 341 | gi\|404802 | integrase [Saccharopolyspora erythraea] | 47 | 26 | |
| 665 | 1 | 714 | 1175 | gi\|143655 | sporulation protein [Bacillus subtilis] | 47 | 22 | |
| 754 | 2 | 1086 | 736 | gi\|143835 | PBSX repressor [Bacillus subtilis] | 47 | 27 | |
| 845 | 1 | 2 | 241 | gi\|1303952 | YqjA [Bacillus subtilis] | 47 | 26 | |
| 911 | 1 | 1 | 456 | gi\|1019640 | ORFX (a homolog to the prgX gene of the | 47 | 26 | |
| | | | | | pheromone response plasmid pCF10); | | | |
| | | | | | putative [Plasmid pHKK701] | | | |
| 933 | 1 | 16 | 303 | gi\|331002 | first methionine codon in the ECLF1 ORF | 47 | 29 | |
| | | | | | [Saimiriine herpesvirus 2] gi\|60394 ORF | | | |
| | | | | | 73; ECLF1 [Saimiriine herpesvirus 2] | | | |
| 17 | 17 | 13073 | 13675 | gi\|1304597 | abortive phage resistance protein | 46 | 27 | |
| | | | | | [Lactococcus lactis] | | | |
| 19 | 11 | 5515 | 6393 | gi\|1353529 | ORF12 [Bacteriophage rlt] | 46 | 28 | |
| 42 | 3 | 2460 | 3011 | gi\|1064814 | homologous to sp:PHOP_BACEUB [Bacillus | 46 | 33 | |
| | | | | | subtilis] | | | |
| 49 | 9 | 4042 | 5793 | gnl\|PID\|e59644 | predicted 86.4kd protein; S2Kd observed | 46 | 22 | |
| | | | | | [Mycobacteriophage 15] | | | |
| 74 | 6 | 4039 | 3434 | gi\|143542 | PNA polymerase sigma-30 factor [Bacillus | 46 | 27 | |
| | | | | | licheniformis] pir\|B28625\|SZBSSL | | | |
| | | | | | transcription initiation factor sigma H - | | | |
| | | | | | acillus licheniformis | | | |
| 89 | 14 | 14259 | 12967 | gi\|1499089 | M. jannaschii predicted coding region | 46 | 32 | |
| | | | | | MJ0305 [Methanococcus jannaschii] | | | |
| 89 | 15 | 15737 | 14427 | gi\|1653339 | hypothetical protein [Synechocystis sp.] | 46 | 22 | |
| 94 | 13 | 12634 | 11132 | gi\|1402515 | membrane-spanning transporter protein | 46 | 23 | |
| | | | | | [Clostnidium perfringens] | | | |
| 100 | 18 | 13493 | 11958 | gi\|15470 | portal protein [Bacteriophage SPP1] | 46 | 31 | |
| 144 | 2 | 2364 | 1126 | gnl\|PID\|e183450 | hypothetical EcsB protein [Bacillus | 46 | 25 | |
| | | | | | subtilis] | | | |
| 144 | 9 | 8977 | 6236 | gi\|710421 | unknown [Staphylococcus aureus] | 46 | 24 | |
| 152 | 7 | 3397 | 4557 | gnl\|PID\|e254991 | hypothetical protein [Bacillus subtilis] | 46 | 25 | |
| 158 | 7 | 7144 | 5993 | gi\|1045800 | ribose transport system permease protein | 46 | 28 | |
| | | | | | [Mycoplasma genitalium] | | | |
| 180 | 11 | 10882 | 10055 | gi\|303953 | esterase [Acinetobacter calcoaceticus] | 46 | 23 | |
| 181 | 3 | 1173 | 976 | gi\|1591638 | M. jannaschii predicted coding region | 46 | 36 | |
| | | | | | MJ0975 [Methanococcus jannaschii] | | | |
| 240 | 1 | 715 | 221 | gi\|1766062 | Ats1 [Schizosaccharomyces pombe] | 46 | 28 | |
| 254 | 2 | 499 | 2 | gi\|153661 | translational initiation factor IF2 | 46 | 32 | |
| | | | | | [Enterococcus faecium] sp\|P18311\|IF2_ENTFC | | | |
| | | | | | INITIATION FACTOR IF-2. | | | |
| 262 | 4 | 5276 | 4431 | pir\|A45605\|A45605 | mature-parasite-infected erythrocyte | 46 | 20 | |
| | | | | | surface antigen MESA - Plasmodium | | | |
| | | | | | falciparum | | | |
| 309 | 1 | 2 | 673 | gi\|1651714 | type 4 prepilin peptidase [Synechocystis | 46 | 40 | |
| | | | | | sp.] | | | |
| 312 | 1 | 18 | 872 | gi\|580884 | ipa-89d gene product [Bacillus subtilis] | 46 | 32 | |
| 324 | 6 | 4450 | 4836 | gi\|1061418 | ArsC [Plasmid R46] | 46 | 28 | |
| 345 | 1 | 2241 | 1333 | gi\|144859 | ORF B [Clostridium perfringens] | 46 | 24 | |
| 386 | 4 | 1438 | 2421 | gi\|405894 | 1-phosphofructokinase [Escherichia coli] | 46 | 31 | |
| 395 | 8 | 3584 | 3853 | gnl\|PID\|e120267 | sucrose-phosphate synthase [Beta vulgaris] | 46 | 25 | |
| 491 | 2 | 2527 | 1169 | gnl\|PID\|e267595 | Unknown, similar to peptidases [Bacillus | 46 | 29 | |
| | | | | | subtilis] | | | |
| 495 | 3 | 612 | 869 | gi\|406286 | triose phosphate/phosphate translocator | 46 | 27 | |
| | | | | | [Flaveria pringlei] pir\|537553\|S37553 | | | |
| | | | | | triose phosphate/3- | | | |
| | | | | | phosphoglycerate/phosphate ranslocator - | | | |
| | | | | | Flaveria pringlei | | | |
| 513 | 1 | 2 | 946 | gi\|143024 | glucose-resistance amylase regulator | 46 | 26 | |
| | | | | | [Bacillus subtilis] pir\|S15318\|515318 ccpA | | | |
| | | | | | protein - Bacillus subtilis | | | |
| | | | | | sp\|P25144\|CCPA_BACSU GLUCOSE-RESISTANCE | | | |
| | | | | | AMYLASE REGULATOR CATABOLITE CONTROL | | | |
| | | | | | PROTEIN). | | | |
| 520 | 3 | 914 | 2674 | gi\|1163086 | microfilarial sheath protein SHP3 [Brugia | 46 | 27 | |
| | | | | | malayi] | | | |
| 554 | 1 | 3 | 788 | gi\|413972 | ipa-48r gene product [Bacillus subtilis] | 46 | 27 | |
| 568 | 1 | 1574 | 3 | gi\|532549 | ORF16 [Enterococcus faecalis] | 46 | 28 | |
| 809 | 1 | 506 | 135 | gi\|49021 | surface exclusion protein (SEA1) | 46 | 28 | |
| | | | | | [Enterococcus faecalis] ir\|522452\|S22452 | | | |
| | | | | | surface exclusion protein sea1 precursor - | | | |
| | | | | | terococcus faecalis plasmid pAD1 | | | |
| 813 | 1 | 2 | 1090 | gi\|150556 | surface protein [Plasmid pCF10] | 46 | 34 | |
| 78 | 2 | 4915 | 2516 | gi\|577295 | The ha1225 gene product is related to | 45 | 20 | |
| | | | | | human alpha-glucosidase. [Homo apiens] | | | |
| 81 | 9 | 6123 | 5386 | gi\|147200 | phnF protein [Escherichia coli] | 45 | 28 | |
| 85 | 1 | 120 | 761 | gi\|457514 | gltC [Bacillus subtilis] | 45 | 19 | |
| 94 | 11 | 10681 | 9668 | gi\|289753 | homology with nucleolin protein; putative | 45 | 23 | |
| | | | | | [Caenorhabditis elegans] pir\|S44897\|S44897 | | | |
| | | | | | ZK1236.2 protein - Caenorhabditis elegans | | | |
| | | | | | sp\|P34618\|Y082_CAEEL HYPOTHETICAL 33.8 KD | | | |
| | | | | | PROTEIN ZK1236.2 IN HROMOSOME III. | | | |
| 108 | 3 | 2427 | 1789 | gnl\|PID\|e263931 | OrfD [Streptococcus pneumoniae] | 45 | 27 | |
| 108 | 4 | 3338 | 2352 | gi\|606150 | ORF_f309 [Escherichia coli] | 45 | 25 | |
| 131 | 6 | 3981 | 5309 | gi\|1590845 | hypothetical protein (PIR:551413) | 45 | 36 | |
| | | | | | [Methanococcus jannaschii] | | | |
| 144 | 11 | 10215 | 8944 | gi\|1001554 | hypothetical protein [Synechocystis sp.] | 45 | 30 | |
| 164 | 11 | 8247 | 6736 | gi\|409925 | VirR positive regulator [Streptococcus | 45 | 22 | |
| | | | | | pyogenes] | | | |
| 192 | 1 | 1598 | 591 | gi\|1736826 | Lysozyme M1 precursor (EC 3.2.1.17) (1,4- | 45 | 27 | |
| | | | | | b-N-acetylmuramidase M1). [Escherichia | | | |
| | | | | | coli] | | | |
| 223 | 16 | 14409 | 15212 | gi\|1651958 | hypothetical protein [Synechocystis sp.] | 45 | 32 | |
| 279 | 7 | 5236 | 5772 | gi\|1736514 | Isochorismatase (EC 3.3.2.1) (2,3 dihydro- | 45 | 29 | |
| | | | | | 2,3 dihydroxybenzoate synthase). | | | |
| | | | | | [Escherichia coli] | | | |
| 364 | 3 | 2419 | 4098 | gi\|309662 | pheromone binding protein [Plasmid pCF10] | 45 | 26 | |
| 459 | 1 | 2 | 307 | gi\|1679640 | ORFA [Mycoplasma mycoides mycoides SC] | 45 | 27 | |
| 491 | 1 | 1022 | 135 | sp\|P27434\|YFGA_ECO | HYPOTHETICAL 36.2 KD PROTEIN IN NDK-GCPE | 45 | 20 | |
| | | | | LI | INTERGENIC REGION. | | | |
| 496 | 1 | 847 | 2 | gi\|1208489 | serum resistance locus BrkB [Synechocystis | 45 | 19 | |
| | | | | | sp.] | | | |
| 542 | 2 | 1169 | 804 | gi\|1064811 | function unknown [Bacillus subtilis] | 45 | 28 | |
| 63 | 3 | 1047 | 1919 | gi\|39848 | U3 [Bacillus subtilis] | 44 | 26 | |
| 93 | 3 | 1108 | 1374 | sp\|Q4747\|SRF2_SAC | SURFACTIN SYNTHETASE SUBUNIT 2. | 44 | 27 | |
| | | | | SU | | | | |
| 155 | 10 | 8354 | 7620 | sp\|P35136\|SERA_BAC | D-3-PHOSPHOGLYCERATE DEHYDROGENASE (EC | 44 | 29 | |
| | | | | SU | 1.1.1.95) (PGDH). | | | |
| 215 | 2 | 2192 | 1134 | gi\|468760 | ORF334 [Rhizobium meliloti] | 44 | 31 | |
| 303 | 1 | 466 | 2 | gi\|431950 | similar to a B.subtilis gene (GB: | 44 | 22 | |
| | | | | | BACHEMEHY_5) [Clostridium asteurianum] | | | |
| 310 | 1 | 284 | 39 | pir\|S01294\|S01294 | intermediate filament protein B - Roman | 44 | 26 | |
| | | | | | snail | | | |
| 311 | 1 | 122 | 2668 | gi\|532549 | ORF16 [Enterococcus faecalis] | 44 | 27 | |
| 320 | 1 | 709 | 2 | gi\|290801 | member of super-family of ABC proteins | 44 | 23 | |
| | | | | | [Francisella tularensis (var. ovicida)] | | | |
| 341 | 14 | 13882 | 12998 | gi\|142863 | replication initiation protein [Bacillus | 44 | 16 | |
| | | | | | subtilis] | | | |
| 345 | 15 | 16445 | 18001 | gi\|151282 | DL-hydantoinase [Pseudomonas sp.] | 44 | 34 | |
| 386 | 3 | 1340 | 570 | sp\|P46117\|YARA_PRO | HYPOTHETICAL 31.5 KD PROTEIN IN AARA | 44 | 19 | |
| | | | | ST | 3′REGION. | | | |
| 862 | 1 | 483 | 4 | gi\|929796 | precursor of the major merozoite surface | 44 | 26 | |
| | | | | | antigens [Plasmodium alciparum] | | | |
| 19 | 3 | 1695 | 1372 | gi\|603263 | Ye1055p [Saccharomyces cerevisiae] | 43 | 31 | |
| 45 | 17 | 14045 | 14995 | gnl\|PID\|e233895 | hypothetical protein [Bacillus subtilis] | 43 | 32 | |
| 57 | 1 | 667 | 317 | gi\|664840 | TagB [Dictyostelium discoideum] | 43 | 22 | |
| 71 | 2 | 1537 | 2568 | gi\|1303981 | YgkD [Bacillus subtilis] | 43 | 36 | |
| 72 | 18 | 20511 | 20164 | gi\|349045 | merozoite surface antigen 2 [Plasmodium | 43 | 36 | |
| | | | | | falciparum] | | | |
| 94 | 9 | 6581 | 6039 | gi\|1146245 | putative [Bacillus subtilis] | 43 | 28 | |
| 180 | 17 | 16391 | 17656 | gi\|290540 | f445 [Escherichia coli] | 43 | 24 | |
| 252 | 2 | 2407 | 1829 | gi\|154381 | chemoreceptor [Salmonella typhimurium] | 43 | 19 | |
| 276 | 30 | 19091 | 18480 | gi\|15470 | portal protein [Bacteriophage SPP1] | 43 | 23 | |
| 311 | 2 | 2666 | 4639 | gi\|160299 | glutamic acid-rich protein [Plasmodium | 43 | 28 | |
| | | | | | falciparum] pir\|A54514\|A54514 glutamic | | | |
| | | | | | acid-rich protein precursor - Plasmodium | | | |
| | | | | | alciparum | | | |
| 631 | 2 | 1126 | 2328 | gi\|1519696 | coded for by C. elegans cDNA yk126f9.5; | 43 | 27 | |
| | | | | | coded for by C. elegans cDNA yk159h6.3; | | | |
| | | | | | coded for by C. elegans cDNA yk126f9.3; | | | |
| | | | | | coded for by C. elegans cDNA yk159h6.5 | | | |
| | | | | | [Caenorhabditis elegans] | | | |
| 11 | 3 | 1509 | 2342 | gi\|143150 | levR [Bacillus subtilis] | 42 | 21 | |
| 45 | 14 | 10730 | 12028 | gi\|666069 | orf2 gene product [Lactobacillus | 42 | 23 | |
| | | | | | leichmannii] | | | |
| 72 | 19 | 21070 | 21981 | gnl\|PID\|e236595 | orf7 gene product [Enterococcus faecalis] | 42 | 23 | |
| 123 | 35 | 32205 | 32768 | gi\|1772652 | 2-keto-3-deoxygluconate kinase [Haloferax | 42 | 27 | |
| | | | | | alicantei] | | | |
| 136 | 5 | 2737 | 2375 | gi\|153858 | wall-associated protein [Streptococcus | 42 | 27 | |
| | | | | | mutans | | | |
| 167 | 4 | 2701 | 6540 | gi\|1519696 | coded for by C. elegans cDNA yk126f9.5; | 42 | 27 | |
| | | | | | coded for by C. elegans cDNA yk159h6.3; | | | |
| | | | | | coded for by C. elegans cDNA yk126f9.3; | | | |
| | | | | | coded for by C. elegans cDNA yk159h6.5 | | | |
| | | | | | [Caenorhabditis elegans] | | | |
| 195 | 31 | 12430 | 13155 | pir\|S33124\|S33124 | tpr protein - human | 42 | 24 | |
| 211 | 1 | 187 | 2 | gi\|1653346 | GDP-mannose pyrophosphorylase | 42 | 33 | |
| | | | | | [Synechocystis sp.] | | | |
| 242 | 13 | 8089 | 12447 | gi\|951460 | FIM-C.1 gene product [Xenopus laevis] | 42 | 31 | |
| 305 | 5 | 4354 | 5340 | gi\|1408485 | yxdM gene product [Bacillus subtilis] | 42 | 25 | |
| 355 | 18 | 9964 | 12549 | gi\|532549 | ORF16 [Enterococcus faecalis] | 42 | 30 | |
| 446 | 4 | 4428 | 5261 | gi\|47528 | glucosyltransferase S [Streptococcus | 42 | 25 | |
| | | | | | salivarius] | | | |
| 656 | 3 | 2866 | 3456 | gi\|142857 | MreD protein [Bacillus subtilis] | 42 | 25 | |
| 686 | 11 | 3646 | 3921 | pir\|A44805\|A44805 | eggshell protein - fluke (Schistosoma | 42 | 42 | |
| | | | | | haematobium) (subelone SH.E 2-1) | | | |
| 920 | 1 | 41 | 316 | gi\|532549 | ORF16 [Enterococcus faecalis] | 42 | 40 | |
| 23 | 3 | 729 | 487 | gi\|414525 | meiotin-1 [Lilium longiflorum] | 41 | 41 | |
| 456 | 5 | 3511 | 2324 | gi\|1591610 | probable ATP-dependent helicase | 41 | 21 | |
| | | | | | [Methanococcus jannaschii] | | | |
| 98 | 17 | 16843 | 16274 | gi\|1742129 | Immunity repressor protein. [Escherichia | 41 | 23 | |
| | | | | | coli] | | | |
| 167 | 6 | 6734 | 9811 | gnl\|PID\|e249616 | F56H9.1 [Caenorhabditis elegans] | 41 | 37 | |
| 171 | 13 | 10879 | 11871 | gi\|331002 | first methionine codon in the ECLF1 ORE | 41 | 23 | |
| | | | | | [Saimiriine herpesvirus 2] gi\|60394 ORF | | | |
| | | | | | 73; ECLF1 [Saimiriine herpesvirus 2] | | | |
| 181 | 2 | 1012 | 500 | gi\|455315 | ORF 4 [Plasmid pIP404] | 41 | 24 | |
| 230 | 4 | 3664 | 3224 | gi\|498251 | glutamate/aspartate transporter II [Homo | 41 | 22 | |
| | | | | | sapiens] | | | |
| 718 | 1 | 2 | 613 | gi\|984656 | ORF3 [Salmonella typhimurium] | 41 | 22 | |
| 219 | 30 | 16391 | 17770 | gi\|806704 | Upf2p [Saccharomyces cerevisiae] | 40 | 21 | |
| 164 | 16 | 16440 | 17951 | gi\|348056 | trans-acting positive regulator [Bacillus | 40 | 22 | |
| | | | | | anthracis] | | | |
| 200 | 12 | 5956 | 4841 | gi\|1574243 | H. influenzae predicted coding region | 40 | 24 | |
| | | | | | HI1405 [Haemophilus influenzae] | | | |
| 216 | 10 | 6799 | 7194 | gi\|146279 | glucitol-specific enzyme III (gutB) | 40 | 27 | |
| | | | | | [Escherichia coli] | | | |
| 292 | 13 | 8633 | 10741 | gi\|1008233 | ORF YJL076w [Saccharomyces cerevisiae] | 40 | 18 | |
| 345 | 13 | 14050 | 15333 | gi\|581051 | cytosine permease [Escherichia coli] | 40 | 25 | |
| 521 | 1 | 177 | 1466 | gi\|289614 | homology with glucose induced repressor, | 40 | 18 | |
| | | | | | GRR1; putative Caenorhabditis elegans] | | | |
| 64 | 3 | 2646 | 1855 | gi\|154924 | spectinomycin adenyltransferase | 39 | 27 | |
| | | | | | [Transposon Tn554] | | | |
| 100 | 17 | 12037 | 10565 | gi\|1052806 | product required for head morphogenesis | 39 | 24 | |
| | | | | | [Bacteriophage SPP1] | | | |
| 529 | 1 | 326 | 4939 | gi\|295671 | selected as a weak suppressor of a mutant | 39 | 19 | |
| | | | | | of the subunit AC40 of DNA ependant RNA | | | |
| | | | | | polymerase I and III [Saccharomyces | | | |
| | | | | | cerevisiae] | | | |
| 49 | 2 | 518 | 931 | gi\|166162 | Bacteriophage phi-11 int gene activator | 38 | 19 | |
| | | | | | [Staphylococcus acteriophage phi 11] | | | |
| 54 | 19 | 11264 | 10854 | gi\|160186 | circumsporozoite protein [Plasmodium | 38 | 31 | |
| | | | | | vivax] | | | |
| 164 | 21 | 22793 | 23587 | gi\|603857 | secreted acid phosphatase 2 (SAP2) | 38 | 18 | |
| | | | | | [Leishniania mexicana] | | | |
| 167 | 3 | 2322 | 2756 | gi\|435039 | proline-rich cell wall protein [Gossypium | 38 | 36 | |
| | | | | | hirsutum] | | | |
| 204 | 2 | 133 | 798 | gi\|396401 | No definition line found [Escherichia | 38 | 25 | |
| | | | | | coli] | | | |
| 475 | 2 | 761 | 1792 | gi\|1574532 | H. influenzae predicted coding region | 38 | 27 | |
| | | | | | HI1680 [Haemophilus influenzae] | | | |
| 164 | 19 | 20738 | 21385 | gi\|165704 | [Rabbit smooth muscle myosin light chain | 37 | 20 | |
| | | | | | kinase mRNA, complete DS.], gene product | | | |
| | | | | | [Oryctolagus cuniculus] | | | |
| 394 | 6 | 5649 | 6395 | gi\|603857 | secreted acid phosphatase 2 (SAP2) | 36 | 16 | |
| | | | | | [Leishmania mexicana] | | | |
| 958 | 1 | 1 | 459 | gi\|951460 | FITA-C.1 gene product [Xenopus laevis] | 36 | 28 | |
| 399 | 21 | 16383 | 21359 | gi\|1707247 | partial CDS [Caenorhabditis elegans] | 34 | 13 | |
| 150 | 12 | 9056 | 11740 | gi\|1015903 | ORF YJR151c [Saccharomyces cerevisiae] | 33 | 19 | |
| 195 | 34 | 13017 | 15512 | gi\|632549 | NF-180 [Petromyzon marinus] | 33 | 18 | |

[0354] TABLE 3
E. faecalis-Putative coding regions of novel proteins not similar
to known proteins

| Contig ID | ORF ID | Start (nt) | Stop (nt) |
|---|---|---|---|
| 2 | 1 | 458 | 3 |
| 2 | 3 | 2208 | 2624 |
| 5 | 3 | 928 | 1440 |
| 8 | 6 | 4792 | 5877 |
| 8 | 7 | 5480 | 5262 |
| 12 | 1 | 2 | 832 |
| 12 | 2 | 771 | 4622 |
| 13 | 1 | 2 | 1684 |
| 14 | 1 | 531 | 130 |
| 15 | 2 | 862 | 1197 |
| 16 | 1 | 51 | 200 |
| 17 | 4 | 3309 | 3665 |
| 17 | 13 | 10079 | 10261 |
| 17 | 18 | 14431 | 13682 |
| 17 | 22 | 21525 | 21956 |
| 17 | 27 | 27055 | 27567 |
| 18 | 4 | 2172 | 1591 |
| 18 | 5 | 2524 | 2249 |
| 18 | 7 | 3467 | 3715 |
| 18 | 8 | 4082 | 3555 |
| 18 | 9 | 4333 | 4055 |
| 18 | 10 | 4395 | 4204 |
| 18 | 11 | 4498 | 4677 |
| 18 | 12 | 4656 | 5393 |
| 18 | 13 | 5878 | 5492 |
| 18 | 15 | 6296 | 6931 |
| 19 | 1 | 1047 | 676 |
| 19 | 2 | 1068 | 1247 |
| 19 | 4 | 1747 | 2031 |
| 19 | 5 | 2244 | 2612 |
| 19 | 7 | 2797 | 2943 |
| 19 | 9 | 3873 | 4730 |
| 19 | 13 | 6884 | 7420 |
| 19 | 14 | 7428 | 8042 |
| 19 | 16 | 9246 | 8425 |
| 19 | 17 | 9412 | 9615 |
| 19 | 19 | 9733 | 9918 |
| 19 | 20 | 10032 | 10334 |
| 19 | 21 | 10422 | 11009 |
| 19 | 22 | 11516 | 11944 |
| 19 | 24 | 12423 | 12881 |
| 19 | 26 | 14606 | 15427 |
| 19 | 27 | 15414 | 15848 |
| 19 | 28 | 15802 | 16134 |
| 19 | 29 | 16064 | 16393 |
| 19 | 32 | 17846 | 18052 |
| 19 | 33 | 18021 | 18356 |
| 19 | 34 | 18334 | 18684 |
| 19 | 35 | 18659 | 19036 |
| 19 | 36 | 18991 | 19677 |
| 19 | 37 | 19671 | 20132 |
| 19 | 39 | 22603 | 23337 |
| 19 | 40 | 23319 | 25580 |
| 21 | 2 | 762 | 262 |
| 21 | 5 | 3440 | 2925 |
| 21 | 10 | 7684 | 7241 |
| 23 | 5 | 2098 | 2652 |
| 23 | 8 | 4912 | 4709 |
| 23 | 9 | 4911 | 5246 |
| 23 | 10 | 5087 | 5353 |
| 23 | 22 | 14318 | 14926 |
| 23 | 23 | 14924 | 15565 |
| 23 | 24 | 15559 | 16083 |
| 23 | 29 | 17567 | 18022 |
| 25 | 2 | 553 | 1005 |
| 25 | 5 | 3363 | 2653 |
| 26 | 2 | 1220 | 1654 |
| 27 | 1 | 297 | 4 |
| 28 | 1 | 239 | 2833 |
| 29 | 5 | 3244 | 2822 |
| 29 | 6 | 4014 | 3301 |
| 29 | 7 | 4168 | 4557 |
| 29 | 8 | 5620 | 4595 |
| 32 | 3 | 2646 | 1375 |
| 32 | 4 | 2573 | 3010 |
| 39 | 9 | 4636 | 4986 |
| 40 | 2 | 1346 | 981 |
| 43 | 1 | 120 | 620 |
| 43 | 4 | 1972 | 2280 |
| 45 | 3 | 1557 | 1961 |
| 45 | 4 | 2012 | 2230 |
| 45 | 5 | 2218 | 2553 |
| 45 | 11 | 7226 | 5670 |
| 45 | 12 | 7270 | 10113 |
| 45 | 13 | 10013 | 10732 |
| 46 | 1 | 42 | 872 |
| 46 | 2 | 886 | 1125 |
| 46 | 4 | 2807 | 3100 |
| 47 | 4 | 5101 | 5625 |
| 47 | 10 | 13239 | 12847 |
| 49 | 1 | 106 | 504 |
| 49 | 8 | 2858 | 4132 |
| 49 | 10 | 5777 | 6193 |
| 49 | 11 | 6166 | 6720 |
| 52 | 5 | 3505 | 3110 |
| 52 | 7 | 5160 | 5603 |
| 52 | 8 | 5662 | 5459 |
| 54 | 2 | 400 | 729 |
| 54 | 4 | 1326 | 1610 |
| 54 | 5 | 2354 | 1335 |
| 54 | 6 | 1676 | 2080 |
| 54 | 7 | 2151 | 2576 |
| 54 | 12 | 4181 | 3954 |
| 54 | 13 | 5975 | 6289 |
| 54 | 14 | 6869 | 7144 |
| 54 | 15 | 7433 | 7107 |
| 54 | 18 | 9764 | 11086 |
| 55 | 2 | 252 | 440 |
| 56 | 2 | 1344 | 658 |
| 57 | 9 | 12450 | 12605 |
| 58 | 7 | 7066 | 6425 |
| 59 | 3 | 1350 | 952 |
| 59 | 4 | 1225 | 1515 |
| 59 | 7 | 2958 | 3200 |
| 62 | 6 | 4116 | 3007 |
| 63 | 1 | 77 | 364 |
| 63 | 2 | 455 | 1060 |
| 63 | 7 | 5422 | 5910 |
| 63 | 8 | 5870 | 6751 |
| 63 | 9 | 6688 | 7296 |
| 64 | 2 | 1849 | 1523 |
| 64 | 4 | 3183 | 2644 |
| 64 | 5 | 3422 | 3213 |
| 65 | 5 | 3787 | 3389 |
| 65 | 7 | 5043 | 4300 |
| 65 | 8 | 5354 | 4959 |
| 65 | 9 | 7005 | 6328 |
| 67 | 6 | 3719 | 4060 |
| 68 | 2 | 569 | 348 |
| 68 | 5 | 3234 | 2821 |
| 68 | 6 | 3808 | 3221 |
| 68 | 10 | 7495 | 8106 |
| 70 | 2 | 2102 | 1614 |
| 70 | 3 | 2019 | 2231 |
| 71 | 3 | 3362 | 3787 |
| 72 | 21 | 22464 | 22709 |
| 72 | 22 | 22690 | 23019 |
| 72 | 23 | 23013 | 23834 |
| 73 | 1 | 154 | 2 |
| 74 | 1 | 61 | 486 |
| 74 | 3 | 1334 | 1981 |
| 75 | 4 | 3227 | 2136 |
| 75 | 5 | 3994 | 3251 |
| 75 | 6 | 3348 | 3632 |
| 75 | 7 | 4519 | 4043 |
| 75 | 8 | 4296 | 4529 |
| 75 | 10 | 6518 | 5769 |
| 76 | 2 | 1079 | 1897 |
| 76 | 4 | 2113 | 2436 |
| 76 | 6 | 4737 | 4105 |
| 77 | 3 | 1874 | 2704 |
| 77 | 4 | 2665 | 2459 |
| 78 | 3 | 5814 | 5398 |
| 79 | 3 | 848 | 1645 |
| 79 | 4 | 2121 | 1642 |
| 81 | 8 | 5392 | 4961 |
| 81 | 13 | 8428 | 8874 |
| 81 | 21 | 15746 | 14802 |
| 82 | 1 | 858 | 4 |
| 82 | 2 | 198 | 383 |
| 83 | 3 | 2194 | 2604 |
| 83 | 4 | 2728 | 2405 |
| 83 | 6 | 2855 | 3172 |
| 83 | 10 | 7188 | 6184 |
| 83 | 11 | 7415 | 7065 |
| 83 | 17 | 12259 | 12561 |
| 83 | 21 | 15890 | 16456 |
| 83 | 23 | 16946 | 17251 |
| 84 | 5 | 7071 | 7949 |
| 85 | 7 | 6518 | 6174 |
| 89 | 2 | 1012 | 599 |
| 89 | 3 | 1382 | 939 |
| 89 | 4 | 2350 | 1370 |
| 89 | 5 | 2523 | 2314 |
| 89 | 9 | 7505 | 7182 |
| 89 | 16 | 15846 | 15673 |
| 89 | 19 | 20070 | 19045 |
| 90 | 1 | 3 | 689 |
| 91 | 7 | 3834 | 4127 |
| 91 | 8 | 4288 | 5268 |
| 91 | 9 | 7259 | 5748 |
| 91 | 12 | 9737 | 8973 |
| 91 | 13 | 10162 | 9731 |
| 92 | 3 | 1458 | 958 |
| 92 | 4 | 1934 | 1287 |
| 93 | 2 | 479 | 949 |
| 93 | 4 | 1344 | 1727 |
| 94 | 1 | 770 | 45 |
| 94 | 3 | 1460 | 1618 |
| 94 | 5 | 2279 | 1734 |
| 94 | 12 | 11000 | 10641 |
| 95 | 11 | 7674 | 7907 |
| 95 | 12 | 8604 | 8056 |
| 95 | 13 | 8725 | 8546 |
| 96 | 1 | 758 | 1018 |
| 96 | 2 | 1038 | 1469 |
| 98 | 5 | 6809 | 5994 |
| 98 | 10 | 10338 | 10652 |
| 98 | 11 | 10650 | 11558 |
| 99 | 2 | 232 | 513 |
| 100 | 4 | 3728 | 4048 |
| 100 | 6 | 5866 | 5378 |
| 100 | 7 | 6574 | 5921 |
| 100 | 8 | 6923 | 6534 |
| 100 | 9 | 7355 | 6921 |
| 100 | 10 | 7698 | 7339 |
| 100 | 11 | 8226 | 7744 |
| 100 | 13 | 9395 | 8514 |
| 100 | 15 | 10368 | 10102 |
| 100 | 19 | 14770 | 13505 |
| 100 | 20 | 15300 | 14758 |
| 100 | 21 | 15783 | 15298 |
| 100 | 23 | 17699 | 17292 |
| 100 | 25 | 20933 | 20625 |
| 100 | 26 | 21200 | 20946 |
| 100 | 28 | 23713 | 23156 |
| 100 | 29 | 23948 | 23691 |
| 100 | 30 | 24312 | 23965 |
| 100 | 31 | 24550 | 24287 |
| 100 | 32 | 24912 | 24565 |
| 100 | 33 | 25173 | 24910 |
| 100 | 34 | 26339 | 25158 |
| 100 | 36 | 27251 | 26994 |
| 100 | 37 | 27945 | 27232 |
| 100 | 39 | 28442 | 28227 |
| 100 | 40 | 28657 | 28403 |
| 100 | 46 | 30439 | 31146 |
| 100 | 47 | 31158 | 31712 |
| 101 | 2 | 850 | 464 |
| 101 | 3 | 2453 | 1899 |
| 102 | 6 | 5023 | 5616 |
| 102 | 9 | 6704 | 7111 |
| 103 | 7 | 5454 | 5296 |
| 105 | 2 | 1244 | 1828 |
| 106 | 4 | 5114 | 3294 |
| 106 | 6 | 7622 | 6168 |
| 106 | 7 | 6577 | 6867 |
| 108 | 6 | 5192 | 4158 |
| 110 | 1 | 2 | 454 |
| 110 | 6 | 3689 | 4207 |
| 110 | 9 | 9374 | 8553 |
| 110 | 10 | 9903 | 9361 |
| 110 | 11 | 10175 | 9843 |
| 111 | 6 | 3118 | 3267 |
| 112 | 4 | 2170 | 1043 |
| 114 | 2 | 1347 | 1135 |
| 116 | 8 | 4782 | 5147 |
| 117 | 4 | 2437 | 2670 |
| 117 | 6 | 3876 | 4640 |
| 117 | 8 | 5643 | 5927 |
| 117 | 9 | 6195 | 6488 |
| 117 | 12 | 9655 | 9837 |
| 119 | 1 | 3 | 500 |
| 119 | 2 | 670 | 1158 |
| 119 | 4 | 2730 | 2284 |
| 121 | 3 | 2276 | 3670 |
| 123 | 14 | 14304 | 14555 |
| 123 | 16 | 15305 | 15147 |
| 123 | 24 | 21896 | 22663 |
| 123 | 34 | 31458 | 32207 |
| 125 | 3 | 1581 | 1300 |
| 125 | 7 | 4516 | 4346 |
| 126 | 2 | 85 | 312 |
| 127 | 2 | 1047 | 787 |
| 127 | 3 | 2006 | 1299 |
| 127 | 4 | 3432 | 1924 |
| 128 | 4 | 3094 | 2747 |
| 128 | 5 | 3466 | 3305 |
| 128 | 6 | 4625 | 3507 |
| 128 | 7 | 4726 | 4550 |
| 128 | 13 | 8947 | 8522 |
| 128 | 15 | 9325 | 9582 |
| 128 | 17 | 10126 | 10380 |
| 128 | 24 | 17649 | 18038 |
| 129 | 1 | 276 | 1769 |
| 130 | 7 | 6478 | 6702 |
| 130 | 11 | 9386 | 9769 |
| 133 | 7 | 6622 | 7380 |
| 135 | 2 | 2289 | 1153 |
| 135 | 3 | 3380 | 2271 |
| 135 | 5 | 3778 | 3930 |
| 135 | 6 | 5835 | 5137 |
| 135 | 7 | 6649 | 5852 |
| 135 | 8 | 7021 | 6647 |
| 135 | 9 | 7420 | 7034 |
| 136 | 2 | 963 | 379 |
| 136 | 3 | 2009 | 939 |
| 136 | 4 | 2344 | 1973 |
| 138 | 4 | 5051 | 3636 |
| 138 | 11 | 8499 | 8753 |
| 138 | 12 | 8682 | 8536 |
| 138 | 13 | 8923 | 9270 |
| 138 | 14 | 9333 | 9887 |
| 138 | 15 | 9628 | 10308 |
| 138 | 16 | 10422 | 10216 |
| 138 | 23 | 15980 | 15678 |
| 138 | 24 | 16437 | 16063 |
| 138 | 30 | 19388 | 19828 |
| 139 | 3 | 1068 | 1466 |
| 139 | 4 | 3338 | 1983 |
| 139 | 5 | 3769 | 3317 |
| 139 | 6 | 4114 | 3818 |
| 139 | 7 | 4838 | 4236 |
| 139 | 10 | 5639 | 5175 |
| 142 | 1 | 369 | 106 |
| 142 | 2 | 1005 | 367 |
| 142 | 3 | 2140 | 980 |
| 142 | 4 | 2504 | 2127 |
| 142 | 5 | 2821 | 2474 |
| 142 | 6 | 3294 | 2806 |
| 142 | 7 | 4000 | 3635 |
| 143 | 1 | 650 | 3 |
| 143 | 3 | 1090 | 173 |
| 143 | 4 | 1044 | 433 |
| 144 | 10 | 7570 | 8403 |
| 144 | 12 | 10727 | 10335 |
| 145 | 1 | 188 | 30 |
| 145 | 2 | 775 | 978 |
| 150 | 9 | 6876 | 7166 |
| 150 | 13 | 11538 | 11242 |
| 152 | 1 | 35 | 445 |
| 152 | 2 | 405 | 914 |
| 152 | 3 | 912 | 1430 |
| 152 | 4 | 1349 | 2212 |
| 152 | 5 | 2210 | 2896 |
| 152 | 6 | 2739 | 3368 |
| 152 | 8 | 4479 | 4694 |
| 152 | 11 | 6647 | 7321 |
| 154 | 7 | 4557 | 4195 |
| 155 | 3 | 1227 | 2180 |
| 155 | 12 | 8726 | 9022 |
| 156 | 3 | 3179 | 2664 |
| 158 | 11 | 10876 | 11220 |
| 160 | 1 | 545 | 3 |
| 162 | 1 | 228 | 1349 |
| 162 | 2 | 2513 | 1653 |
| 162 | 7 | 9163 | 7664 |
| 162 | 9 | 10619 | 10990 |
| 162 | 11 | 11891 | 11427 |
| 163 | 3 | 1043 | 1234 |
| 163 | 5 | 3217 | 2021 |
| 163 | 6 | 3455 | 3198 |
| 163 | 8 | 5611 | 4931 |
| 163 | 9 | 5969 | 5580 |
| 163 | 10 | 6144 | 5926 |
| 164 | 2 | 1100 | 1687 |
| 164 | 9 | 5729 | 5259 |
| 164 | 10 | 6778 | 5639 |
| 164 | 12 | 8277 | 8450 |
| 164 | 17 | 18224 | 18526 |
| 164 | 24 | 24751 | 24536 |
| 164 | 27 | 25764 | 26369 |
| 165 | 1 | 17 | 481 |
| 165 | 2 | 2213 | 1389 |
| 165 | 12 | 9871 | 9689 |
| 165 | 14 | 11416 | 10367 |
| 166 | 3 | 1250 | 1669 |
| 167 | 5 | 3774 | 3439 |
| 167 | 7 | 10479 | 14498 |
| 167 | 10 | 17476 | 18768 |
| 168 | 2 | 665 | 393 |
| 172 | 9 | 7018 | 6701 |
| 172 | 10 | 7097 | 7930 |
| 173 | 1 | 2 | 412 |
| 173 | 3 | 2341 | 2024 |
| 173 | 6 | 4234 | 5055 |
| 173 | 9 | 7882 | 7295 |
| 173 | 10 | 7413 | 7571 |
| 173 | 14 | 12308 | 11748 |
| 174 | 4 | 2350 | 3021 |
| 174 | 5 | 3082 | 3498 |
| 178 | 3 | 866 | 1105 |
| 179 | 8 | 8115 | 7816 |
| 179 | 17 | 17407 | 17135 |
| 180 | 4 | 3524 | 4537 |
| 180 | 5 | 4686 | 5687 |
| 180 | 6 | 5897 | 6949 |
| 180 | 9 | 9721 | 9299 |
| 180 | 10 | 9996 | 9715 |
| 180 | 20 | 19805 | 19954 |
| 180 | 23 | 21808 | 21509 |
| 180 | 25 | 24127 | 26460 |
| 180 | 27 | 27977 | 27474 |
| 181 | 1 | 381 | 82 |
| 183 | 1 | 190 | 2 |
| 183 | 4 | 1849 | 2211 |
| 183 | 5 | 2350 | 2568 |
| 183 | 7 | 3592 | 2978 |
| 183 | 8 | 4176 | 3571 |
| 185 | 2 | 1260 | 1424 |
| 185 | 3 | 2722 | 1301 |
| 185 | 4 | 3612 | 2671 |
| 187 | 2 | 727 | 1302 |
| 187 | 3 | 1293 | 1745 |
| 187 | 5 | 2592 | 2173 |
| 189 | 1 | 18 | 2180 |
| 190 | 1 | 466 | 68 |
| 190 | 2 | 896 | 411 |
| 190 | 4 | 1878 | 2165 |
| 190 | 5 | 2740 | 2384 |
| 190 | 10 | 10281 | 8875 |
| 191 | 2 | 861 | 658 |
| 191 | 3 | 1096 | 827 |
| 192 | 2 | 1881 | 1564 |
| 193 | 1 | 316 | 2 |
| 193 | 7 | 4667 | 3813 |
| 194 | 1 | 30 | 641 |
| 194 | 2 | 608 | 1582 |
| 195 | 1 | 2 | 433 |
| 195 | 2 | 431 | 943 |
| 195 | 3 | 1055 | 465 |
| 195 | 4 | 972 | 1487 |
| 195 | 5 | 1507 | 1995 |
| 195 | 6 | 3314 | 1851 |
| 195 | 9 | 3089 | 3529 |
| 195 | 10 | 3521 | 3312 |
| 195 | 12 | 6604 | 6837 |
| 195 | 13 | 7049 | 6786 |
| 195 | 14 | 6825 | 7700 |
| 195 | 15 | 7682 | 7047 |
| 195 | 16 | 7202 | 7417 |
| 195 | 18 | 8278 | 9036 |
| 195 | 20 | 8583 | 8837 |
| 195 | 21 | 8871 | 9602 |
| 195 | 22 | 9251 | 9403 |
| 195 | 23 | 9600 | 10022 |
| 195 | 25 | 10020 | 10226 |
| 195 | 26 | 11229 | 10024 |
| 195 | 27 | 10659 | 10946 |
| 195 | 28 | 10944 | 11318 |
| 195 | 30 | 12449 | 12246 |
| 195 | 32 | 13212 | 12505 |
| 195 | 33 | 12558 | 12773 |
| 195 | 35 | 13673 | 14011 |
| 195 | 36 | 14811 | 14143 |
| 195 | 38 | 16061 | 16363 |
| 195 | 39 | 16320 | 16799 |
| 195 | 40 | 16515 | 16333 |
| 196 | 1 | 608 | 1411 |
| 197 | 9 | 9269 | 9553 |
| 200 | 2 | 1103 | 249 |
| 200 | 3 | 1335 | 1033 |
| 200 | 4 | 1769 | 1284 |
| 200 | 5 | 2124 | 1747 |
| 200 | 6 | 2792 | 2106 |
| 200 | 7 | 3073 | 2708 |
| 200 | 8 | 3510 | 3061 |
| 200 | 9 | 4126 | 3467 |
| 200 | 10 | 4350 | 4042 |
| 200 | 11 | 4847 | 4368 |
| 200 | 14 | 6487 | 6182 |
| 200 | 15 | 6681 | 6499 |
| 200 | 18 | 10749 | 9307 |
| 200 | 20 | 11787 | 11464 |
| 200 | 22 | 12859 | 12410 |
| 201 | 1 | 509 | 105 |
| 201 | 3 | 3704 | 3237 |
| 202 | 7 | 5296 | 4817 |
| 205 | 2 | 117 | 323 |
| 205 | 5 | 1669 | 2148 |
| 206 | 2 | 546 | 196 |
| 206 | 3 | 841 | 632 |
| 206 | 4 | 1622 | 777 |
| 206 | 9 | 5466 | 5035 |
| 209 | 1 | 472 | 86 |
| 209 | 3 | 1510 | 1280 |
| 210 | 3 | 3175 | 2363 |
| 210 | 6 | 5281 | 4868 |
| 210 | 8 | 5619 | 6002 |
| 211 | 4 | 1708 | 3756 |
| 212 | 1 | 919 | 2 |
| 213 | 2 | 1107 | 1826 |
| 214 | 2 | 2106 | 1237 |
| 214 | 4 | 3677 | 3132 |
| 217 | 6 | 3548 | 3162 |
| 218 | 1 | 1 | 1218 |
| 218 | 3 | 2731 | 3378 |
| 218 | 5 | 4188 | 4667 |
| 219 | 3 | 1386 | 910 |
| 219 | 4 | 1595 | 1344 |
| 220 | 2 | 794 | 1144 |
| 221 | 1 | 110 | 295 |
| 221 | 2 | 326 | 880 |
| 221 | 4 | 1496 | 1825 |
| 221 | 5 | 1907 | 2200 |
| 221 | 6 | 2169 | 2555 |
| 221 | 8 | 3425 | 4246 |
| 221 | 9 | 4233 | 5111 |
| 221 | 12 | 6419 | 6757 |
| 221 | 13 | 6751 | 6987 |
| 221 | 14 | 6911 | 7120 |
| 221 | 16 | 7400 | 7909 |
| 221 | 17 | 7963 | 8199 |
| 221 | 19 | 8597 | 9079 |
| 222 | 17 | 11376 | 11597 |
| 223 | 6 | 5328 | 5008 |
| 223 | 12 | 12189 | 13307 |
| 223 | 13 | 13291 | 13716 |
| 223 | 14 | 13601 | 13434 |
| 223 | 17 | 15331 | 15068 |
| 223 | 19 | 15940 | 17160 |
| 223 | 21 | 17710 | 19089 |
| 223 | 23 | 19800 | 20708 |
| 223 | 25 | 22857 | 22027 |
| 223 | 26 | 22757 | 23365 |
| 225 | 1 | 756 | 394 |
| 225 | 5 | 3793 | 2945 |
| 226 | 1 | 141 | 536 |
| 226 | 2 | 521 | 871 |
| 228 | 8 | 5473 | 4835 |
| 229 | 7 | 6749 | 6057 |
| 232 | 2 | 1461 | 910 |
| 233 | 5 | 3359 | 3063 |
| 233 | 11 | 7226 | 7456 |
| 236 | 1 | 3 | 482 |
| 237 | 1 | 1 | 219 |
| 237 | 3 | 1197 | 991 |
| 237 | 5 | 2009 | 2329 |
| 237 | 6 | 2319 | 3056 |
| 237 | 8 | 3261 | 3701 |
| 237 | 10 | 3900 | 4763 |
| 237 | 11 | 4730 | 4963 |
| 238 | 11 | 9966 | 9238 |
| 238 | 19 | 16613 | 17728 |
| 238 | 29 | 26812 | 27663 |
| 239 | 2 | 1576 | 4245 |
| 239 | 5 | 6393 | 6956 |
| 239 | 6 | 6902 | 7237 |
| 240 | 5 | 1537 | 1809 |
| 241 | 1 | 228 | 1040 |
| 242 | 9 | 6581 | 7015 |
| 242 | 10 | 6988 | 7368 |
| 242 | 12 | 7488 | 7928 |
| 245 | 2 | 1670 | 1251 |
| 247 | 2 | 1558 | 1812 |
| 250 | 4 | 3210 | 2998 |
| 251 | 1 | 622 | 2 |
| 252 | 3 | 2598 | 2383 |
| 252 | 4 | 2911 | 2564 |
| 253 | 1 | 1 | 345 |
| 253 | 2 | 359 | 898 |
| 254 | 1 | 2 | 307 |
| 254 | 3 | 318 | 4 |
| 256 | 5 | 3768 | 4040 |
| 256 | 7 | 7292 | 6639 |
| 256 | 9 | 9589 | 8465 |
| 257 | 2 | 992 | 294 |
| 257 | 4 | 4528 | 3596 |
| 257 | 7 | 6894 | 6718 |
| 257 | 8 | 7252 | 6884 |
| 257 | 9 | 7986 | 7231 |
| 258 | 2 | 544 | 804 |
| 258 | 3 | 1224 | 2921 |
| 258 | 4 | 2964 | 2728 |
| 258 | 5 | 2919 | 3752 |
| 258 | 6 | 4120 | 5298 |
| 261 | 1 | 3 | 362 |
| 264 | 1 | 582 | 361 |
| 264 | 2 | 881 | 561 |
| 264 | 3 | 1367 | 879 |
| 264 | 4 | 1966 | 1361 |
| 264 | 5 | 2316 | 1945 |
| 264 | 6 | 2636 | 2295 |
| 264 | 7 | 3194 | 2634 |
| 264 | 8 | 3531 | 3055 |
| 265 | 2 | 398 | 817 |
| 265 | 4 | 1583 | 1071 |
| 265 | 6 | 3293 | 3009 |
| 265 | 7 | 3186 | 3046 |
| 266 | 1 | 451 | 2 |
| 266 | 4 | 1983 | 2225 |
| 266 | 7 | 2540 | 2325 |
| 268 | 1 | 798 | 1223 |
| 268 | 2 | 1912 | 1265 |
| 270 | 4 | 3977 | 4186 |
| 270 | 6 | 4397 | 4573 |
| 271 | 5 | 2719 | 3066 |
| 271 | 6 | 3041 | 3352 |
| 271 | 9 | 6278 | 5862 |
| 271 | 10 | 6550 | 5993 |
| 271 | 14 | 10291 | 10004 |
| 272 | 3 | 1870 | 1199 |
| 272 | 4 | 3378 | 1831 |
| 276 | 5 | 2350 | 1994 |
| 276 | 8 | 3702 | 3103 |
| 276 | 9 | 4441 | 3692 |
| 276 | 10 | 4595 | 4416 |
| 276 | 12 | 8173 | 7382 |
| 276 | 14 | 10001 | 9762 |
| 276 | 15 | 11065 | 9890 |
| 276 | 17 | 11642 | 11250 |
| 276 | 19 | 12892 | 12503 |
| 276 | 21 | 13302 | 13099 |
| 276 | 22 | 13663 | 13271 |
| 276 | 23 | 13995 | 13642 |
| 276 | 25 | 15065 | 14211 |
| 276 | 27 | 16293 | 15955 |
| 276 | 29 | 18482 | 16563 |
| 276 | 31 | 19951 | 19016 |
| 279 | 3 | 1469 | 1675 |
| 279 | 4 | 1600 | 1923 |
| 279 | 5 | 2269 | 2105 |
| 279 | 10 | 7698 | 7279 |
| 280 | 3 | 3138 | 2968 |
| 281 | 4 | 2055 | 2552 |
| 282 | 1 | 316 | 2 |
| 282 | 2 | 456 | 1232 |
| 282 | 3 | 1957 | 1346 |
| 283 | 1 | 1 | 450 |
| 283 | 3 | 1098 | 1556 |
| 283 | 5 | 2062 | 2238 |
| 283 | 7 | 3127 | 3312 |
| 286 | 3 | 2883 | 2698 |
| 287 | 4 | 2359 | 2180 |
| 290 | 10 | 8820 | 9074 |
| 290 | 11 | 9008 | 9172 |
| 291 | 2 | 1103 | 855 |
| 291 | 3 | 2622 | 1123 |
| 292 | 1 | 2 | 283 |
| 292 | 2 | 701 | 330 |
| 292 | 5 | 2459 | 2866 |
| 292 | 7 | 4252 | 4995 |
| 292 | 9 | 6704 | 7096 |
| 292 | 10 | 7066 | 7827 |
| 292 | 12 | 8377 | 8622 |
| 292 | 15 | 11502 | 12674 |
| 292 | 17 | 13326 | 13727 |
| 292 | 18 | 13738 | 14778 |
| 294 | 1 | 117 | 623 |
| 294 | 2 | 905 | 723 |
| 294 | 6 | 2496 | 2272 |
| 295 | 7 | 4274 | 4510 |
| 300 | 4 | 3525 | 3337 |
| 301 | 6 | 6714 | 4852 |
| 301 | 13 | 10150 | 9914 |
| 301 | 16 | 11316 | 11657 |
| 301 | 18 | 13199 | 14398 |
| 301 | 19 | 15724 | 14657 |
| 306 | 3 | 1135 | 2727 |
| 306 | 4 | 2742 | 4025 |
| 306 | 5 | 4004 | 4552 |
| 306 | 6 | 4527 | 5117 |
| 306 | 7 | 5131 | 5466 |
| 306 | 9 | 5642 | 5968 |
| 306 | 11 | 7000 | 8013 |
| 306 | 12 | 7926 | 8138 |
| 306 | 13 | 8180 | 8908 |
| 306 | 14 | 8899 | 9120 |
| 306 | 15 | 9118 | 9510 |
| 306 | 16 | 9508 | 9963 |
| 306 | 17 | 9964 | 11313 |
| 306 | 18 | 11319 | 11570 |
| 306 | 19 | 11540 | 11707 |
| 306 | 20 | 11626 | 11856 |
| 310 | 2 | 1126 | 176 |
| 310 | 5 | 4215 | 3556 |
| 311 | 4 | 5671 | 6006 |
| 311 | 5 | 6173 | 6778 |
| 311 | 6 | 6833 | 7225 |
| 311 | 7 | 7236 | 7520 |
| 311 | 8 | 7492 | 7926 |
| 312 | 2 | 859 | 1506 |
| 312 | 3 | 1449 | 1808 |
| 312 | 4 | 2043 | 2306 |
| 313 | 4 | 3568 | 3122 |
| 319 | 1 | 3 | 881 |
| 319 | 2 | 832 | 1185 |
| 321 | 1 | 638 | 898 |
| 321 | 4 | 1862 | 2131 |
| 321 | 5 | 2168 | 2548 |
| 321 | 6 | 2470 | 3159 |
| 321 | 7 | 3069 | 3395 |
| 321 | 8 | 3461 | 3733 |
| 324 | 1 | 3 | 692 |
| 324 | 2 | 867 | 1592 |
| 324 | 4 | 2392 | 3021 |
| 327 | 6 | 5052 | 5213 |
| 330 | 5 | 3745 | 3464 |
| 333 | 2 | 998 | 717 |
| 333 | 3 | 947 | 1534 |
| 335 | 2 | 1024 | 521 |
| 338 | 11 | 8869 | 8591 |
| 340 | 5 | 3931 | 3608 |
| 341 | 6 | 3484 | 3155 |
| 341 | 7 | 4348 | 3482 |
| 341 | 8 | 6419 | 4332 |
| 341 | 10 | 9264 | 7672 |
| 341 | 11 | 10777 | 9245 |
| 341 | 12 | 12026 | 10779 |
| 343 | 1 | 459 | 262 |
| 343 | 4 | 3905 | 2661 |
| 345 | 4 | 3467 | 3201 |
| 345 | 14 | 15320 | 16447 |
| 345 | 16 | 18409 | 18927 |
| 345 | 18 | 19974 | 20465 |
| 347 | 1 | 763 | 1155 |
| 350 | 5 | 3273 | 2980 |
| 351 | 1 | 693 | 280 |
| 351 | 2 | 1268 | 654 |
| 351 | 3 | 1716 | 1222 |
| 353 | 4 | 2749 | 2546 |
| 354 | 1 | 2 | 298 |
| 355 | 16 | 8911 | 9399 |
| 355 | 19 | 12476 | 12904 |
| 355 | 22 | 15766 | 15608 |
| 355 | 23 | 17165 | 17461 |
| 355 | 25 | 18313 | 19104 |
| 355 | 26 | 19092 | 19598 |
| 355 | 27 | 19692 | 19495 |
| 355 | 28 | 19734 | 20198 |
| 355 | 29 | 20196 | 20471 |
| 356 | 2 | 2204 | 1536 |
| 356 | 4 | 2887 | 2537 |
| 356 | 5 | 3167 | 2859 |
| 357 | 1 | 381 | 4 |
| 360 | 3 | 3167 | 2877 |
| 361 | 1 | 7 | 909 |
| 363 | 1 | 1405 | 167 |
| 363 | 6 | 7178 | 8404 |
| 364 | 1 | 41 | 331 |
| 366 | 2 | 1386 | 1598 |
| 367 | 19 | 8690 | 8941 |
| 368 | 4 | 1786 | 1947 |
| 369 | 4 | 1652 | 1428 |
| 372 | 6 | 5262 | 4534 |
| 376 | 2 | 625 | 293 |
| 377 | 1 | 331 | 2 |
| 379 | 4 | 2975 | 3142 |
| 382 | 3 | 2951 | 3277 |
| 382 | 4 | 4183 | 3320 |
| 383 | 6 | 6158 | 5637 |
| 386 | 9 | 5725 | 6027 |
| 387 | 2 | 486 | 980 |
| 390 | 2 | 1668 | 2057 |
| 390 | 3 | 3499 | 2867 |
| 391 | 1 | 2 | 154 |
| 392 | 5 | 5163 | 5387 |
| 394 | 1 | 1 | 375 |
| 394 | 8 | 6437 | 7585 |
| 394 | 9 | 7542 | 7967 |
| 394 | 11 | 10354 | 10713 |
| 395 | 5 | 1957 | 2229 |
| 395 | 9 | 3869 | 4216 |
| 395 | 11 | 4571 | 4960 |
| 398 | 1 | 395 | 1180 |
| 399 | 7 | 5691 | 6134 |
| 399 | 10 | 7662 | 7820 |
| 399 | 14 | 10111 | 9845 |
| 399 | 22 | 16699 | 16481 |
| 399 | 29 | 28519 | 28244 |
| 401 | 1 | 189 | 4 |
| 401 | 2 | 178 | 1044 |
| 401 | 3 | 1038 | 2141 |
| 401 | 5 | 3517 | 3939 |
| 402 | 3 | 919 | 1269 |
| 404 | 1 | 578 | 12 |
| 405 | 1 | 293 | 643 |
| 405 | 3 | 1926 | 1501 |
| 407 | 1 | 80 | 406 |
| 407 | 4 | 3188 | 3670 |
| 408 | 5 | 3037 | 2681 |
| 408 | 6 | 3786 | 3475 |
| 410 | 2 | 811 | 1092 |
| 413 | 2 | 742 | 1314 |
| 413 | 3 | 1275 | 1532 |
| 414 | 2 | 908 | 678 |
| 414 | 3 | 1137 | 1889 |
| 414 | 4 | 2738 | 1959 |
| 416 | 3 | 1945 | 1709 |
| 418 | 1 | 3 | 350 |
| 418 | 2 | 331 | 930 |
| 419 | 2 | 619 | 296 |
| 419 | 4 | 937 | 773 |
| 419 | 5 | 1305 | 910 |
| 419 | 6 | 1183 | 1521 |
| 419 | 7 | 1859 | 1299 |
| 419 | 8 | 2170 | 1850 |
| 419 | 9 | 2483 | 2160 |
| 419 | 10 | 3399 | 2470 |
| 419 | 11 | 3708 | 3397 |
| 420 | 3 | 1649 | 1452 |
| 421 | 6 | 3983 | 3510 |
| 424 | 1 | 797 | 3 |
| 424 | 2 | 513 | 851 |
| 424 | 3 | 1029 | 733 |
| 424 | 6 | 1859 | 1551 |
| 424 | 7 | 3076 | 2780 |
| 425 | 1 | 52 | 384 |
| 425 | 2 | 1031 | 777 |
| 425 | 3 | 1127 | 1936 |
| 427 | 2 | 1488 | 1114 |
| 427 | 3 | 2114 | 1464 |
| 430 | 2 | 1334 | 1489 |
| 431 | 1 | 420 | 196 |
| 431 | 2 | 634 | 269 |
| 432 | 2 | 1133 | 1372 |
| 432 | 3 | 2014 | 1439 |
| 432 | 6 | 3869 | 3378 |
| 433 | 1 | 292 | 2007 |
| 435 | 1 | 706 | 131 |
| 435 | 2 | 1730 | 1047 |
| 439 | 1 | 1 | 627 |
| 441 | 1 | 1 | 513 |
| 441 | 7 | 10592 | 7974 |
| 443 | 1 | 31 | 744 |
| 447 | 2 | 744 | 322 |
| 449 | 1 | 3 | 212 |
| 449 | 2 | 471 | 286 |
| 449 | 3 | 551 | 393 |
| 451 | 1 | 823 | 314 |
| 452 | 2 | 322 | 714 |
| 452 | 6 | 2806 | 3342 |
| 452 | 7 | 3358 | 3792 |
| 454 | 1 | 1033 | 2 |
| 455 | 3 | 3214 | 3837 |
| 455 | 5 | 4078 | 4488 |
| 455 | 6 | 4965 | 4117 |
| 455 | 8 | 5123 | 5473 |
| 457 | 1 | 940 | 35 |
| 461 | 2 | 476 | 691 |
| 461 | 4 | 1548 | 1991 |
| 461 | 5 | 2322 | 1948 |
| 461 | 6 | 2664 | 2449 |
| 462 | 5 | 2810 | 2064 |
| 464 | 2 | 2162 | 1530 |
| 465 | 1 | 1762 | 38 |
| 465 | 3 | 2373 | 2050 |
| 467 | 2 | 652 | 1260 |
| 467 | 3 | 1149 | 1442 |
| 469 | 2 | 922 | 1101 |
| 470 | 2 | 971 | 1768 |
| 473 | 2 | 450 | 220 |
| 475 | 1 | 1 | 969 |
| 477 | 2 | 1064 | 843 |
| 482 | 1 | 1 | 534 |
| 484 | 1 | 130 | 543 |
| 484 | 2 | 1320 | 1159 |
| 487 | 2 | 1258 | 1929 |
| 488 | 2 | 509 | 162 |
| 488 | 4 | 2247 | 1945 |
| 489 | 1 | 1 | 396 |
| 489 | 2 | 560 | 255 |
| 490 | 2 | 1096 | 458 |
| 491 | 5 | 5167 | 4433 |
| 491 | 6 | 5975 | 5247 |
| 491 | 7 | 6811 | 6041 |
| 494 | 1 | 650 | 3 |
| 497 | 5 | 3351 | 3536 |
| 497 | 8 | 4757 | 4308 |
| 497 | 10 | 5229 | 5086 |
| 497 | 11 | 5967 | 5671 |
| 499 | 1 | 663 | 247 |
| 502 | 2 | 1324 | 851 |
| 504 | 1 | 3 | 650 |
| 507 | 2 | 727 | 906 |
| 507 | 3 | 840 | 1010 |
| 510 | 3 | 2056 | 2574 |
| 512 | 2 | 854 | 300 |
| 514 | 2 | 1067 | 669 |
| 518 | 5 | 3119 | 2970 |
| 520 | 1 | 3 | 467 |
| 520 | 2 | 452 | 231 |
| 520 | 4 | 2218 | 1859 |
| 521 | 2 | 988 | 821 |
| 522 | 1 | 409 | 885 |
| 524 | 1 | 579 | 4 |
| 525 | 1 | 1 | 144 |
| 525 | 2 | 86 | 352 |
| 529 | 2 | 5731 | 6147 |
| 533 | 1 | 1044 | 157 |
| 536 | 3 | 587 | 1462 |
| 539 | 7 | 6180 | 6662 |
| 540 | 1 | 198 | 476 |
| 543 | 3 | 2179 | 1835 |
| 543 | 4 | 2404 | 2177 |
| 543 | 7 | 3924 | 3700 |
| 544 | 2 | 1004 | 870 |
| 546 | 2 | 497 | 324 |
| 547 | 3 | 717 | 965 |
| 549 | 2 | 371 | 135 |
| 550 | 1 | 527 | 3 |
| 550 | 2 | 864 | 709 |
| 550 | 3 | 1540 | 1277 |
| 550 | 4 | 2039 | 1509 |
| 552 | 5 | 4681 | 5073 |
| 552 | 8 | 8390 | 8223 |
| 555 | 1 | 470 | 267 |
| 560 | 1 | 635 | 210 |
| 560 | 2 | 834 | 514 |
| 563 | 2 | 1215 | 1469 |
| 564 | 1 | 8 | 511 |
| 564 | 2 | 1019 | 555 |
| 564 | 3 | 577 | 744 |
| 565 | 1 | 321 | 4 |
| 565 | 5 | 1266 | 1619 |
| 567 | 2 | 1055 | 531 |
| 571 | 3 | 1149 | 886 |
| 573 | 1 | 208 | 666 |
| 573 | 2 | 651 | 1148 |
| 573 | 5 | 2558 | 2809 |
| 575 | 1 | 262 | 2 |
| 584 | 1 | 268 | 110 |
| 584 | 4 | 1310 | 795 |
| 584 | 5 | 1329 | 1574 |
| 586 | 1 | 771 | 4 |
| 588 | 1 | 346 | 56 |
| 588 | 2 | 1078 | 434 |
| 589 | 1 | 1 | 555 |
| 591 | 1 | 217 | 2 |
| 592 | 2 | 674 | 868 |
| 593 | 1 | 190 | 2 |
| 593 | 3 | 1035 | 1268 |
| 601 | 1 | 77 | 274 |
| 601 | 2 | 172 | 576 |
| 602 | 2 | 759 | 415 |
| 604 | 6 | 2868 | 2416 |
| 606 | 1 | 271 | 798 |
| 607 | 2 | 633 | 797 |
| 613 | 1 | 420 | 82 |
| 616 | 2 | 593 | 435 |
| 616 | 4 | 975 | 730 |
| 619 | 3 | 641 | 817 |
| 620 | 1 | 863 | 3 |
| 621 | 2 | 1493 | 2014 |
| 627 | 1 | 113 | 763 |
| 628 | 1 | 2 | 163 |
| 631 | 1 | 1 | 516 |
| 631 | 3 | 1715 | 1521 |
| 633 | 1 | 280 | 2 |
| 634 | 3 | 1139 | 1387 |
| 637 | 2 | 1613 | 738 |
| 637 | 3 | 1597 | 2208 |
| 637 | 4 | 2242 | 2694 |
| 637 | 7 | 3550 | 4545 |
| 637 | 9 | 4767 | 5171 |
| 639 | 1 | 175 | 2 |
| 640 | 2 | 468 | 689 |
| 643 | 1 | 496 | 320 |
| 645 | 1 | 1 | 537 |
| 645 | 2 | 539 | 1024 |
| 647 | 1 | 64 | 855 |
| 647 | 2 | 1419 | 895 |
| 649 | 1 | 2 | 364 |
| 651 | 1 | 539 | 3 |
| 653 | 2 | 738 | 550 |
| 656 | 8 | 7784 | 8587 |
| 657 | 2 | 1356 | 967 |
| 657 | 3 | 1708 | 1376 |
| 661 | 1 | 2 | 244 |
| 664 | 3 | 1149 | 820 |
| 672 | 1 | 546 | 10 |
| 673 | 2 | 1207 | 1827 |
| 676 | 1 | 443 | 790 |
| 679 | 1 | 998 | 219 |
| 682 | 3 | 749 | 1171 |
| 685 | 1 | 176 | 511 |
| 685 | 2 | 498 | 199 |
| 685 | 3 | 480 | 947 |
| 685 | 4 | 1000 | 1443 |
| 686 | 4 | 1567 | 2001 |
| 686 | 5 | 3238 | 1712 |
| 686 | 7 | 2965 | 3435 |
| 686 | 8 | 3441 | 3067 |
| 686 | 9 | 3752 | 3339 |
| 686 | 10 | 3530 | 3826 |
| 688 | 2 | 628 | 894 |
| 689 | 2 | 582 | 331 |
| 690 | 1 | 275 | 90 |
| 690 | 2 | 487 | 248 |
| 696 | 1 | 239 | 9 |
| 696 | 2 | 1237 | 233 |
| 696 | 3 | 1424 | 1200 |
| 697 | 1 | 20 | 520 |
| 698 | 1 | 29 | 313 |
| 698 | 2 | 217 | 483 |
| 701 | 5 | 1061 | 1534 |
| 707 | 2 | 855 | 538 |
| 709 | 1 | 1 | 675 |
| 710 | 1 | 3 | 416 |
| 712 | 1 | 674 | 96 |
| 713 | 1 | 933 | 139 |
| 713 | 2 | 1125 | 1436 |
| 716 | 2 | 1226 | 765 |
| 721 | 1 | 3 | 371 |
| 726 | 1 | 543 | 94 |
| 729 | 1 | 19 | 210 |
| 731 | 1 | 532 | 2 |
| 736 | 2 | 309 | 644 |
| 738 | 1 | 561 | 4 |
| 740 | 1 | 488 | 3 |
| 749 | 2 | 20 | 475 |
| 751 | 1 | 1 | 456 |
| 751 | 2 | 454 | 774 |
| 753 | 1 | 76 | 729 |
| 754 | 1 | 761 | 21 |
| 755 | 2 | 345 | 539 |
| 756 | 1 | 1 | 375 |
| 764 | 2 | 528 | 1088 |
| 772 | 1 | 1 | 558 |
| 772 | 2 | 432 | 866 |
| 775 | 1 | 706 | 2 |
| 778 | 2 | 992 | 834 |
| 780 | 1 | 52 | 351 |
| 782 | 1 | 3 | 557 |
| 783 | 1 | 28 | 609 |
| 791 | 1 | 1 | 582 |
| 791 | 2 | 859 | 641 |
| 791 | 3 | 1235 | 711 |
| 797 | 1 | 2 | 289 |
| 797 | 2 | 287 | 3 |
| 801 | 2 | 598 | 191 |
| 805 | 1 | 1 | 414 |
| 806 | 1 | 392 | 3 |
| 810 | 1 | 3 | 317 |
| 810 | 2 | 407 | 3 |
| 815 | 2 | 443 | 282 |
| 819 | 1 | 39 | 668 |
| 830 | 1 | 291 | 4 |
| 830 | 2 | 476 | 162 |
| 834 | 1 | 561 | 46 |
| 834 | 2 | 953 | 453 |
| 837 | 1 | 3 | 317 |
| 837 | 2 | 320 | 589 |
| 839 | 1 | 1 | 753 |
| 841 | 1 | 1 | 489 |
| 855 | 1 | 308 | 3 |
| 861 | 1 | 1 | 330 |
| 863 | 1 | 451 | 221 |
| 870 | 1 | 21 | 503 |
| 890 | 2 | 1548 | 1255 |
| 895 | 1 | 3 | 140 |
| 896 | 1 | 2 | 400 |
| 897 | 2 | 244 | 498 |
| 902 | 1 | 1 | 300 |
| 904 | 1 | 294 | 4 |
| 910 | 1 | 143 | 3 |
| 917 | 1 | 36 | 518 |
| 918 | 1 | 3 | 167 |
| 918 | 2 | 116 | 373 |
| 920 | 2 | 243 | 515 |
| 922 | 1 | 669 | 259 |
| 926 | 1 | 2 | 394 |
| 927 | 1 | 119 | 556 |
| 928 | 1 | 493 | 179 |
| 930 | 1 | 526 | 344 |
| 933 | 2 | 257 | 418 |
| 936 | 2 | 243 | 683 |
| 937 | 1 | 341 | 3 |
| 942 | 1 | 58 | 228 |
| 945 | 1 | 318 | 4 |
| 953 | 1 | 254 | 48 |
| 959 | 1 | 1198 | 164 |
| 959 | 2 | 1740 | 1123 |
| 963 | 2 | 462 | 232 |
| 965 | 1 | 403 | 2 |
| 969 | 1 | 360 | 4 |
| 970 | 3 | 673 | 314 |
| 972 | 1 | 3 | 470 |
| 973 | 1 | 2 | 700 |
| 974 | 1 | 2 | 235 |
| 974 | 3 | 270 | 467 |
| 981 | 2 | 154 | 405 |
| 984 | 3 | 164 | 337 |

### SEQUENCE LISTING PLACE INDICATOR

[0355] PAGES 280 TO 2076, WHICH ARE THE COMPLETE SEQUENCE LISTINGS FOR THIS APPLICATION, ARE LOCATED IN THE FOUR (4) ATTACHED REDWELDS IDENTIFIED BY THE FOLLOWING INFORMATION ON THE INDIVIDUAL VOLUME COVER SHEETS:

[0356] Applicants: Kunsch et al.

[0357] Serial No.: Unassigned

[0358] Filed: Concurrently herewith

[0359] For: Enterococcos faecalis Polynucleotides and Polypeptides

[0360] Attorney Docket No. PB369

What is claimed is:

1. Computer readable medium having recorded thereon the nucleotide sequence depicted in SEQ ID NOS: 1-982, a representative fragment thereof or a nucleotide sequence at least 95% identical to a nucleotide sequence depicted in SEQ ID NOS:1-982.

2. The computer readable medium of claim 1 having recorded thereon any one of the fragments of SEQ ID NOS:1-982 depicted in Tables 2 and 3 or a degenerate variant thereof.

3. The computer readable medium of claim 1, wherein said medium is selected from the group consisting of a floppy disc, a hard disc, random access memory (RAM), read only memory (ROM), and CD-ROM.

4. The computer readable medium of claim 3, wherein said medium is selected from the group consisting of a floppy disc, a hard disc, random access memory (RAM), read only memory (ROM), and CD-ROM.

5. A computer-based system for identifying fragments of the Enterococcus faecalis genome of commercial importance comprising the following elements:
a) a data storage means comprising the nucleotide sequence of SEQ ID NOS:1-982, a representative fragment thereof, or a nucleotide sequence at least 95% identical to a nucleotide sequence of SEQ ID NOS:1-982;
b) search means for comparing a target sequence to the nucleotide sequence of the data storage means of step (a) to identify homologous sequence(s), and
c) retrieval means for obtaining said homologous sequence(s) of step (b).

6. A method for identifying commercially important nucleic acid fragments of the Enterococcus faecalis genome comprising the step of comparing a database comprising the nucleotide sequences depicted in SEQ ID NOS:1-982, a representative fragment thereof, or a nucleotide sequence at least 95% identical to a nucleotide sequence of SEQ ID NOS:1-982 with a target sequence to obtain a nucleic acid molecule comprised of a complementary nucleotide sequence to said target sequence, wherein said target sequence is not randomly selected.

7. A method for identifying an expression modulating fragment of Enterococcus faecalis genome comprising the step of comparing a database comprising the nucleotide sequences depicted in SEQ ID NOS: 1-982, a representative fragment thereof, or a nucleotide sequence at least 95% identical to the nucleotide sequence of SEQ ID NOS:1-982 with a target sequence to obtain a nucleic acid molecule comprised of a complementary nucleotide sequence to said target sequence, wherein said target sequence comprises sequences known to regulate gene expression.

8. An isolated protein-encoding nucleic acid fragment of the Enterococcus faecalis genome, wherein said fragment consists of the nucleotide sequence of any one of the fragments of SEQ ID NOS:1-982 depicted in Tables 2 and 3, or a degenerate variant thereof.

9. A vector comprising any one of the fragments of the Enterococcus faecalis genome of claim 8.

10. An isolated fragment of the Enterococcus faecalis genome, wherein said fragment modulates the expression of an operably linked open reading frame, wherein said fragment consists of the nucleotide sequence from about 10 to 200 bases in length which is 5′ to any one of the open reading of claim 8.

11. A vector comprising any one of the fragments of the Enterococcus faecalis genome of claim 8.

12. An organism which has been altered to contain any one of the fragments of the Enterococcus faecalis genome of claim 8.

13. An organism which has been altered to contain any one of the fragments of the Enterococcus faecalis genome of claim 10.

14. A method for regulating the expression of a nucleic acid molecule comprising the step of covalently attaching to said nucleic acid molecule to a a nucleic acid molecule of claim 10.

15. An isolated polypeptide encoded by any of the fragments of the Enterococcus faecalis genome of claim 8.

16. An isolated polynucleotide molecule encoding any one of the polypeptides of claim 15.

17. An antibody which selectively binds to any one of the polypeptides of claim 15.

18. A method for producing a polypeptide in a host cell comprising the steps of:
a) incubating a host containing a heterologous nucleic acid molecule whose nucleotide sequence consists of any one of the fragments of the Enterococcus faecalis genome of claim 8, under conditions where said heterologous nucleic acid molecule is expressed to produce said protein, and
b) isolating said protein.

The application's sequence listing, which the Patent Office published only in electronic form, follows.

SEQUENCE LISTING (982 sequences)

SEQ ID NO: 1 - DNA, 4315 bp; double-stranded, linear
aagtcaatcacttgcaagtcgttttctgtcatatggccgactagctcagtgacaccaggaatatagccaccagggaaaatataacgattaatccaagcatttttagccccaccttgttggcgactgatcccatgaatcaacgccgtacctttaggcgctaaattccgctgaacgacatcaaaatattcatgtagattttccgcaccgacatgttcaaacatcccaacactcgtaatatggtcaaaagactctccttttaaatcacgataatccatcaatttgacagtcattcgatcttgtagatcttctttttctataatatggcgaatatgatgaaattgctcttcacttaatgtaatcccagttgctttggctccatattctttcaccgcagttaaaattaacgtgccccagccgcagccaatatccagtaaagtgtcgccctctttgataaacaatttatctaaaatatgatgaactttattcacttgcgcttgttctaatgtatcttcaggcgttttaaaataagcacatgaatacgtcattgtttggtcaagccattttttgtaaaaatcatttcctagatcgtaatggctgtgaatatcctcttgcgaacgtttttttgaatgactttctttaggaagccatttaataaatttagcattgtgtaaaaagctatccttttggttatacacatcataaatcagsgcttggatatcgccttcgatttcaattttgcgatccatgtaggcttcccctaaagttaacgaagcgttattcagtaaatccttcacaggaattttttcattgaatacaattttaaaaaccggatcccccgacccttgcccatactctttgacggtaccatcccagtatgtgacttgtgtcttttttgaaaaagaccatttaaacagttgactgtacgtttctttttctaacattgcattccctccattaaataccatttgaagccaaaacaaaaagaagtcgctttccggtagttcgtcaaaacaaacaccacagtccgttctaaactgaagcacagaaaagttatcaccccttctatgttccgcttctttttttgcaattacagttctattctactcctcttttaaaaatttgaacattcttttaacgtaatacctactattgttattctttatcacaaaaaaactagagccagtccttgacagactcctctagttctaaatattatgctttcttacgcatccgttgttccgcatgagtgtaagcgccatgccatacgtgccccacataaggattaacttgaataccgtgtttaatcgccgctgctacaaatttttttgctaaagttactgcttctaacaccgaataacctttcgccaagccagctgtgattgccgctgaaaaagtacaacctgcaccatgattataatcagtaggatataattcattttccaaaagatgcgcggtgtgaccatcgtaaaacaagtccagtgctttttcaccagctaagcgatgtccccctttaaccacgacatgcttggctcccatttgtacaattcgttttgccgcttcttccatctccgccacggaagaaatttcgcctaaaccagataagatgcccgcttcaattaaattaggcgtggccactaatgctaatggcagtaaatcgttttttaggccttccacacttttgggttgcagaatttgtgccgttcccttacaagcaatgactgggtcaatcacgactttttgaattttctcttgtttaatgtacttactagccattttaatattttgttcattacccatcatccctgttttcaaagccgctactggaccgcctgcaaaaaccgaaatcaattgtttttctaagagcgtttctggcaattcagttacttcatgtgaccaacctgtcgtaggatccatcgtcacaatcgaggttaaacttgaaaatccaaaaactccatactcttcaaatgtttttaaatctgcttgaatccctgcccctccagttgaatcggagcctgcaatcgtcaatactttttccattaaatcacctaacctttttctccaagtatactgaagaaacaagtctgctaaaacagccaattggcttattttttagccagccaatttctaaacaaaaaaaagaccagagaataaattctctggtcttacgtccgaataccccagttttttacgctggttaaaactatagttaaaaagttaattatttaacgatttcagtaacaacgcctgaacctacagtacgtccgccttcacgaatagagaaacgagttccgtcttcgatagcgattgggtgaattaattcaacgtccatagcaacgttatcaccaggcattaccatttcagtaccttctggcaattctacaacaccagtaacgtctgttgtacggaagtagaattgaggacggtagttagtgaagaatggagtgtgacgtccgccttcttcttttgataatacgtatacttcagcttkgaatttggtgtgtggagtgattgtagctggtttagctaatactygyccacgttcgatatcttcacgtgctacaccacgtataaagcaccgatgttgtcgcctgcttcagcgtagtctaataatttacggaacatttcaacacctgtaacagttgttttagatgtttcgtctttaataccaacgatttcaacttcgtcaccaacgcgaacttcaccacgttcaacacggcctgtagcaacagtaccacgtccagtgattgagaatacgtcttcgactggcatcatgaatggtttgtcagtatcacgttctggagttgggatatattcgtcaactgcagccattaattctaagattttttcttcataagactcgtcgccttctaaagctttcaaagcagaacctgcgataactggaacatcatcgcctgggaaatcgtattctgataataagtcacgaacttccatttctactaattctaataattcttcgtcatcaaccatatccattttgtttaagaatacaacgatgtatggtacaccaacgttacgtgataataagatatgttcacgtgtttgaggcataggaccatcagcagcagaaactactaagatagctccgtccatttgagcagcaccagtgatcatgtttttaacgtagtccgcatgtcctgggcagtcaacgtgtgcatagtgacgagttwcagtttcatattcgatatgagaagtgttgattgtgattccacgttctttttcttctggagcgttatcgatagaatcgtagctttgtgcttccccgccaccgtgttttgataatacagtagcaattgcagctgttaatgtagttttaccatggtcaacgtgtccgatagtaccaatgttaacatgggatttagaacggtcaaatttttcttttgccattttgaatgttcctcctaaaaatataaattttattgtttgttttatatgtgatagacgttactaaaaatcgtctgatcatcataagctattttacacgaaatcttgaaaaaaggatagttctaaaaacaaaccttttattctcaaggaaaattatgcgttgccgccgtttttcttgatgatttcttcttgaacagacttaggtacgtcttcatagtggtcaaataccatcataaatgtaccacgtccttgtgttgctgaacgtaatgttgtagcataaccaaacatttcagctaaaggtaccatcgcattaacgatttgagagttaccgtgtgcttccataccttcaacacgtccacgacgacttgttacgtgtcccatgatatcacctaagtaatcttcaggaacagtaattgtaactttcatcattggttctaaaataactgggtttgcatttttagccgcagctttcaatgccatagaagcagctacacggaaggccgtttcatttgaatcgacatcgtggtatgaaccatcgtaaagttttgctttgatatcaactaatggataaccagcaagaacaccgttgttcatagagtcttctaaccctttttcaactgctgggatgtattcacgaggaaccacaccaccgacaattgcgttttcaaactcgaagcctttaccttcttcatttggtgtaaattcaacccatacgtgaccgtattgtcctttaccaccagactgacgaacgaatttaccttctgctttagtcgcagcacggaatgtttcgcggtaagatacttgaggagcacctacgttagcttcaactttgaattcacgtttcatacggtctactaaaacgtctaagtgcaattcacccataccagagataactgtttcaccagtttcaacc

SEQ ID NO: 2 - DNA, 2716 bp; double-stranded, linear
attgtgccatagatttgaccatctgctgctgttgtagtttcccagtttgtaatttggtaatgttgtaagancttagttgggacattaatggcaaaagttttttggcgataggtattaaaattggttttacccacccaaccttcataggcttcaaattcagctccacctaacaaagggttgtcggaaataatccaagtgtctttttgatgattccgaataaaacgaacgattgtactgttaaagcctttcgttgttgtaccgccgtaatctttttctgcagaccaatggttccaaaccgagtcatactctaaagcattcggaaattcattggttgtaaaccaaccgagtgaattaatttctttacttagttgacgacttgcccaacctgattcgccttggttgccccaaacatcaacataaatataatctagattcggtgctttttgttttaatcnttaaagcgctcatagcgacgaccactcaatgtatcgggtcttkgtttaataaaataagacggatctaaccaatcccagccacgcttcgttggatcaactaattcctcattaaatccttttgcttctgggtaagactcggtgtcattaatatgcacaccgaaaacggcatttaatttatgtccttcatcaattaattgattcaacgcttgttccccaccaggtcgctgaccaatagcaccgtaatctggatgcgcagaatcatgtccttcattttgatacccttttagtaaattcatttgtcctaatccatctgttaaattgtaaatacgttttgattcgtctaacgtcactaagaatgggtttgtcgcctgactagcaaagttaaaaggaatccgttggttgactaattcagggactttttccgcacccattgggttattcataattgaacggaacccaattgccgcatcttgccaatccacccgattgtcgtcgttgctatcttttgagaatttaactttcacttctggcgtttctccagttgtgtaatcttccggtgcatcaaatggtcgataggtccatgccccacttgacaaggttgttacaaaaccagtcgccgcttcttttgtttgtttatggattcgattgttgtcactaccatcgacagagccgtctccataggcgttcgtccaaaaacttgcagcataattcgccgtatttaagaaaccatacatatattttttcgtttcttcttggcttgttgtagttaaatcttggatagtatcaccatttttatttccgttatttgcatttgtcccagtattcatcacaacgccagcaaaagtcgccccttcatctgtactattgacagaaatcaagccttgatttggaattgaaattgtgtgtattttggttccttcttcacgaatatctgagagtttcatagctaattcttggccttcggaaacagtcaatgtcgttgtgaaacgcaaaccaatttctgggacagctacgttataaacggcttgatttgcttcactcttctgtttttcagcagttgctttatatgctttgccaycaaycattacttggtcaattttctcgtgttggccattaaaaatcacttgattactctgagggtcttcgtagcgaataattcgtggaaattgtggatcaaccacggctgttaaatctgcggaagagattttgtcgcctttttcagcttcattgtctttagcaacaacaatgctggcttttgctttgatgtttgtattttccaaagtaccgtcgacttcaaaagttcctggttctttatatgcatcaggatcgatttcattccaacggactgcttcattggcttctttaccagtattataggtcacttttacttgtttcggtaattttggtgcgacaccaatttttgtaaaaactttgactggcgcaatttgtgtcacttctggcacaatttctggaatgctatctacggggccatttttaaaatagtcataattgacaatttttttgtcgtaccacaaacggacacccacatgtccggcttctgttggaattttgtctccattggccaaaacaggttctccttcgtaaatcaacgtggtgttaagccagatagtaattttttcaccaacataacgtactttcaacaaataattcgtatcttcatttaacgttggcccagaaattgaatcattccacgaattagggctttcaactaaccatttgccattcgcgttatagcctacaaaaacccagctatctttggtattaccacgtataatcacacccgttcgaccgcttccagcagtgtatttaaactttgtttctacttcaccatcagctaatttaggggaatctaaatttaaagatacggcattattacctgctgctgcatctcgtgaaatcgccaatgactctcctgctaattctcgatttgttttaccaatcacatcttgccactcaccagttttccctcctggaaaatcagattgccacaatttttcttctgttgcggtaggttccaccattgatgagcttgtttcagtgctgctgtttgttgtttcttctgcagacgtacttaatggtactaaaatcgttgcgcttgccaatagtgtcaatgtactaaatcgttttatttttccatgtttcatctgataaatcagccccctgaacatttttggaacacgctttcatttatttaacaattaaaggggggttnccaaaaattaaattgtnttcatttttgg

SEQ ID NO: 3 - DNA, 1311 bp; double-stranded, linear
ttgaaattgctagcgttttccgccattggctatgtttagtcgcaacggagggaccsctgactttttagcgaagcatcgttgcctgttaagaaagtgacgaaaatttctaatcctgaaggggaaaccgtgctggatgtcattcgcaatgggaatgcgcaagtggtaatcagtaccatggataaaaatcgttccagtgccaaccaagatggattttcaatccgtcgggaagcagtcgaacatgggattccattgtttacctcacttgacacagcaaatgcgattttaaaagttttagaatcaagagcctttacgacagaagccatttaagcaaaaatctggaacaatcgtctgaggaggactgttccagattcttttacgaagaaatagaaaatcatttataggggaatcagagaataaaggagtgaaggatactgatgcagagaaagcaagaaatgatgaccattgtagctcaaaaacagttagcgccacggatttatcagttagacttacaaggcgagttagtgaaagagatgacacgacctggacagtttgtgcatatcaaggttccgcgtgcagatttacttttgcggcgaccgattagcatcaaccaaattgatcattcgaacgaaacctgtcgtttgatttatcgagtcgaaggcgctggaacggaagtgtttgccaccatgaaggctggtgaacaattagatattttaggtcctttaggaaacggctttgatataactaccgtagcagctggtcaaactgcttttatcgttggcggaggaatcgggattcccccattgtatgaattatcaaaacaactcaatgaaaaaggcgtgaaagtgattcattttcttggttatgcatcaaaagaggttgcttattaccaacaagaatttatggcattaggagaaacacattttgccacagatgacggctcgtttggcgctcatggcaacgtgggccgtttattgtcagaagcgttagcaaaaggacggatccctgatgcagtgtatgcttgtggtgcgaatggtatgttaaaagcaattgattctttatttccaacacatccacacgtttacctttctttagaagaacggatggcctgtggaattggggcttgctatgcctgcgtttgccataaaaaaggagacactactggagcaaaaagtgtcaaggtctgtgatgaaggtccgatttttaaagcaagtgaggttatcttatgatgaaaaaycctttagccgtttcaattccaggtttaacattaaaaaatccaattattcccgccagtggttgctttgggttcgggga

SEQ ID NO: 4 - DNA, 6948 bp; double-stranded, linear
tcctctgatgaaccgattgaaagaattaaggaaagaanaaaatattactttagttgagttaagtgaggagttaggtattccacgttccactcttaataggtatgaaaacgaagatagcgaaccaaaacaagaaacttgggaaaaattagctgattattatggtgtttctacggcttatttaatggggatatccaaccaaaaggttagcgaagaaaaagctttgacggccgcaaagaaagtttatcaagtctatctttccgacgacgatttaggaaaagaaattcgaaaagctctaatgtattttaataaaaatgatttagatagtgtcttaaaacaagcaatgcagcagtattttactatcccagccgttgaatggaatacagaatttcaatctttaaaaaatactggttttctatacagttggttagaaggatatttggtagacaggtatcgaaaagaagtgaaaactaatcataatttaattacaaatacgtattatagtatcccttctattgatgatgtgaatgagtatggaattttctctgatgaaattcaaataccgttgactgaagattttaaacaaattttcaaagttgaggatctatccacgaaaacacatgaagaaataaaaaaactttttaaatccgattctacgctcattgcttacagctatgaaagctccgtagacgataaattaaaagatgatattaatatgattttagataatgctcgttccgaaattcttaatctaaaagaaaaatatcctgataaacctagtagaatagaacaaacaaccgtactcatatctaaagacgaagatacttccttttggtcaaggaatggctcaaatgattatatagatgaattgaacttatctgaggaaactaagaaattatttgttcatttaggttcagtatttattgaggaaaaaaaacgtaaatcaaaagctaaagaatgagtttttttctttgtataatccagttatagaaacatctctcccctaacatctacatactattggcgtggtggtagataggagaaaaacaatgacacaaattaacaagtatacaaaaaaagacggtacaaccgcctatatgtttaatgcttatgtaggacgtcatcccaaaactggtaaaaacgtttatcgtaagcggcaaggatttaaaacaaaaaaacaagcacaaattgcacttgctgaaattctgaaggatattgaagaaaatggactagataataaaccctctgttttgacgtttaaacagctttacgagaaatggttagcacagcaacggttaacgattaaaccatcttcaatcgctgtgaataagcgttttgctgaaaaacacatattaccttatctaggtgactgcaaacttgacgaaataaccgttatacagtgtcaggacttagttaataaatggtttaatcaaggacacaagcaatactcgttctatagaaaactcactgctcagattatgcgatatggcgaatctatggaactaatgaatactaacccaatgagaaaaacaatccttcctaagtggaaagaggaagaaacaaaactggagtattacactaaacaagaattgaatcatttttttgattgtctaaaacaatatggtaatttcaaacagttagcattttttaggttgctagcctttacaggttgtcgtaagagtgaagttctagccttgcagtggaaagacctagacataacaaacaagagcgtatatataggcaagaccgtagcacaagacgaattctataatatactcactcaaacgcccaaaacagcttctagcacacgttctatcagcttagacaatgaaacacttcaaattatggctaaatggcgtacaatccaacgtagtgactatttccaaatgggctttaatacatctagtgaagaacaatatattttcacgaacaaccataataaactgctctcaccaaatgtagttaatatatggctcaattgcttaataaaaaaatatgatttacctagtattacaccacatcattttaggcatacacatgcaagtttacttcttcaatcaggagtgcctattaaagaagttgctgaaagattaggacatactagcactgctattactgatcgtatctattctcatgttatgcctgaagaaaaagaaaaaacagcagataagttcgctcaattcgtcggtttttaataaatgcacagacaaaagcacagatctttactatttttatgtaaaaaaaagagctagaatccttataaataaaggtttctaactggcattagtaacgctattaatgaaacaacgtgtttaatcatataataaaccaacaaataagtaaatatcaaattctaaattctgtaaaaaacgaacaatcacgattaaaaaaagtattcctttctaggaatactttttaaattaaatcgtttgtgtggtcgggcgaacaaccatttcactgattgacatacgatctggcgtgtctatggcaaagaccactgcttgcgcaatgtcttccgcctttaagccccaacttaactgttctagatgtaacgtttcagctactactcgattagaaattgtttgataaagttctgtttgtacagcacctggtgaaataatcgttgatttaatgttattctctctttgttcttgtcgcaatccttccataattgctcgaacagcaaactttgttccacagtagacagccgaatctggataaacgacatgtcctgccacagaatcagtagcaataatctgccctgatttttgttcaaccataattggaagaactgccgcaatgccatttaaaacacccataatattaatatctagcatttgacgccattctccttttggtgcttcaataagaggcgccgttggcataactcctgcattgttaaaaagaacatcaattcgtccatatttttccattgtaagcttgattacacgctgaacttcctcttctttcgttacatctgcttgttgcacgagaatcgttgcttcaggaagttctttttttatagcaattaaacgttcttgtcgacgtgctgcaatgactaacttcgctccttttctggcaagtaaacgggctgttgcctcaccgatgccactggaagcgcccatgataacaataactttttctgataatgatttcattatatttcctccttatcttcctgaatccaacgaataattttagctggtgttcctgcaacaatagcgttagctggcacatctttagttacagtcgcattagctgctacgatagcattttcaccaatcgtaatacctggtaaaacagtgacacccgcgcctaaccacgcaaattttttaatggtaattggtgctagcaatacgcctcgccgtttcattggcagttccggatgattgacacttaagagattaacgcgcggaccaattaaaacattgtcttcaattataatgccccctaaatcaacaaacatagctgcccgattaataaaaatatttttaccaaaatgtatattgcgtccaaaatctgtataaaaaggtaataaaatcgtaacggtttcgtcaattttgtcttggataatcgtggcaagaagattccttacttcattatgtgtataggcttgttgatttaattctattaaatagcgactattttcctcttgaatctgatgaataagttgaaatagtggttcatctttatcaatgctacctgttgcaattagttcttggagattttttgtaagcattcctaatcgcctccttttgctaaatttatcgtaatacgtgacaactcctctgtctaatacttataataaatagataagtatgcgttttagttataggagggaaagtaatggaattacgagtgattcactatttcttagcagtggtccaagaaaaaacgattagtggcgcagccaaacaattgcatgtatcacaaccaacattatctaagcaattaaaagaattagaggaagaattaggcgtgacattatttatacgaggaaatcgacaaatacaattaacacctgaaggagaatatttagctaaacaagggcaagatattttaagcttagcgaataaaacagtcaccaacttgtcgcaaaatgaattcattaatggcgaaatcacgattggtggcggcgaaacaaaagctatgtcttttttagcgaatgcactacaacaaataacaagccagcactcagctgatattcaccttcatttatacagtgggaatgcagatgatgtaatagaacggctagacaaaggattattagattttggtttaattattgagcctgcacctaaacaaaaatatagctatttaacattaccagttgtagatacatggggcttaattactgtaaaggaccatcccttagccactaaaaatgttattactgcagccgatttaaaagaagaacctttatttatttctcgacaagcacaagttccgagccaactctctgattggctcgaagcaagtctagatcagttccgaatcgttgggacctacaacttactttacaacgcttcactgatggtagaagctgggctaggtagcgccctaagcattgatggtattctagaaacaaagcaaacaaatttacgttttatcccgctatatcctgctttaacagccaaaattagtttaatttggcgcaaaaatacggttctttccacagctgctgcattatttttagaacaaataaaaaaaagtattcaacgccctgaataataggtcgttgaatacttttttaaatcatcactgtgatcgtagctgctgccaaaatcaaaactaagccgataatcgttacggtcatttccttggctgttttcttttgacctaagaaccaaatacctgtcaacgttgcaagcacaactgatgtttgggatagaataaagccagttgccaagccgttcatatctggctgcgctgaaattaaataagttaacgctgcaaaggcgaagaaaaagcctgaaaaaatttgtttgtaagaaacggcttctataaatggggatatttccccacccttaatagtgacaaccgctgagtaaataactgcgacaattaccatgcctattgcttgtggtaaaaaggcatgcatgccatcaattgccgttgcttgaggtgctgcagagtacgcccaatagccgatttcaccaacggctaatagaagaactgcttttttcataatcccagcactctcagcggactccgtttccgaccagaccgtcattttggcaccaatcatgattaacactaaggcaaatgcgcctaacaatttggctgtcgcacctggccagtttcctaagaaaaagacaccccagagagaagcacctaaaagttggaacgcggtcgttactggcatggcacgtgatgaaccaatcatcgtgaagcatttaaacgtaatgatttgcgcacaggcccaaccgacaccagataaaattgaaaagaataaatccatgcccgctggaaaagctaaaccattaatcattgaaaaaatagcggcaaaaatcaatgttcctaaactggtaccgagaatttgattcactggacgaccaccaattttggaagcgattgttgggaaaagcccccaacctagaagcggtcctaaaccgattaataatgcagtcgcattcatctctatttcccctctctcgtttaaaagacaacgttactttctaataaaatatttgcgtaaggagtcatttcccctgtccgaataaatgcatggcagttgtttaattcttgtttcatttctgtatgaggaataaaactgatgggagtttctggtaaacgagtttcaattgctgccaacatgtcaggattttctgttttaatttcttctgctaaataaattcgttgaactgccaattcctcaaggacattgtttaaaacttccataaaactagggacgccattggtaactgctaaatcaattttttctgtagtccgaggcactggcatgcctgcatcaccaatacttaatttatcaaaatgacccatttgtgcgatgacgcgggaaatatctgaattaataacttttgtttttttcatgtcgctcgctcctttttatttgtctgccaattcgtgttgataaggaatcgaaggttgggctccaaaacgttgaacagtcaacgaagacgccttgtttccataacgaatagcttcttccaaattgctaaaatctttttctaatatactacttaatgcgccaataaaagtatcgccagcagccgttgtatcaaccgctttcactttaaaagcaggcacaataccacttcgtccattgacgtcataaaaggcgcctttactacctactgtaataattactgcttcaayccctaattgatgaagtgcttctgcggctttacgcatactcgcttcatctgtgattttaatgcctgttaaaatttcggtttctgtttcatttggtacaatcatatctgtcacgtttagtaattcttcaggaacttgttctaacgcaggtgcgggatttaaaatcgttttgacgcctgcttttttagcaattttaaacgctgcaatcgtactatcaatcgcactttcaaattgggcaatcacaaaatcacttttttcaataatttcttgatgttcctggacttgttttggcgtaaaggcgttattggctcctgcgtaaatcataatgctattttcaccagcgttatctaccayaataaaggcttggccagtagctgttttctctaaagtggtgaccccagttaaattaatttcatcttgactcattaaatcagtcatcatagctccagcgccatcatttcccacagcaccaataaaatatgtttctgcgcctgaacgtttcgctgcaactgcttggtttgctcctttaccaccacctgctgtaaaatgttcaatggcgtgaattgtttcgcctggttttggcatttctttgactcttaatgttgtgtctaaatt

SEQ ID NO: 5 - DNA, 8486 bp; double-stranded, linear
aatttgttgaaccagcgattgcgcngcnaatactggtttttccagtgccaggcggcccataaagaatcatcgatgaaagcattttggcttcgaccatccgacgaataattttaccagggccgactaaatgttgttgaccaactacttcgtctaagtgacgaggtcgcattcgataggctaaaggttgttgcatagaaggacctcctttttcataatcatcttattataacataaagaacgtacatycgctttttggtggktttttgggktttagatggatatagcggaaggttcgtgtatgatagggagtggtgaaagaaatgaaagaaacgataaatatctttaacacaaaaacaactgaagaagtggcacaatacttgttagggatgtatttagmgcacgaaacagcaacaggcgttttaggtgggtacattgtggatgcagaagcttatttaggtcctgatgatgaggcggcccatagctttggcttgagaaaaacgccacgcttacaagccatgtatgacaaaccaggtacgatttatttatatactatgcacacgcatttaattttaaatatggtgacacaagaacaaggcaaaccacaaggggtgatgatccgcgcgattgaacctgttgaaggtgtcgacaaaatgattgaaaatcgccaaggacgtcaaggcgtggaattgaccaatggaccaggtaaattagttgcagccttaggaattgataagcaattatatgggcagtcgattttttctagttcgttacggctcgtgccagaaaaacgaaaatttccgaaaaaaattgaggcactaccacgaattgggattcccaataaaggtcgttggacagagttgcctttaagatacgtcgtggctggcaatccatatatttctaaacaaaaaagaacagcagtagaccaaatagattttggctggaaggatgaagaaaatgaaaaaagcaacaatgctcacatacttagaggaacaacttgaaaaacacttaggagattacgaagtaggccttgattgggatcgcaaaaaccataccatcgaagtcattgttcgtttatatgcagaaaacaatgagcmagtggcgattgatgatgttgatggtacgctttcagaagwagaattcattgaatttgaagatggtttgttattttacaatccgcaaaagtctgtcgttgatgacgaagagtatttagtcacaattccttatgaagggaaaaaagggctacgcaaagcagttttagacggattcattcactatttaaaagtggttttagatgaagggcaaagtgatttgttagactttttatcagatgaaacagcggaagtttttgaattgcattgggagccagcagattttgaagcgatgattaaaaaagtggcagaaacagaaaaagaacaatggattgcgtatccaagttattaatttagaggtgagaacatgaagtggacagaagtaaaagtcgaaacggctagcgaagcagttgaagcaatttcaaacattatgatggnarctggcgcaagtggcgtggccattgaagatgcgttggacattgaaaattttgaaagtgatctgtatggggaaattttagataaagagcaattcacccacattaaagaaggggcgattgtgatggcttattttcctgaaacaaccttcttaccagaaattttaccatttatgaaagaaaatattttacgcttgcctgagtacggcttatccattggtaaaaacgaaatgacaattagtgaagtagcagaaagcgactgggcaactgcttggaaaaaatattatcatcctgtccgtgtcacacgattcttaacgattgtgccaagttgggaagcctatcacgcacaagatgaagcagaaaaaattatcacattggatccgggcatggctttcggtacaggcacgcatccaacgactcgtttaaccttgcaagctttagaaactgttttacgtggtggcgaaacagttctagatgtaggaacgggttctggtgttttgagtattgcaagtcgctatttaggggctaaagacgtctacgcatatgatttagatgaagtagcagttgcagcggcaaaagaaaatatggatttaaatcccattgcggccgatgttcatgtgtcagccaatgatttactaaaagggattgaccattctgctgatgtaatcgtcgcaaatattttggcagatattattgtgttaatgattgaagatgcttggcgtttgctaaaacaagacggtaccytcmttatttctggaattattgaagwtamaaaagcaatggttttagaagcactaacgaaagtcggttttgtggtggaccaactctttaatcaaggcgattggtatgcgattatcttgaagaaaccagaggaagagtaaaatgcaacggtatttcatgaaagaagattatccagaaaagatttgtataagtcgcagatgaaaactatcatcatattgtgcgagttatgcgaatgacgccgaatgatcgttgttatttagtatttcaaaataaaactgccattttagctgagattgtggaaattgattcaacatctgtttactttaaagaaattagtaaagaagaaatggacaaagaattgccaattgaagtgacgattgcgtgtgggttaccaaaaggggacaagttagaatggattgttcaaaaaggcacggagctaggtggcaatcagtttatcggctttcctgcgaaaattccgttgtcaaatgggaccacaaaaaaagagcagccaaagaaaaaagattacaaaaaattgccacagaagcggcggagcaatcgcatcgacagcagacaccaagtgtttctttggtggaaaaaacacaagaaatcattgcgcaatttgactcatatgacacagtcttggttgcgtatgaagaatcagcaaaacaaggagaaaaaagtcaattagcacaagtattatccacttgccagccaggcgcacgtttgtgtgtgctctttggacctgaaggtggctttgcaccgcaagaaattgaacaatttctgcaggctggggcgaaactttgcgggttgggtccgagaattttacgagcagaaacagcaccgttgtatcttttaagtgtggttagctaccaaatggaacttttaaattaaacgaaagcccgcctgtaaaattcttgtaggcattctctttaaataaacagagagtaaaaaagcgacagtgattgaaatttaagggaaatttagtataatagagttgttgaaagtgctactgtttcaagtggtacttttcttttttattaaaatagataaaacgtgaacgaatgntctttatccaaaggtcaccttcatagaggagtgaataccatgccaaaagaagaaatactgacaggcccagcggtcatcaaaattgtaagtacctatatgggaccagaacatgttgagttggttcaaaaagcattaacttatgctgaaaaagcacacgaaggtcaagtccgacaatcaggtgaaccttacatcatccatccgattcaagtggcaggcattctggctgaattacatatggatccccatactgtagcaacaggatttttacatgatgttgtcgaagatacggacgtaacactggacgatttaaaagaagaatttggcgaagacatcgcaatgttagtcgatggcgtgacgaaactaggaaaaattaaatataaatctcatgaagaacaattagctgaaaatcatcggaaaatgttattggcaatggcgcaagatttacgggtcattatggtgaaactagccgatcgtttgcacaatatgcgcacattaaaacatttacgtgaagataagcaacgacggattgcacaagaaactttagaaatttatgcgcctttagcacatcgcttagggattagtcgaattaaatgggaattagaagatactgccttacgttatattaaccccaaccaatactatcgaattgttaatttgatgcaaagcaaacgcgatgaacgtgaagcttatgtggcagaagcagtcgaagatattcgtttagcyacggaagatttagaaatttacgcrgaaatatatggtcgaccaaaacatatttattcaatctatcgtaaaatgaaggaccaaaagaaacagtttaatgaaatctatgacttattagccatncgtgttattgtcgattccattaaasattgctatgccgtgttagggcgakcatacacgttggacaccaatgccaggtcgctttaaagattatattgctatgccaaaagcgaatatgtatcaatctatccatacgacagttattggaccaaaagggaatccagtagaggtccaaattcggacccatgagatgcaccaaatcgccgaatttggggtggcggctcactgggcctataaagaaggcaaagcggaaaaaattgaaacagatgaactgacgaagcaagtcgattggttccatgaaattattgaattacaagatgaaagctatgatgcttctgaatttatgcaaggtgtgaaagaagacatttttagcgacaaagtctatgtctttacgccaagtggagatgtaaccgaactgccaaaaggctccggaccactagattttgcttacagtatccatactgaaattgggaataaaacaaccggtgcgaaggtcaacggcaaaatggtacagttagactatgtcctaaaaaatggggatattattgaagtcctaacatcaccgaattctttcggacctagtcgcgactggctgaaaatggttaaaacaagtaaagccaaaaataaaatcaaacgtttctttaaagaacaagaccgtgaagataacattattaaagggcatgatgctgtcattaaatacatgacagaaatcggctttacaccgaaagaatttttaacgaagaataaaatggcggaagtgttagataaatttaaatttcaaacggaagatgatttatttgcggcagtaggttatggcgaagtaagtgcgcaagtagtgtgcaatcgtttaacagaaaaagaacgccgcgaacaagagttggaacgccaacgtcaagaagcagaagagttgttaaatcagccagctaaaaaagaatcagaaaaaatgaaagttcgtcatgaaggcggcatcgtgattcaaggggtggacaacctattgattcgtttaagccgctgttgtaatccagtgcctggtgatgaaatcgttggttacattaccaaaggacgtggcgtttcaattcatcgtgcggactgtcctaacgtacaacatcaagaagaactagcacaacgtctaattgaagttgagtgggaagataccgagcacagtcgcaaagaatacgctgccgatttggagatttacggctatgatcgtagtggcttactgagtgatgttttacaagtcattagttcgatgacaaaaaatttagtcggcgttgaagctcgtccatccaaagataagatggcccagattcatgttactgtgaaaattcaaaacctttctcatttaaaaaccatcgttgacaaaattaaaagtgtaccagatgtttatagtgttcgtcgaaccaatgggtaagtgttaaaagtgaggcaaaaaagatgaaagtagttattcaaagagtcagtcaagcacaagttgcgatagaagagcagatagtgggacaaatcaaacaaggcttcatggtgctggtggggattcatcaagaagacacgccagaagatgtggcttatgttgttggcaaaatcagtaaattgcgtgtttttgaagatgacgaaggaaaaatgaatcgcagtattcaagagattgaaggatcaattttgagtatctctcaatttaccctctatgcaaaaactaaaaaaggcaatcgtcccagttttattgaagcggctcgtccagatgtggcgattcctttgtatgaattatttaatcaacaattagaagcagaaggaatagcggtagccacaggagaatttggcgcggatatgcaagtgtcgttgaccaatgatggtccagtgaccattgtgattgatacacgagaaaaataattgattttcctgtcggaaccccttgactttctaagagaactttagtagtttatagataatattaaaaatctacgaaggaacgagtaagtttcatctgtctgcgaagagagagttgccgtggctgagagcaacttcaacagtgaaagtgaaagacattctggagatggacggaagaaaagccgtcccgttacgagcgttaatcgttgaggaaagagtaaaatctttcaaaactaggtggtaccgtgtaaaagagacttttacgcccttgtatgttcaacatacaagggcttttttcatttttagaaaaaagaaaatggcgcacacatttttgtggaatgatagaaggagagaaagacaatgagttatcaaaaaccaaaaggaacaaacgatattttgccaggaacttctgaaaaatggcaatttgtggaagaaacagctcgtttgatttttaaagattatcaataccaagaaatcagaaccccgatttttgaacattatgaagtaatatctcgcagtgttggcgataccacagatattgtttcaaaagaaatgtatgatttttatgataaaggagaccgtcacgtgacgctacgtcctgaggggacagcgccaattgttcgggccttcgttgaaaataaattatatggtccggaatatacgaaaccatataaaacctattacatggggccgatgttccgctatgaacgcccacaagctggtcgtttgcgtcaattccatcaaattggtgtggaagcatttggtagtgaaaacccagcattggatgttgaaatcatggctatggctttggacttcttcaaacaattaggcatccaacaaatcaaattagttattaattccttgggggataaagaaacacgtgctacgtaccgtcaagcattaatcgattatttagagccccatatggcagaattaagcgaggattcacaacgtcgcttacacgaaaacccattgcgggtgttagacagcaaagataaaaaagacaaggtgattgtcgcagaagcgccctccattttggattatttaaatgaaccatctaaagcacattttgaagcagtaactgatatgttagatttactagaaattccttatgaaattgatagtaatatggttcgtggcctggattattatacacacacaatttttgaaattatgagtgaagcgcctaaaatgggtgcgcaatcaactatttgtgcaggaggccgatacaatggtttagttgaagaattaggcggcccagacacaccaggttttggttttggtatgggcattgagcgagtgttgttaacaatggaagctgaagaagttgtgattccagcgttatctgaattagacgcatatgtggttgggattggttcagacaccaacgtcgcagctttgcaacttgttcaaagcattcgtaactttggtttctcagctgatcgtgattacatgaatcgcaaaccaaaagcgcaatttaaaacggccgataaattacaagcaaaattagttttaacaatcggtgaaaatgaattgaatgaaggcattgtcaacgtaaaatcaatggcaacacgcgaagaaaaagccttcccgttaagtgctattcatgattcatttgatgaagtgtatgacgaaatgatgacaaaaatgattgaagaataaaaaggagagattgagaaatggaaaaacgcacaacctattgcggcaatgtatctgccgaatttattgaaaaagaagttgtattaaaaggatgggttcaaaaacgtcgtgacttaggaggcgttatctttattgatttacgtgaccgtgaaggaatcgtccaagtggtctttaacccagaaaagtcaaaagaagcatgggaaattgctgataaatgtcgtagtgaatacgtcatcgaagttaaaggtcaagtcgtttatcgtgataaagaagcgattaatcccaaaatgaaaactggcgagtttgaagtgatggcgactgacattacgattttaaatactgcgaaaacaacgccatttaccattgaagatgacaataacgttaatgacgaattgcgcatgaaatatcgttatttagatttacgtcgtccatcaatgacaaacaacattaaattacgtcaccaagtaacgaaaacaatccgtcactatttagataatcatgactttttagacattgaaactccttatttaggcaaatcaacaccagaaggcgctcgcgattatttggttccttctcgtgtccatgccggtcatttttatgctttaccacaatcaccacaactctttaaacaattattaatgggggcaggcttcgatcgctattaccaaatcgttcgttgtttccgtgatgaagatttacgaggcgaccgtcagccagaatttacacaaatcgatattgaaacgacctttttaacaccagaagaaattcaaacatatacaga

SEQ ID NO: 6 - DNA, 789 bp; double-stranded, linear
aatgtcaaaattattagttgttaaagcacatccattaacaaaagaagaatcacgctcagttcgtgcgttagaaacatttttagcttcataccgtgaaacaaatccatcagacgaaatcgaaattttagatgtttatgccccagaaacaaacatgccggaaatcgatgaagaattattatctgcttggggtgcacttcgcgctggcgcagcatttgaaacattaagcgaaaaccaacaacaaaaagtggctcgttttaatgaattaactgatcaatttttatctgcagacaaagtagtaattgctaatccaatgtggaacttaaacgtaccgacacgcttaaaagcttgggtagatacaatcaacgttgctggaaaaacattccaatatactgcagaaggaccaaaacctctaacaagtggtaaaaaagccttacacatccaatcaaatggcggcttctacgaaggaaaagattttgcttctcaatacattaaagcgattctaaactttattggcgttgatcaagttgacggattattcatcgaaggaatcgatcatttccctgatcgcgcggaagaacttttaaatactgccatgaccaaagcaactgaatacggtaaaacattctaaattttccgagtgatttacatcaaaaagagacaagcagttcgttcactgcttgtctcttttgttacgtagattcttgttgatctggcttatcttcatcatacaaaccggaaacgatttggtaccactcaaaaatgtgtgtaatatcacnttagctgcggcat

SEQ ID NO: 7 - DNA, 4159 bp; double-stranded, linear
cgtcgtttattacgtcgtgacggtaatgcacgggaaaaaaattaggcattaatgaagcctttttatacaaattagtgcctgttgttggcgaaatcatggtaagctactatccagaagtattacaacaaaaagacttcatcgaaaaagtggttcggacagaggaagaangtttccatgaaaccatcaatgaaggtttaagcatgttaaatgaggttattaaagaagttaaagatgcaaaaggcgatacattagatggaaaaattatcttcaaactttatgatacttttggcttccccgtagaattaacggaagaagttgcagaagatgaaggcttgaaagtcgaccatgctgggtttgaaacagaaatggaagcacagcgtgaacgtgctcgttctgcccgcagtaaagaaacttcaatgggtgttcaatctgctttattaacagatattaaagtagaaagtaaatttgttggctatacagaattaacacatgatagtgaattatttgttattattcaaggtgacgcactagtaaatgaagcatctgcaggaacagccgaattaatttttgctgaaacaccattttatgctgaaatgggtggacaaattgctgaccgcggctatgtaaaaaataccgcaggggaagtcgttgccaacgtggtggatgtgaaaaaagcaccaaacggtcaatttttacacaaagtagaagttttggcgccattagcagaaggtcaaatttatcaattgcaagtggacgaacggatgcggacacgtattttgaaaaatcatacggcaacccatttattgcatcgtgctttaaaagatgtgttaggggagcatgccaaccaagcaggctcattagttgcaccaggacatctacgttttgactttactcattttgggcaagttacatcagaagaactagcgcggatggaagccatcgttaacgaaaaaatctgggaagctattcctgttgtcacaattgaaacagatattgatacagcgaaaaacatgggcgcaatggcgttatttggcgaaaaatatggcaaagaagtccgtgtagttaatattggggattactctatcgaattatgtggtggaacacacgttgctaatacagaagatatcgggattttcaaaattgtttctgaatctggaattggtgcaggagtacgccgtattgaagcagtgacgagtaaagaagcgtatcaacttttacaagaagaagaacgtcaattgaaagagattgctacattagttaaatcacctcaattaaaagaagtggttacgaaaacagagcaattgcaacaacaattacgtgatctacaaaaagaaaacgaacaattggcaggcaaattagcgaaccaacaagctggtgacatttttaaagatgtcaaagacatcaatggtgttcgttatattgccgctcaagtcaatgttaaagacatgaatcaattacgccaattggctgaccaatggaaacaaaaagaattgtctgatgtactagttctagcaactgcacaagatgaaaaagtaagcttgttagcggctatgacaaaagacatgaacggaaaaggcttaaaagccggtgacttaatcaaagcaattgcgccaaaagttggcggtggcggcggtggtcgtcctgatatggctcaagctggtgggaaaaatccagcagggattgcggatgccttagcagaagttgaaaactggttggcaaatgcctaattaaaaatgttttccctattattaatataaggagaatgctctttatagcaataatgacagccctcttcaaagttatgaaattgattttgaagggggttcttttttttaaatgattaaggagaggaaacagtagattgcacgaatgtgtaagttttcatcttcaattgacaatggtataataagcaacggaggaatcaaaaatatgaatgaaaatcaattatcaaaacgtctcgcaacggttggtgatttaatccctagaggaagtcgcttagcagacattggttcagaccatgcttatttaccagttgctttaatgttagaaaataaactgtcttttgctgtggctggggaagtggtggaaggcccctatcaatctgccaaaacccaagtcagtaaatccaatttgacggataaaattatcgtacgtttagcgaacgggctagatgcaattgaacctgaagatcamatagacgtcattagtatttgtggaatgggcggcacattaatccgagatattttagaagctggacgcaaaaaaaatcgtttaacagggaaggaacgccttgttttacaaccgaatattggtgaaccaactttacgccgctggttaatggcaaatgactacagtattattgatgaaacaatcgtggaagaaaaccgtaaattgtatgaaattatcgtagccgaaaaaacagagcaatccgtttcttatacggaccaagaattactatttgggccagttttaattaaaaaacaaggaccggtttttactaaaaaatggcaacgagaattaaaacagcgcaaaactgttcttgcacaactagcaaaagcaagtggagaacatattgaaaagcaagcgaaactacagcaagaccaacaattaattgaggaggtactggccaatggctgtgaacggtaagacattgattcgacgcttcaatgactattgtcccgaatggttagcagaaacgggagatcctgtgggcttgcacattggtacattagataaaccaattgaaaatgtgatggttaccttagatgttcgtcctgaggtcgttgcagaagcaattgagaagcaggttgatttaattattgcgaaacacccacctattttccgcccagttaagcgattaaccacagataattttcaagaaaaaatgtacgctgatttattaaaacacgatattgctgtttatgcagcgcatactaacatggatattattgacaatgggctaaatgattggttttgtgaattattgggaattaaacagaccacctttttaactaaaacacatactgttccttataaaaaattagccgtttttgtgccaattgatgaagctccgcaaatgagagaagctttaggtctagctggcgccgggtctcaaggtgattattctaaaacaagttactctttaattggaacaggacgttttacaccaacacaaggagcaaatccaacgattggcgaaattggtcaagaaagtgtcgtccaagaagcaaaaatcgaagtgattttccctgaaactaagcaagaacaagttcttgcagctatgttacaggcgcatccttatgaagaaccggcgtatgatgtttataccattgaaaatcaatcaaaagaatttggtttaggtcgggttggagtattagacaagcctgtgagattctcttattttgtacagcaagtcaaggaagctttccaattggatggcttgcggktcattgcaaaagatgatactaaaatgattcaacgggtagccatttgtggtggaagtggtgaaaaattctatcatgatgcattacgtaaacaagccgatgtctatattactggtgatgtgtattatcatacggcacatgacatgattgctgaagatttaccagttatcgatcctggtcattacattgaagcgctttgtaagccaraacttgtggaattaatgaatcaatggaaacmagaaaatgagtgggctgtatccattttkgaatcagaagcgaataccaacccatttcgttttaaataaaaaaatgaagattaaaggagtgttcttttatgtatgaaaatctattacctcgttttttacggtatgtgaaaacagaaacacgctcggatgcaactagcacaacgacaccatcaacacaaacacaagtagcctttgcacaaaccttaaaaaaagaattagaagaattagggatgagcgatgttatttataacgaaacaaatggttttgtgatngctacgttacctagtaacgtggagaaagacgttcgttcaatcggctttattgcccatatggataccgctgattttaatgcagtgaatgtttctccgcaaattgttgagaactatgacggagaatcaacgattcctttagataaagaaggcaaattcactttaaacacgaaagactttcctaacttaaaaaattatcgtg

SEQ ID NO: 8 - DNA, 8377 bp; double-stranded, linear
atcgatacaatttttcttttgtcacaacagaagaagaattattagagattttaaaagatgccttaaaagataaagccttagttgtcagtacattagtcagtaaacaactaatcacagcggcgaaagaatttagtgaacgaacagggttgttatatttagatttaatggcgccattttttgaattaattcaagcgaaagccggagtagatcctattgaagagcctggacgacgccaccaactagatcgtgcctattttgataaaatctcagcgattgaatttgctgtaaaatatgatgatggcaaaaatcctcaagggtttcttgattctgatatattgttgttaggcgtttcgcggacctcaaagacgccagtcagtatgtatttagcgaatcaaggctaccgcgtttctaacttaccattaattccagaagttccattgccgccaattttggaagaaatggatccacaaaaaatgattggtttagtttgttcgccagaaacattaggacagattcgtagcagtcggttggcttccttaggtttaggtaatgagaccagttataccaatgttgaacggattgaacaagaattagcttatgccgaagagatttttgcgaagtatggcatcccagtgattgatgtaaccgcaaaatctgtcgaagaaacagcctttttaattaaagaaaaactagatgaaagaaattaaaaagcttggcaacctcactaaatttcagtgaagttgccaagctttttatacttaattgagcttctttttgttagtcaatatttttttgatcgacaatgagtaaagcgatcatcacgtagacaatccaactacttttagaataaagtgtatagcggggttgccatttgctagcaaatttttccttgtattcgcgtaatccttggaaggagtaaatttctgaaccaaattcataaattaacgcagcaatccgttcttgaataaaactttttcttgattgaccaacgttggctaacggagccatccctaaattgaaataatgaatattttctgttttcatatattcaaataaatgaataaataagaaatccatacttccagaaggggctttttctttatggtgacgcatcaagtcgatggtaccaacttcatttgtgtaactaggaatgatattagcgaaagagaccatttctccttcagcatttcggacaacagcaattgggtttctttgaagatacgcttcatcgaaaaatcctagtgaaaagcctttttcttttcgattgtctaaccaactatccgaaatagcttttaattcgtgcatttgttcggtactaaaaggaggttggagtacgtcaaatgaatagccggctttagtaattttattaaacactgcgcgggtacctttgaattttttcccagacatcgtaaatgtttctagattaactaaggcttcttcgcccattttgataaattcgtagccatattcgtgtagtaacatcacgctgtcctcattggtttcgtaaaagacgggtacatagccgaaacgatctgtttctttaaggaatgcatcaatcgccgcaggaaaatcttctttgttcccagaagggttgcccatcacaacgcatttattattaatggtgttgaattgtaaaaagacagtcggttcttctttgggatataagaaaacctgtttatcatgaagaaagacaagttcactgtcaatattcccgccataagttgttaagatattatgcaagatactatcttctggaaactcaccaacttggtgttttttcccttggaggtagcgaacaaatagaaagttaaaactcataactaagaggatagcgataaatcctgacaaccagatccgttcggaagggaacaagaaaaattccacaaaatgatgacgatggtgtgggaagttcggtaaattataaacaccaattaccaggtataacaaagtcaacaagccaaagataaagccatcaatcgtcatccactcccaagagtaaaccagttgttcacggtacaattctgattttgaaaaaataacgataaataataaaatagctaaatagaaaatggaaaacatactaaagtcaacaacaaatgaatacaagatagcaccaattaataaaataatcgttggataataggctcttttaacmcgatcagcatccccgtcccataattmataatgcaaagcctaaaacaatactcggaatttgnataataatatgtgaacggaaggggttaatatctcttaaccaatgcacttgagtgaaggcttctggaatagtggctaggagcaccatcataattcctgaaaaataaagtaaaaccacttctagcttgtgggcaatttccaaagtaatttgttttagcagttgacgataatgagtatccaacttttggcttaagtgttttgtaaagaacaaacagccaattaagaacggaataatataatagaataaacgatagagcaataaccacaaaacaataatttcacgatcgacacctaagttgctcagtcctaaaatcatcatgacatcaaaactacctaaagcccctggaatcatcgaagcaatcccaataatcgaagctgctacatataaaggaacaatatcaattaaaggaatcggtacatctaataagtaaccaatactgataaaggtaattaaaacacctgtccattctaaaaacgaagaaacaactagagataagcgattttttgcatcgaggttaccaaaggaactatttttttggaaatgtaaaataagataaagtaacgggaaataaagaccgccacctaataaccaaatccaatattgctgtaaataagccatctttggatcaaactgaacaaggaaaaagcaaagaatactataaatagatagaccggataacacaaaaagtaaaatatgggttaacgcaggtaaaattttcttttcctctgttttatttccataaaattcagaacgaagtcccatgctgaccaaaccaccgaatccaccaatattattgattgtattgacaatccagctagattcaaggagttcccgttttgagactttcaagtttaaaatgcgatttaatgttaagtcataatttagcatcggagtaacggaaactaaaccgataaccatcatcaataacaatttccatagcggaatctcatcaaaaatctgttttaactgttcaaatgagatcgttttaccaattgataaaagttgggcaacaacaataattgagaccgcaataacaaacagtgtttttagtaatcctgtatgcgttttgatccaatgaataatttgtttcatttagacaccttcatttcctttaagaatttttcgattgttttattaaaaatatctggtgagtttttggcaaataaatgaccctgtttatttaccaagaccaatttgccggcaggaatggcatcagcaatcgcccgtgaatgggaaagcgcaattaaatctcgactgccagtaataacaagagtaggacaggggatgtgttctaaatcttgttttgtcagtccagtatcttcaaataacagagccacgatagggagccgtgcgcgcaatttttttgaaaaaaaggcgccaatacgacaaaaccaatattgaaaataagtggcaatcgttacatattttttcagaccagacatggtgacatttccagaatttaagacgagtttgttgacgaaatcaggatataaatgggtaaaaaccatggcaatatttgctccgtcactaaagcccaataaattaatttttgttaagtgttcttgttgaataataccagctaaatcttctgccaaaagcggaaaagttaattgactttgtgtattggtggaacgtccatgtccgcgggtatccaccgcaataacttgatactccttggagaaataagaaatttgataattaaaaaaagtatgatcattgccattaccatgaagtaacacaagggggtaatttgttkctttgccaaaaatttgayaaaaaatttgactgccatctattgtttgaaaatatttttctattgccattctccgtcacctatctcatctataatcaatcgagtcctctctcattatagagtcttttgtcttttttttgtaataaaaaacagaaaattttccgaacagttttgtaaggtgttgtaatatagtgtgatatagtagaagatagccacctaaaaattagactagaggagggaaagttgatgtctttaatcgttttaattggtgcccaagctgtcgggaaaatgaccgttggcaaggctttagaaaagcagttagatgctaaattactatttaatcatcaaaccattgacttatttgcaaactatcttgggtatacggaacgtgcatttcaattgtctgattccgttagaaaggaactttttcatgcctttgtcgaaaatccagccacaaatacaacaaaaaacattatttttacagtggtgattgcttttgatcaagaacaggattttcaatttttagaagaaatatcagaaatttttcttagtaaacatgagtccgtttatttcgtcgaactcgtctcttcaacatcaatccgcctagaacgaaatgttcatccagaacggctagaggcaaaaccttcaaaacgcgatgtcgacttttctcgaaaagaattactcaatacctttaaagaacatcgattagtaagccacgaaggtgaactagaaagtatatttccaaatgtaaaaatagcgaaaataaataattcaaacatgacaccagaagaagtagccacgaagataattgctacttttggtttgacataatgtgaaaggaacatcggaatcaatgaaaaagttttttaaatatctcggtagcttgatggtccttcttttaagcatagctttaattttgataggatatttaaccttccgagagtttcgaccacgagcggttgaaccagttgctataaataaacaattttcagagcaaaccatcgaaaaaaagcaatccatttctttagtcacgtataacataggctatgccggcctaggacaaacagaagatttttttatggacggtggcaaaactgtccaaccagttaataaggcaatggtccaacagaatttaacaggcattgaagaaaccttaaaagaattaccagcgatgatttacttattccaagaagtcgatcgtcgctcgcaacgttcttatgaagtcaatcaagaggaagaattacaaaaacagctacagctgaacagcgcatttgcttataattttaaggtagattatgtgcccattccttggccgccgattggacgagtagaaagtggtttattaacattatcaaatgaaaaaataacagaggccaaacgcattgctttacccaatccctttcgttggcccgttagcattagtaacttaaaacgagcacttctagaaacgcgctttccaattaaaggcacagacaaagaattagtggtttttaacttacatttggaagcctatgacaatggggaagggaagattgctcaaagcaaaaagttagctgacgtattatcccaagaatacgctaaaggaaactatgtaattgctggaggtgactttaatcaagttttcaaaggcagtcatcgatatcctgacttaggggaagctggttgggtaccaggagaaattgatccagcagacttacctaaacatttttcacttgcttatgatgatcaacaaccgactgtgcgggtgcttaataagccttacactggctcttatgaaacatcccaagtgtatgtaattgatggttttattgtttctgataatgtggctgttcatagcgtgaaaacaaaggacgaacaatttaaatatacagatcaccaacctgtgaagatggaagttgggttgaaatagaaaaaggaggagatagatgaaattaggggttattgccgcaatggatttagagcttcaaaaattattggaatattttccaccacaacgaaagatacagctagcaaaaaatacattttatatttatgaacaaaaaacatcgcaagtcattatggtttgtgcaggacaaggaaaaacgaatgctacgctatatagtcaaatacttattgattcatttcaaatagaacaactaattaatatcggtatttgtggctgtttaaatgaaaaactgcaactctttgagatggtgctaggtgaggaatactgccattacgatattcgtgaaagacagtcaatcaataaatttccttatcagctgtactataaaggagataaaggaatgctggccgaacttcaacatctagatgaaaagataaagtgtgttcgttttggaactggagaaggcttcgtttgtgacacaactgaaaaaagaaacttaattgaacaattctctattgactgtgtggatatggaatccgcagctattgcacaatgctgctttttaaatgattgcgcttttgtttctataagaattatttgcgatagagcggatgctaacgcagtcaaagtaacagaagatacacaaacacaggcaatggaaaaagtatttgaattggtctgtgcatatataaattaaaaaagaaagagcttggaacaaaaatccagaaagatttttgttccaagcttaaaaagtaatataggttggggataaaagtaacattgttattgttccaattattttacagatagcctttagtaatagaatgagtggaatttagcatatttgctggggttcctgtaaaaagaagctgtccgccattttttccaccttcgggacctagttcaatcaaccagtcggcacttttaatcacatcaatgtgatgttctaataaaatcaagctgtttccttcttctaccattcgattgaaaagttgaagactttgttggatatcaattaagtgtaaaccatctgtaggttcatccattaaatagatagcttttttttggtgaagtgtgtctgctaattttaccctttgcaattcgccaccagataatgttgagagcgattgattgagtttaagatagcttaagccaacttccagtaaattttttaatgaaagagcaaaaggctggtctttgaaaaaatcatagccatctttaacgcttaaagctagtacttcaacgatattttttccgttatacagataatgaagcacctcttctttgtaacgcgttccgtgacaggtttcgcaaatactagtaacatcctccataaaagacatatcggagacaattatgcctttccccttgcaagtaggacaggcgcctttggaattatagctaaataaagctggactaacatgattttcttccgcaaacagtttgcggaccttatcaaaaatattaagataggtcataggtgtggatcgtaaatttgcggtaatgcttttttgtgaaagatgaataatttcttggttatcagcctgggctttttgataaatttcttccgctaatgatgatttacctgaaccagcgaccccacaaataacagtcaaaactcctaacggaacttcgacagatagattgtttaaattatgcagtgtcgcatgttcgattgataaagacttccttgcttttcttggttggtcgtttaaagggagcggctcttgaagcgcttgactagtcaaggttttggagactaaaaatgcgtcatacgttcctgaaaactggacatggccaccattttcgcctgcgaaaggtccgatatcgatgataaaatcagcttctctaattaattgtggattatgttccacgagaaccacggtgtttcctttattttttaaattgagcaatgcacgactgatccgttcgatgtcctttggatgtaagccagcacttggttcatctaaaatatacataatatcatttaaggcgctgtttacatacttagcaattttaatccgctgtgcttcaccaccagaaagtgtttcagttgctcgtcctaatgtgaggtaggagagaccgatattaattnatgcttctagacgtacaagtagctcttcttgaatagtttttattaaggataggtccattgaacgaataaaagaatgtaattcagtgagtggcatgtcaacagcatcagcaatacttttctgattaattttgcagctacgaacacgttcattgactctacttcctaaacaatcaggacatctttttacggtaacaaagtgattaaggtatttttgatgacgtttgccttcgtctgtatgcaatatgctacgttgcatacgcgggacgattccttcatacaaagctgtatgaggccactctttgggtggattagctagtttttgttgtggagcatataarmrtaatgctaactcttcaggagmwtagtccttgattttwktatccaaatcaaatagaccactatgggcataacgcttccaccgccagttgc

SEQ ID NO: 9 - DNA, 1102 bp; double-stranded, linear
gtttttaaacacgaacgttaaacggccgaatgttcggtttttacgttatttttgtaaataactaggaggcagtaagtatgaaagtttttgattatgaagatgtccaattaattcccaataaatgtatcgtgaatagtcgttctgaatgtgatactacagtaactttaggaaaacattcgtttaaaatgcctgtcktccmgcgaacmtgcmaacattatgrtgraacgattgcggaacccttgctgaaatggttatttttatatcatgcatcggtttggatgaagaggcgcgagtgccatttattaaaaaaatgcaacaaaagggcttgatcacgtcaattagtgtgggtgtgaaagaaggggaatacgcttttgttgaaacgttagcccgagaaggtttagttcctgactatgtgacaattgatatcgcccatggtcattcaaatgcggtgattaatatgattcaacacttgaaaaaatctttaccagaaacgttcgttattgctggcaatgttggaacaccagaagccgttcgcgaattagaaaacgctggagccgatgccaccaaagtggggattggaccaggaaaagtttgtattactaagattaagactggctttgggacaggtggctggcagttagcggctttacgttggtgtgccaaagctgctcggaaaccaattattgcagatggtggaattcggacccatggagacattgcaaaatctgtgcgttttggggcaactatggtcatgattggttcattatttgctggacatgaagaatcaccaggtgraacaaaagtggaagatggtgttgtttacaaagaatactttggtagcgcctctgaattccaaaaaggcgaaaaganaaacgttgaaggcaaaaaaatctggttacgccataaagggaagttggcagatactttagtcgaaatgcaacaagatttacaatcttccatttcatacgcgggaggtcgcgatttagaagcgattcgtaaagttgattatgtgattgtaaaanattctatttttaatggtgataccatttaacattcaactatagactgaaaagaagaccgcacgtagnaaggaaattaaaat

SEQ ID NO: 10 - DNA, 1009 bp; double-stranded, linear
naagaatacggtctgtctttaacaacttcaattgatgatattttagaagataaagagattcaaatcgttgtggaattaatgggaaccattgaaccagccaaaacgtatatcatgaaagctttagaaaagggcaaacatattgtgactgccaataaagatttactggcgcaacatgggagtgaattagtagcgttacccaaaaacatcattgtgatttatattacgaagcaagtgttgctggcgggattccaattttaagaacaattgctaatagcttagcggcagacaatattcaacaagttttagggattgtgaacggtacgacgaattatatgcttacgcaaatggtttctgctgataaaagttatgaagaagctttagcagaagcgcaagcgttggggtttgctgaagcggatccgacaaatgatgtcgatggaattgacgcagcctataaaatggttattttaagtcaatttgcttttgggatgaatgtttcattaccacaagttgatattcgtggaattcgcggattgtctttagatgatgtcgctatggctaaacaactggggtatgaaatcaaattgattggctctgctgaacaaaatgagaatagtatctcggtggaagtggcgcctatgctagtcaatcaaaagcaccctattgcatctgttcggaatgagtacaatgcagtatttattaaaagtgcaggcgtgggggaatcaatgtattacggtccaggagctggagctaaaccgacagcaaccagtgtggtcagtgatttaattacgattgctaaaaacattcgcttggcaacgactggccatatgttcaattcgtatcaacataaaacacaattgacgagttccgaaaatgtatttgggcagtactattttycattagatgttccagatacaccaggacaatttttgcagttgacgcaattaatgactaaagcagaagtcagctttgatcattagttcaacagaaatcagatggacagcgagcaaga

SEQ ID NO: 11 - DNA, 5558 bp; double-stranded, linear
ncggntaaaattttttcagcatccttatattaccagtttggtctttcaagactacttgcgatcagcactttgtacagttaattgtgcgcaatatgccaacaatccagagcttttaactagtcaattatttggacatcttaaaggcgcttttacgggagcagattccgataaaattgggscctttcaaagtgcagaagggggcgttttatttttagatgaagttcatcgtttgagtcctgaagggcaggaaaaattgtttacatttttagatcagggtattatttatcgaatgggtgaaaccaatcggcccattcctgttacgtgtcggttgtgctttgccacaactgaagaaatttctagcacctttttaacgacatttttaagacgaattcctattcaaattaaaatcccaagtcttgctgaacgcactcaagcggaaagaaaacaattaattatgcgagcattttatgaggaacagcaagctattcaaaaagcagttactatcacgccacaagttatccaacttttagaaaaccaccattatgtaggcaatgtaggtgaattaagaaataatataaaaattattactgcacgcagctttgccgccaatcttgataaatgtgttattccaatcactttgcacgatctaccgaaagaatttctggatcaatcaatcaaactagttcctgatgaaaatgaattgcctattcgtttagatgagcaaacaaatctggttagtttgttagaggaaacagagcttgcgcaargaagaattatccagagttatgaacgaatccttcgtctttatgtctctcaccatcatcatctttccactgctaataacgatatctcgaaagaaattgaacgcttattcgatgatttattatttgaaaagaagcgagagaaaaatcacgaaatgctattgtttattacgcaaaatatccgtcaattattggaaacgattgaatcgtcttatcaaattcggtttaatggcagtttagtctatgcattaagcacctatctgtttcaacgaagatgcattgattggtttccagaacaagaacctacaacagtcattgacgaacttttaacagaagttcaaaccaaattagcaactagttatggtacgctgaacaactgttaactttagtgaaacgttcattagatattgaactatcccagatggawcgaattattgtcaccatttatcttcactattcgggttcagtaaagaaaagtcactatccgaaagcggtgattgttgcccacggatatgccacagcaagtagtattgcgaatgttgcaaatcggctgttaaatgtgccaatttttcaatcgtttgacatgccgttagatgttactcccaraaaaatttccgaacacttaattcactatatggaacgtcaagaaacgaggaatggtttagtaattctttttgatatgggttcattgaaagawatttatcagtattttccggcagaagragaaggkccttttttattaatgrataatgtgacmacmagcttggctctgkctatwggagragccmttwaagmcgaakttcttttgaagaattgccccaaaaagcgttamcggtycatccmaatgaatgggaaatcatattacctgaaaataaaacggaacgtgtcattttaacaacgtgtagtaccggaattggcacagccgttaaaattagagatttacttgaaaaaagtttacctgcggaagcacaattaaagattattccttgtgaatataatcaattacgtaatgcagagtcgatcaaagaaagttttccagaatatgagattgtcggcatcatcggtacaaacaacccgtcttcaaatgacctcccgtatatctctttagaagagttgattgcaggaaaaggaattacgacccttttagaatggacaaagagagaattaactaaagatatgctgtcctatgtaaatcatgagttgattcgtaacttttcattagatcgggtcattcaatcagtgacgattttagatacagaaaaaattattcgacaagtagaggtctttttaattcaattagaagagcggtggcaacaaacaattcaaaatgatcgtaaattagcggtatatgtccatgtcagttgtttaattgaacgattaatccggaatgaacctattgaaaattataatggcgctgaacaactaaagcagtgtcaaagaacggtcttgcaagagttaaaagaggcgtttagtgtcattgaaaaagtttatagtgtcaatatacctgaatcggagcttttttatgtctatgatgtgttgtttggaaaaacggagtttaacaacgcagaaagcgatttttaaaataaaaaggagggagtgccacttttttggcactctttttgctatataaagaagtaagtgaggtgaagaaaatggaacgtaaaattattctggcaacacatggtaatttcgctgcagggattcagacatcattagctttaatttgtggtgaaacaaagaatgtggaatgtctttgcgcttatatggaacaaccttatgatttagctaagacggtcaaagacattttaaagaacaatcaacaaaatgaattaattgtgattacagacctatttggcggaagcgtgaataacgaattctttaattatgtggggaaacaagcaatgcatttaatttcaggattaaatttagcaacattaattgaaatatatacccaaataaatactgttgattcattagttgatttagtaaaacgtgccgttgaaaacggacaagaaagtctttgttattgtaatgagttatctagtaaagaaattttagaagaagaattttaggaggaatgaantgattaaattgttaagagtcgatcatcgcttgttacatggtcaagtggctttttcatggacccaaggcttaggagccgattgtattttaatcgcaaatgatgacgtacctaaaaatgatattcgaaaaacaaccattaagctagctaaaccagcaggagtaaaactggtcattaaaacgattgaagatgcgattgccgcactaaaaagtggtgttacagaaaaatacaaactttttattgtagttgaaagtgtggaagatgcttatcgattggctactgcttatccagaaataaaagaaattaacttaggaggaatgaaagtaagggaaaatactcgaaacatttctaaagcaattaatatcacaccggatgaagaaaaaatggttaaagaattggtcgcaaatggttgtgaagttgaaattcgacaagtcccaaatgacaaaaaagtagcagcattaaatgtcttgtagaaaggagaaataaaaatgataggacaagcgattcttttaggttgcatcgcttttattgcgcagtcggaatatgctttaggaacctcgttgctttcaagaccaattgtaaccggtttatttgtcggaattgtattaggtgatgtcaaaacgggcgtaatcatgggcgcgaccttagagttagctttcatcggttctttttcagtgggcgcatcaatcccacctgatgtagtgactggtgggattcttggtacagcgtttgctattactgctggcgcaggaacagaaacagccttagtcttaggcttgccaatcgcaacgttaacgttgattcttaaaaatatttatttgggtttgctcatcccaatcatgagtcaaaaagctgatcagtatgctgaagaaggagcatataaaggggtggagcgcatgcatttacttgcaggctttggcttatcgttcatgctagcgctcattgtaactatttcatttgccgtgggcagcaacaccattaaaggcttacttgatctgatccctgaatttattcaacatggattgtctgttgcaacggggattattccagcgctaggatttgcgatgcttgcacgcttactgattaacaaacaagtggcgccatatttctttttaggttttgtcttaatggcctactttaagttacctgtaacaggagtagcaattttgggtgccattacagcagtaattgttgtgaatatcatgaattatgccaaaggaaagaatgaaacaatacaaacaacaagtggggaggtaattgatgatgacgaagacttctaaaactaagacagaaaacttaattacaaaaaaagaacttaatcaagtcttttggcgttcatttcaaatggaattttcatggaattatgaacgtcagatgaatatggcttatgtctatgccatgatccctattttaaagaaattatatcctcaaaaagaagagatggcggcagctttaaaacggcatcttgctttctttaatactacgccgcatatcgtgacgtttattttaggaattaatgctgcaatggaagaagaaaatgttctggatgaaaattttgaagttggaacaatcgatagtattaaaacctcgttaatgggacctttagctggtttaggtgattcctttttctggggaaccttacgcttgattgcaacaggtgttggaacttcgttagctttacaagggaatgtgttagggccaattctatttttactcatttttaacgtcccccatgtgattgttcgttatttactgaatcgttggggctataaattaggaactggttttctcaaaaagattcaagcaaatggcatgatggaaagtcycacattaggcgcttcmataattggcytgatrgtggkargtgcyatgaccgcctccatgattgatttaactatcccgattacaatcagcggaagtgggaaaaatgcagtcacggtycaaaatatcyttgacgatatcatgcctaaattattaccgcttgcatcttttggttttgttttttatttattgnaaaaagaagtaaaacctttagcgattttaggtggcatggcaattgtcggaattcttggctcattaattggtctattttaggaggcaaaatatgaaaacgatgctggattatrtaaatgaggagcaagcagctctarctcagattcttaaccaatttcaattaactgatacagacgtttcaaaggtcacgcactgtctaattttagcaactggctcgtcacataacgyttktcaggcggctaaartttaccttgaagaagtggcgcctatttatgtggaaatccaagagccgttcaattttgctcattatggcaaagtggatgatcggtttgatctggtcgtagcggtttcgcaaagtggtaaaagtgcttcaacaattggatgccattgcaaaaattaaaaaccaaacgtctgtaaaaacagtggccttggacaagtgatgtcaccagcccgattacggaggttgtggatgaagtcctggatttaaaaatagggcttgaaacagttggttttgtcacaaaagggtatacggcaacacttttaaatttatttctatttggtttgaaactgggctatcaaaagcatcaattaacaaaagtagaggttgaagaagaattagcaaaacttnaccaaagcaattcaggaaatcgattcggtgatttataaaaccgaacaattttgggcaaaaaacggaaaaaaggaan

SEQ ID NO: 12 - DNA, 9047 bp; double-stranded, linear
anatntgaatcgtatagcgaagcaattctctgatcagaatnatttaacttcgtttgggaaaaatttctggcgcaaaacgtataacggaaaatcacccactcaggaactactgaaggttgcaacggaggatttagtacaacataaaatgattaaacagctggcaacggagttagaaatagcccactcacaaacatttgggcaagaaaaaaaagaatggcaagaccaaaagagcagtttaacgctctggcaatttttagatgcaaaagatcaacaattacaggaccaaataaaagagaaattaatggagaaagaaaagccaacgcaaaaagaattgcggcaggcctttgagcaattggatgataaatwtaaaaagaccgattactttgttgaagcaattgaaattccaaatttttcaggtaagcaagcagaattagaaaaaatagccgaagcaatctctccgaatctatcttatgaggagacgttattggagtggcaaaataaattacctaatcttgttattgaatcgtatcaattgaagagtgcagaaatccaaaaagaggatatttattcgttgtctgttggggagattcttagtgaaaaagctgttggtaccgtggtgaaaggataccacgaaaaccaatacttttatatttttaataaggaaggagggcaacttttacagtttgaagaagcaccacaatttggcaaaaatgcctatatcaacacacgctacaaagagaaattagctacgtatcmacmagcaaccaaagtagacttgttggagaaagacagagaaaagttttttcaaaattatcaaaataaaaacagttaaggagcagaaaatgagaaaaaaagcgtattttaaaagtgtaaccatcttcctttctattttgcttgttttttcccagcttcaattatttagtcttcctgcttatggggaaacagtgagtgatcaaccgttactttttcgttcagtaggtgtcgctcaaagtgggacgacctactatgtggatggggaaggaggaaataatgccaatgatgggcagtcgccagccagtgcttggcgtgattttgaaaaagtgaatcagacggagtttcagccaggcgaccatgttctgctgaatgcgcaaagtacctggaataaccaattgttgcatccaaaagggaatgggacagcggcacaaaagattgtcattgatttttatgatacgaatgacaaaggagaaaccatttttgaaacaacacggcgtccgattattaacggtggtggcacctacagcacagggactttcaaacgtgcaatctcaggggccgtgcagttagtgaaccaagaatattgggatatttcaaatttagaagtgacaaatacaccagagctagataatctcgaaggctataagaaaccaggagatgctcaaagagcggggatattagtactaggatatgaacaaaatcgaacgttcaatagtgtcacgataaggaataactatgttcatgatgttcaaacagaatattatttaaatctaagtgggaatactgcaaccaaacgattaaaagcggtaggtggaattattgttttaggaagttggtttgatgagaatggcaatgtagtaacggcagctaatgatcatcgaacaacgactggatttaatgatattttgattgaaaataatgtgattcaacgagtgggacttgaaggaattcgaacaaaagctgattcagatacctcaagaggcaacactttctacaaaacgttttctaatattacgattcgtaataactatttagaagatattgctggcgacgggattgtcttgtcagaagccaaaagtggcggtgtcgtcgaaggaaatgttgctgtccgaatgtgcaatgccgattatggtacacaaaattacgcgggcgtttgggcaatgtctgtagatgacggactgttccaatataacgaagtatacggaatcaaatatggatttaacgatgctgaagcttatgatgtggacatgcagtcaaacaatgttatttatcaatataactattcacatcataatactggcggctttttattgcttatgtctgatcaaaaaaattcggttattcggtacaatatctcagctaatgacggcggtggtaaccgaggaacaggtaaagacaatccaggcggagctggtggctacaattataaagaacaaagcattttccattattgggtgaaaaatgatggagcggcaatgccaactatccacaataatacgatttatgttggcgacggtatttcaacatcattatttggtgaaggaaatagttctgacaacagtggtacagtagccaatttttacaataatattttatacaaagaaggtaccggacaattaaaattcttatctaattatccaacaaatgggacacaaccaattgaacgtaaaatggtcgataatccagaaaaatatttcaaaaataatgttatttggccaaaagaaattgctacagaaaaaagtggtgcaactgttgaaaaattagtatcaagtggaaacatttttgaaaaaccacaattagaaatcacagataaccctgaaaaagtgaaagagttggcagagcaagaatttacgacattgaaaccaacaaaagataatgtggttgaatttacttctaaagaacgcttacgtcagcgagcacaaatgttccgattaaaagaaaactctccagcgattggtaaaggcttgtcggaagtgaacagtccggccgaagacttctttggaaatagcttgaaaaataaagttttagatattggtgcgcaacaagcatccacaattgaaaaaagtattcgttatcaaaatcaagtgttagaaattagttcggcaacaggtgtgtatcctaatttgccagagcaagttgaattaacgtacgaagaagtcgttaatgaagaagtggttgcgacaggcaaaaaagaatttaagttacaatgggaagcaatccctcaagaaaaaattaatacagcaggcacagttgaagttgcagcaacagttatcggcttaccgatagatgctgtcaaagtaacagccaaggtctcttttgagggtgaacttggtgaaggaaaagacaccgttaaactaaaaacagctcaaactgcctatgttcaaaagagtgatggtaaccgagcatactctgctatagcaggcggtaccgctgccattagttcaggagacgcctataaatatccttatggagtaaactatacgggcaattacgcattaaaattaaaaaatgctagttctgcggggtataatcgccggatttacgttgaaattgatacacaagaattgaagaactatcaatcactaaaaagtgccaatttagaactaaatgtgatgcgttatgatgcgtggaatggtgctggaaatacaaatgatgaacgtttgaaaaatacgcagttccaagtagatgtttatggaacagatactaattggatgagtaacaccattacttggaacaatggtccaaataatttaaatgtaccaaatgaagaatttattgctcgacaatcttttacaaatagctcaattatgaataatcaaaatacaatctctattgatattagtaactatctacggaagctaattcaaagtggtgagaaaattccagccaagttaagtttcttattagcgattacagacagtcgtttgcctggttatgattctgataatgctgggtttgatgctttttcaaaagaaggcgcacaaaaggcctatcaagactttttaacaggcaaattgaccttgccaactggtcaacagctagcagaggatagtttagctcctaaaattgttttatcgaatgttttcgaagtcaaacatgagtcgattgaggtcacgacagaagcgggtcaagcccctaaactaccagaaaaaacaactattttttattcggatggttcacaacgagaagtgactgtcaattggtcagaagttccagcatcttcttatcaaaaagaaggaatattcactgttgtaggacgagcagcaggtgtctcaatgccaattattgccaatgtaaaagtcaccgctaaacatattgttggattcaaggaattgcctgcgctggatcgactaacaggcacctcgcgaggcgaactgaatttgccaactgaagtaattgcaaaattagatgatggtagcgaaacgaaattgaaggttatttcttgggatgacgatgttagtaattattcgccaagtagcccgccaggtacttaccagttccctgctgcagtagaagaaaaaataggaattgcgaatcctgatgaacgaaaaatcttccaagtcgtgcaaactcatgcgattcctgaaagaattcaatttgctacagaaacagccactataaaatcaggcgaaaattatcaaattcaatctaaagtgattggtcaagcgccgcacacagaaacggatgcttggagctcgcaagtaacgtatgagttggttacaccagatgctggcaatacagtaagtgtagatgaaaacggtctgattaggacagaagcaacgactgctgcaggaaattatcaaatcaaagtaacaagcaaagttttgccgatagtgactgcacaattttcaattaaagtcacaaaataaacgaactgtttgaagagactggaacaagaattgctgtaccttgcaatctttctagtctcttcgattatctagaatcaataaatattctattgcctactattcattctttttaaaacaaggtaaaataataaatgaaagtaaacgataaaggtgtgtagacaatgaatactatcttaacaggtgatcgtccaactggtaaattgcacctaggacattacgtaggttccttaaaaaaacgagtagaaatgcaagcagaccctacaaatcaattatttgtcatgattgcagatttacaagcattgacagataatgcaagaaatcccgaaaaagtttcagccaatgttttagaagttgctttggactatttagcagttggtttagaccctacgaaaacaacaatttttatccaatcgcaaattccacagttagctgaattaacaatgtactatctaaatttagtgaccacgtcacgtgttcgtcggaatccaacggtcaaagcagaaattgagcaaaaaaaatttggggaaggtgttccgacaggattctttatatatcccgtttcacaagcagctgatattactgcctttcaagcgaatttagtcccggttggggaagaccaaaaaccaatgttggaacaagcgcaagaaattgtgcatagttttaatcagacgtacggtgaagttttagttagaccggaagctgtgttaccaccaaaaggcatgggacgcttgccaggaattgatggcaacggaaaaatgagtaagtctttaggcaatggtatttatctttcagatccagctgaagtggtacagaaaaaagtaatgagtatgtataccgatccaaatcatattcgtatagaggacccaggacaagttgaaggaaatatggtctttacttacttggatgtttttgggaaaaataaagaatatattgaagaattaaaagagcactatcgccatggcggtttaggagatgtgaaaattaaacgttacttaattgatgtcctagaagaagaactcgcaccgattcgtcgacgtcgtgaagagctggctaaaaatccagaagcgattatggaaatgttgcataaaggaagtcttgctgctgaaaaagtggcagcacaaaccttaacagaagtcaaaaaagcaatgggaattcaatatttctaagcaataaaagaactggaacgagtcaaaagaagaatgacttgttccagttctttttaagtggtttgaaattgactattatataagctggcgtaaagagtcggagcttgtaatagttcctgatgcgttcctttttcaataatatcgccatttttcatcactaaaattaaatcagcattttcaattgtggataatcgatgagcgataacgaagcttgttcgattttctgtgacagtttccatcgctttttgaatatgggcttctgttcgtgtgtccacactcgaagttgcttcatcgagaataacaacgggcggatttgctaaaatgattcgggcgatggttaataactgttgttgcccttgtgataatgcaccattttcgctagaaataattgtgtcatatccttgaggaagggtccgaataaaatgatcacattgagcaattttagctgcttcaattatttcttcacgagaagcatctttttttccataggcaatattatctgctacggttccttcaaatagccaagtgttttgtaaaaccatgccaaataaatttcttagattttgtcgagaaagtttcgtaatatcaatcccatcaaaagtaatggcaccttgatttatttcatagaaacgcattaataagttgactaatgttgttttaccagcgccggtgggtcccacaatggccactgtttttttcggttgaacagaaaaatcaacattcttcattaaaattttttctggtgtgtagccaaattgaacatttttaaattcaatggctcctttaggagaagaaatagtttctaaatgagttgcttctggctgttcatcagcttcatctaagataacaaaaatccgatcaatggaagccatcgctgcttgaattgagttaatgacataagaagcggtagaaatcggctcagaaatttggttgatatattgcaaatacgcttgcaagaaaccaatcgtaataccaccagataaaacgagcattgcgcctaagatagcactaataataaaagccaactgattaataaaacgaatagctggataaatcgcaaaatttagaaactgtgcttttttaaaggcacgataatgttgttgattaacagcatcaattgttttttcagcattttgctgttgattaaaggtttttgtgaccaaatttcctgctaaatattcttccatcttattatttaattgacctaattcagcttgactttgatcagcaaacaccttgtttttattcgcgatttttgtcgtcatgaaagtactgccgccaattaggagcaacactaaaatggttaattttgcatcaatatagaacaacatgattcctgcaaaaaggatagtcacgacggaagtgaaaaattggttgatgcctgttaaaagaacttgtgacaattggtttaagccagttgttgaacgactaatgatatcgcccacttggtgattgtcaaagaaggccattggtaaagttttaaacttttttgtcacttcttttctaattcttaaagtaacccgttcgcttaaagaagccattgctcgttcctgaataaaagaagtgatactactaatgattgaaaagagaattaaaagtaagacgggacctaagagcgcttcttcaactaaaggaagtgtcatacctttgagcccgacacgcttgatagcttctaagaggttatcaatcccgattgccataatataggtcatggcaacaattaataagtttccaattaaactgcagatcattagaccataaaagattggatgctcaggtttaatcattttccagaaacgtttaaagctttgaagattcattgtttttttcattgtatggcttgaaaagaaaactttctttcaagcagtcacatcctttctttaattacttgggtaagataccttgcgatttagcaaagtcttggtaatagctattagtggtaagtaaatcagcgtgggtgccttgaccaacaatccttccttcatctaggacgataatgttgtcagcgttcatgattgtacttaaccgttgagcaacaatgagtaaagttttgtccgacatttgtgcatgtaaagcggcacgtagagcggcatcagttttgtaatctaatgcggaaaagctatcatcgaaaatataaacgtctgccggtttgattaaggctcgtgcaatacacattctttgtttttgaccaccagaatagttggacccgccttgtgctacgaaactttcaatcccttgtggtaaggaatcgataaattcagaagattgtgaaatttctagtgccgttcttatttcttctgtagttgctttggcatttcccattaataagtttgataagattgtcccactgaaaagaaaggctttttgtggcacataactgatgacttggcgaatcgtttgctgagataatgagcggatatctgtgccagaatagctaatcgtgccggctgtgacctcatttattcgtaaaagtaacttaactaaagtacttttaccagcgccagttgcaccaacaatcgccgttgtttttcctttaggaatgacaaaactaacattttctaaaacaggatcagctgtttctgtgtattgaaacgtgacgtgatcgaagcaaatcaaggctttctcaggatgataagcaatggttgcctcagtatgaggatcgctaatttcaatttcttctgacaaaacttcttgcaagcgattcaaggaagcaacggaccgtggaatgacaactaataccatagccgcgatcattaagtaggccaaagttagaagcgtatattcaatcacagctgtaacggtgccaatttgtagggtgcctactgcaactaaattaccgccaaaccacaaaatagaggcgtacacaacgcccattaataaaaaggcaacgggagtaatccagcaaagatttgattcactttactcatgcgttcagcataatttttaaatgtttgattggttcgctgctcttcaaaatcttgattattgaacgcacgaatcatattaattccagtaaagaactctcgtaaagtcgtagtaattcgatccatttttggttgaatttttaaagataaaggggtaccttttttcattaaaaaataaacaacgactaagtaaaatacgatggaagccaatgttacccaagcgagtgaaactgaataagaaaatgtcatcactaaggcaaataaactaataataggcgctggaaagattaattggcaaaacagcacaatcattgtttgaacattatctacatcgt

SEQ ID NO: 13 - DNA, 1751 bp; double-stranded, linear
ttgtaattttattgggttaacgttattttttggtatcgggatcttagttgcgaatggcgccaaaattgtagcgaataaagggaaaaagagtaaggggaccattctattaatggtgatggaattgctcttgttaggtatctttttatttgtgactttgccaagtaaaaatctttcaaccgtgttatggattaatctgattggcgcagtgattgctagtggggtgttattaagtacacgcttagctagtaaagtcgaagttcctggtatccaaaagggccgcaaagaagtagggaagaataccaacaaaacggctaacaaagactggtctggcaagattttgggtgttgccgttttggcaatgattttgttgactattgtcagtagtattaccagaatctcttctattgatgaaatttatcaaacgattcctttaaaaacggaagaaaaagctgaagttttaacttcggcgaaagaaacacccattgcgattgcaccacaaacggcgaaacgaaaaatgttacagaaattttctgtcattcccaattccaatatgtttactttggatggtataacggcacaagttgtcaatggcgagtatgtttatgtagcmacagtcgaatttaatggctyctttaaatggctaaaactgggggaagtacctggctatttcatcattagtgcgacagatatcaacgcacagccagaatttgtagaaaaaccaattgtttatactccttcagcttactttggcaaagatgccgcacgaaaaatttactccgcttatccaggttatgcagcaacgggcacaatcaatttagagctggacgaccaagggaatccttactatattcaaacgctttacaaagagtatggggtttctggtcgcatgcactataatgaatttaaaacggcagtattgaatgctacaacaggagaagttaacgtttatgacagtcaaaaagccccaagtttcgttgatgcgccgattactagctcagcggcgaatagcttaaatgaattctttggtcgttacagtcaaggctggtggaaccagacaatgtttggtgccaaaaaagatgtcaaaattccaactgaaaatggtatttatgcatcaggacaaattacgccgatgatgaacaaggaagggaaccagttgctttattttacggactttacaagtagtgaaaaagaccaagattccgctttaggttattccttaatcaatgcccgaacaggccaagttacgtattatcgtgatactaaagtcggcattatggatagtgatggcgccatttctatcgcttcaaaaatttatccagaaaagaaatggaaagctagtatgccagtcctttataacattgatggcgtgccaacgtggattgtttcgttaatggacagtaaagggattttcaaaaaatatgtctatataaacgccgtagataatgatattgtaattgatgcagacacggcacaaggcgcattagacgcttatcgaattgagttagtaacaaaaggaagcaacaatgaaaatacagacaaagccaacttgaaaacgatgcaaggtaaagtagctcgtgtctcagtagtagctggggaagcgcaaacggtagtttcatttttactagaagatgaaaaaaccatttttagcgtaacgactaataacagtccctggcgctattcttaaaagagggcgaccaagtgacatttaaagccgtagtgactgaaaatgctaaagcagcgaatgttgaaga

SEQ ID NO: 14 - DNA, 3928 bp; double-stranded, linear
cgtttattttatcaaaccaaaatggatttgtaaaacatttcacatgttatttaataaacgactattactagaaaaaagacaagccaagtttcctttatttaggaaacttggcttgtctttttattctttttacttcgttattttttgatagtttgcgaataattgattcgcatctccttctccatcaattttcttgagatggccgttatctattttaaacatagatggcacatgtaaaactttattttctcggataaatgttgaccattccttcatggtctctttgttggttaattctacatagtaaacctgtttaggtgcttgtaatagtttctcgaaatcctgacaatctgaacagtttttcttttttaaaacaacataaaatgtttcgccagagtgttttttttcttgatactcattgaaacttaattcctttttatgcggaataaatgtaaaacctaccaacaaactaagtaacaaaattaacagactgaacgaaatttttttattcatgttttttcttcctttttagtttgtctaattttttctttttttattttttgttatgccaaagctaatagccactataaggacaattaaacctgcgatcatgtaaagtggatttactgttgtattagtcattggtaaatgaattcctttacttgctgattttccaaaattgactgggttcgttggtgcttgatgatttgtaggcgtcaacggttttttcggttttagcggttgtttaggttcaggtttttttgggtcttctggcgttggtgcaggcggtgttacggttggcttgttggaatgcaacacgtcaccttcgttgccaaagtttaagtcggcttggttgggaatcccgccttgttcaatataaggcgctaattcttcatccgttgcgtcagttttaattttagtggtaatagtcattgtgtatgtatgaccagctaagtaagagtagctgtcatcttttttgttcatagtaaaagttactttgttattttcttgtgttactatgccattatctgtaacatctttgccattttcmtcagwaactttcacgtctgtgatgtctaacactttattaatgtcatccaccatgctggcttgggtccatgtgcttgtttcgttaccgaaagctgttttgacgttccatttaaattcttggtcacggttggttaaatctaaatgttcttggccttcgatatcttttgtaatcgttggatcttctggcgttggtgcaggtggtgttacggttggtttgttggaatgcaacacgtcaccttcgttgccaaagttcaagtcggcttggttgggaatgccaccttgttcaatataaggtgctaattcttcgtccgttgcgctagctttgattttagtagtaatggtcattgtgtacgtatgaccacttaaatagtcatagctgtckgcttgkttgttcatttcaaaagttactttgttattttcttgtgttactttgccgttagctgtaacatctttaccattttcatctgtgacttttacatcagtgatgtctaacactttattaatgtcatctaccatgctggcttgggtccaagtgcttgtttcgttaccgaaagctgttttgacgttccatttaaattcttgatcgcggttggttaaatctaaatgttcttgtccttctacgtctttagcaatatttggatcaactggcggtggtgttacggttggtttgttggaatgtaacacgtcaccttcattgccaaagtttaagtcggcttggttgggaatcccgccttgttcaatgtaaggcgctaattcttcgtccgttgcgtcagttttaattttagtggtgatagtcattgtatacgtatgaccacttaaatagtcatagctgtctgcttgtttgttcatttcaaaagttactttgttattttcttgtgttactgtgccgttagctgtaacatctttaccattttcgtcggtgactttcacatcaatgatatctagcactttattaatgtcatccaccatgctggcttgggtccaagtactggtttcgttgccaaaggctgttttgacatgccaatcgaaactatcttcacgattggttaaatctaagtgttcttgattttcgatatcttttgtaatcgttggatcttctggcgtcacgtcacacgcatgcgcattgtcatttttaggaatcgtcgcttctggaaattccttagcaattgttccttgattcattgtcccactacttacaagggttgctgcatcaatcgctgtattttctttgacttcgtagtgaatcgtgatgtttcctacgtaaccttctgtactagttgctgaaatggtttgtccgttaatttgaacaggcacatcatttccagcatcgtccgtagcggtcgcagattgaatatcaaattgattggcaatcgttaatgaagctgttgctggtgtcgattgcgccagacgatctttgacaatttgttttaattgggttgtaaaatcatcaatagattggcttgtaataaaatcttctggtgtgctagacccttgttgcaactcttgttttacaaaaggacccacttctgttttatatttatcaaagtatgaattcactgaacttaaagattcaacactttcccaatacgcattaatcatttcatagccttggttagtaatttcttggtttaacgctaaaacttctgctgctgcaccttggtagtcattactatattccactgagacttgaagaggatgtcttggatctggatattcattgattgaatcattggtattggtcttatgcaagtaaccatctaaacgtgtattagcgaccccatctgtcactaataggaaatacgtttttcgattcgttaaatctccgtgtgtttgattgtacgtatctaaagcgagtttcaatcctggggcggttggcgtaccaccatacgtccgaacgtctccaaaaccagagacaaattggcttttatcataagtcaattgcgtattgacgcgcacattcatatcataatcagctgaattaatttttgtctttccatcaggaaacataaattgttttccgccgcgatatgaagccagcatcacgcggtcttgatcagataagccttgaaccacttcatcaatcgcttgtcttacatgtggaaaattatctgaaaaactaccactagcatcttcaacaactactaaatcgactggttccgtttcacccgcttgaactgggaaagtagcttgtccttccaatatccgtttacaatcagccagactgtcgtctttcactttcaccgtattggtcattccttctgtatctcctgctttaaccgcttcttcagctaaagccaatgtgggactgaaatttcccacaactgttccagcgacaatcaccattgtcgataataatttcgttgctttcttaaacattttaatcctccctattttctttcgctagtgtttgggacacttgcttctctttacttcaactacagctccttaaatctttcatcaagtcgatgtgtctccttgtttttgtgacacatctcttactcaatttctgattctatcacctttaaaggctaaaacttggcagtattcggctcttgaaaacgtaaaatttgtcttttaaaaattaatgaaaagactatccactgacaaagttggttttcacttactttttgctacttgattccttttaagactctttttttacacaaaaaaagtaaaagaacctttacagtccttttacttaattgttagatgctattcataattttcttagttttgttctataagctgaatagtttagcctgtttatttcaacaatatttgacgttagtcagccgtttcgttatagttaaagaaaaggctttttggtaggagtgaatacgatgaatgagtggccccatcagttaatgacgcttttaac

SEQ ID NO: 15 - DNA, 5259 bp; double-stranded, linear
cgttaggtacattgctggttaatggaacaagtgaacagttatatgaaacaaacgamaccattcacttggcttttccagctgagaaattagttattttagaaaaataaaaaccattttggaggaagatttaaaaatgaaaaaacgcgtaattttagggacattagtcgctgcaacgttattaatgactgcttgtggaaacagcgaagcaactacgaaaagcgagagcaaaggtggaagtaatgctttagtcgtttcaactttcggattaagtgaagatattgtcaaaaaagacattatcgctccatttgaaaaagagaatgaagcgaaagttaccttagaagtaggcaatagcgcagaccgctttacgaaattaaaaaataatcccaatgcgggaattgatgtcattgaattagcacaagcaaatgcagcacaaggtggaaaagatgggttatttgaaaaaattacagaaaaagaagtacctaatttaagtcagttaacgccgggagcaaaagaggtttttgaaagtggtgctggcgtaccaatcgctgtaaacagtatcgggattgtttacaacaaagaaaaattaggcaaagaaattaaaaactgggatgacttatggtcagctgatttgaaaggtaaaatttctgttccagacgttgccacgacggcaggtcctttaatgttatacgttgctagtgaacatgctggtcaagatattacaaaagataacgggaaggccgcttttgaagcgatgaaagaattaaaaccaaacgttgttaaaacgtattcaaaatcgtcagacttagcyaatatgttccaatctggtgaaattgaagcagctgtggttgctgattttgcggttgatattattcaaggcgcacagaaaacgtgacgtatatcgttccagaaagcggcacgtatgccaactataatacagtcaatattcctaaaaaagcacaaaacaaagaaaccgcctttaaatttgttaacgcacggattagtgaagaatcacaaaaggccaaagcgatttcgttaaatgaaggacctacaaatcaacaagtaacgttaagcgaaaaagaagcgaaaaataaaacatatggtgccattgccgaacgtgccaaaacagtcgattttaattttattaatagtcaactagcggattggattgatcaatggaatcggacgatgaatcaatagttttagaaaagagggacaaaatgaacgtcgatgtattactaaaaaatgtgtggctgtatcaaacagtcactcaaacattcgttcaacgaaatgttgcgattaaaaatgataaattttattacatttatgaagaagagaacgtcaatttgcagccccaaaaaacaattaatgccgagaatcaatggatgattcccggcttaattgatgcacacatgcatattgaaagttccatgacgacacctactattttttccaaagcagtagtgcgttacggtgtgacaacggtgattgccgatgcccatgaaatggctaacgtatttggcttagaaggcttaaaagcttttatggccgctgaaacagaactagatatctttcacgcaattccttcctcggttccttcgaccactcccgaattagaaacaactggtgggattatcggcttagcagaagtagcagaattactcaaagagccaaaagtgatttgtttaggggaagccatgaattttaaagggatttcctatgagccagattctttaattcgtcaaattatcgatttgtgtcaaaaacaacgaccaaccatgcctttagaaggccactgtcctaaaatcgaagatcaagagttagcagattttctatatagtggtatcacttcagatcatacccatcaatttcctaaaacgttaaaagaaaaaattgaagcgggcgtctttattcaatttcaaaataaatcaatcactcctgaaaatattcaggtgatagtagacaatgacttctacaattatgcaagtattatcacggatgacgtgatggctgatgatttgctaaaaggtcatctaaatgaaaatgtcaaaaaagctgttcatgcagggttgcctatcgaaaaagccatttatatggcaacttatacgccagccaaacgaatgggtctccatgatcgcggcgaaattgcacctggtaaaaaagctgactttttgttattaaatgacttagaaagttttgatattaatacggtttataaatctggaaaggtcgtttttgaaaaaggcgagcccttccattatccagaaaaaatcgaagagtttccagccacttatcaacaaaccatccaatgtaaaaagttaacagaagaagatttacttttaaaggtggctacaacaaaagaaacagttcgttgtaatgtgattcaaaaacaagaaattggcacatttacagagcgaattacaaaagaaattcctgttgaaaatggattgttgcaatggcaaaaagccaactgcgccttattaattgtgatggaacgttacggaaaaaatggtaatatttctttttctttaatggatcaacctctttccgagaaaggagccattgcgacaacctgggcccatgatcatcataatttaatggtgatgggtaatacgattgaggatattctgttagcgcagaatgaattattagcgatgcaaggcggctatttggttgcttcggatcagcaagtgatggcaacttgtcctttaccaattggtgggattttatcgcaagcaccgattgaacaattaggcgcttctttacaaaaagtccgacaagctatgcaagcgttaggctatcaaaatatgaatgaaatcatgtccttttctacactatcattacctgtctcgccagccattaaagtgacagattttgggatgatggatacgaagtcacaacgtttctatccattagtttttccagaggatggagttcttttgcatgaaaacactcattaaaaatgtgcatatactaacaatggatgagcaattttcagaaatcaaagccggctatttagtgattgaagaagacacaattgtggaattagcaccaatgaccacacttgatgaaaagcgaatggctgcaaatcaagtaatcgatggtcaaaatggaattttaatgcctgggatgattaacacccatacccatgtaggcatgattccgtttcgttcgttaggagacgatgtgccagatcgactccggcgttttctttttccattagaacaattcatgacaaaagaattagtaggatgcagtagtgattatgcaattgccgaaatgttactgagtggtattacgagcttttgtgatatgtattattttgaagatgaaattgctaaaagttgtgaaaaaatgagtgttcgtgctttgctcggagagacgatcattgatatgcccacttgtgatagtccggagccttcaggcggtcttttttacgcggaaacctttattcgcaagtggcaaggccatccgttgattacgcctatgcttgcgccacatgcaccgaataccaattcaccagaagtgttggcgaaaattattgaacttagtcggcaataccaagttcctgtgaccatgcacgttgctgaaatgacttatgaaatggctgagtttgaaaaagcctatcaaaaaacaccaattgctttcttagaagaactgggttatttgagcgagccgtttattttagcgcattgtattttggcaacagatgaagatcttgcgagtttagctgctactaatggaaaagcgcgtgtcgctcattgtatcggtgcgaatactaaatcagccaaaggcgtagcgccgattaagcaaatgcttgatcaagggattattgtcggtttaggcacggatggacctagtagtgggaatacattagatttattcacccaaatgcgcatggttgcgaattttcataagacagcacaccaagatcgctccttgtttcctgctaaagaaattgtttatctggcaacgatggggggcgctaaaacgttaggcttggcggagcaagtcggctcattggaagtggacaaaaaagcggatataacattaattgaaacgcaatcagttaatatgtttccgatttttgatgcctattcagcgttggtttattcagcaaatgctagcaatgttgaagccgtttgggtgaacggtcaacagttagttgccaataaagaattacaacaagctaatctcaaagaaatcaaggaaaaattatatcaggccatgaatacgtttgtgaaagaagctaaaaaaagagctgctctctaaacagaacaagtaggacgtatcggattgattaaataacgctggattgacgtttagtgattcaggttctaatagagcgcagacaaacttttaatgaaagagttgtctgtgttcttttttgttataaacatttttctttttctatatatatttttaaggtaagttgtattatagtaagtttgagaagatgagaatgagaggaaaagcaatgaatatacaacggtttatagaaaaacgcaaagcacgtggtttgtcgcaaagtgaattagctaaagggatttgtacgcaagttacggttagtcgctttgaaaagaatggtcaagtcccaactttaaaaatattgatccaactatgtaatcgtttagagctacctttgggggaactcttcccgcgcgtagggattaaacaacctgaaattcttgaaaaaatggaagaagcagaattcttcttgattaccagcgaacatgaccaattgcaaacaattttaaaaaatattccttttgatgaaatcaaagattcccaactgttattagaatattattatttacaaggctttgtcatgatttttcaaaatgcttcgttgatggattgcttatttacctttgaaaaacttctgtttgaagagcaaaaatacacgagcgatatttaccgtttgttagcttttactggaattggcatggcctatgccaaagaaggcgaaattgagaaagccgaattttatttcaataaggtcttcaaggaaatttatctctatactattcaatcaatggaagatacttggcgagtattaaatgttgtctttcactgtggtgttttttatgcagaaaaaggcgatttagaaacaagtgatgctttgttagagtatgcgatttccatctgttctgataatcacgtcacgtattacttggcaagagcagctttccaacttgcgaaaaatgccttagctgaagaaaagccgcaagagcaaattttagaactactacaagatgcccg

SEQ ID NO: 16 - DNA, 7684 bp; double-stranded, linear
aggccgtntgaagtggaccctngaggaattwgttcaaaargcmaaggntttaattggagaaggccamcgtggaacntgcgcaacmattcattgragaacataaagatgaattaggcgaacactatcataaaattacagcgatgttagctgatacaacgaccgatggtttgtttgataaaattaaaggattgtttcaatagttgaaaaaaatctgagataaaagtgtttagctccaaaaaccaagtaggtacgatgatttcatttgttcatgcttcacggtgaaacattgcaactctcgccgtttaacagtttttgagcgtggagcaaaaatccaaagtgatttttgtcccacgctcttctttttttatttaacttttaaccattgttttggcaacacatacgcaattggattaaaaagataatccgctccccgtttcaccacaggcatattcgtaatagctaaaatgaagagggctaagaagaaaagtgccaggattcggaaagtaaaccattctttaaagagtgtgtctaattgcaaaccactttccaacagaataattaagggcatatgcaagagataagggtagagggtatcttttccgagggcgcttaaaggtaactttcgtttcggcaataatgcaaaccaagaaagagacaccaatgctgcagcaacgtaaaagaacagctgaatgaaactactgtattcaaaggccggactaattycagcgtaggaagcccaaccagttaagaagccccaaaatttcgttgccaatgaccattgactatttacaaataaaaaggagcttaaaattacgcctatcgctgcccatttgactttgcgatgatctaaaaaggtttgtagcttttgaatatccattaagtagccacaataaaagaaagggaagaagcccagagtccgtcctaaagacaagaaaccttccacaggtaaatagcctgaggcgcagccgataacaatgatgattggcaacatgattttcggctgaacgcgctgaagaaagatggtaattaagtagaaacttgctaaggaaagtaagtaccaaggaacgcctgtttcgttcagtaaatcaaaattcattttatttgcaaaggcgaaattagcaagcgtaatcaacaacttcgctaagagataaagccaaacaaaggaaagtaagcgtagatattttcgttgtttaatggcatgtttactaaagagtccagagacaaaaataaaggctggcatatggaatgaatagatccaaaagttgatcgtttccatgagtcgtgaaggagaagcttcacgatctaaaatatgcccaaaaatcactaagaaaattaaaaaaagtttcacgttgtcccatttataaattcgcttgtcgttttccataacgatcactccttttagtagaaaacagttcacttttgtttaaggcagaagaggacaatttttccattcattgagtagataattgtagatacgaaccggcagccgttaaatgagcccccacatacttgcgcttaaaacaaaaaattaggcaggatgttagtcttaaattatactgaaagagtgacgatcctccaaagattttgtttattaagaagtgaaagatgcggtgaaaataaatgataaaatttcaaaatgtttcaaaagtatatcaagaaaatgccgttttgtccgatgtgaatttaacaatccaacaaggcgaattttttgtattagtagggccgagtggtagtggaaaaacgacgactttgaaaatgattaatcggctcattgagccaacgacaggtgaagtggctctcaatgaacaagcggtaaccaattatcctttacgtgaattacgactaaaaattggctatgttcttcagcaaattgccttatttcctaacttaaccgtggcggaaaatattgagttgattcctgaaatgaaaaaatggcccaaagagcaacgcagagagcgaaccattgaactattgaaaaaagttcagctggatcctgaggaatatctgcatcgtaagccagcagcgctttcaggaggcgagcaacaacgtatcgggattttacgcgccattgcagccgaaccagaagtgattttaatggatgaaccttttagcgcgctagatccgatttcaagacatcatcttcaacgtttggtgaaagaacttcatcaggaattagcgagtaccattgtttttgtgacccatgatatgaatgaagctttactgttaggagagcgcatctgtattatggacactggcaaaattattcaagtcgatacgccagaagccattcaaaaacatccgaaaaataattttgtcggtcaatttttcaaacaatcttcaccagaactagcgaactattgtggcgctgacttgactgcatttttagaagccgcagatgagacgattgagccagtgccgactgttttcatggaaaccaatttaaaagagattgtccaactcattaatgcgcaagagaaagcaaatttagtagaaaaacaacaagttttagggtgtatcacctcaaaaacgattactcgttttatggaacagctgttggaaagcgagggacagtagatgcaagcactgattgaaacttttttcgctcgaaaagaagaatatctgcaagcgttaatcgagcatatgcaattgtcctttatctcgttattattcgctgcgttgattgcaattcctttagccatttatttaacaagtcatcgtaagttagcggaaagtctgttacaagtgactgggattttccaaaccatcccttctttagccttgctaggcttactgattccgttaattggtattggtcgaccaccggcaattgttgcgctagtgatttatgccttattcccaattttacaaaacacctatactggtttgacggaaattgatccttcgttagaagaagctgcagaagcatttgggatgagtaaaaaagaaaaactgtttaagtttgagttgcaaatggcgttaccatttattatttctgggattcgaacggctaccgttttaattattggtacggccacgttggcggcgttaattggagcaggtggtttagggaccttcattttattaggaattgatcgaaataatttatcgttgatttttattggagccctttcatcggctgcactagcagtcttatttaattatggaattcattggttggaaaaagcgaatgggcggcgactaatcattggcggtactattttaggccttttgttaggtggttcatttttctggaatcaacaaacttcttcaaaggaaaagcagctgacaattgctggcaaattaggagcggaaccagatattattattaatatgtataaagccttaattgaagaaaatagcgacattcaggtgacgttaaagccaaactttggcaagactacttttttatataatgccttgaaatcagatgaaatcgatctttatccggaatttacaggaacagtgatcgaaacctttttaaaaaatcctcctcagctagacaatcaacctcaagtagtctatgaagcggcacgcgctggcttgaaaaaacaagaaaaccttactttgttgaaaccgatgcgctatgaaaatacgtatgccgtcgcagttaagcgctcatttgcaaaagcgcatcaattaaaaacgattagtgatttacagaaaattagcaatcagttgaaagcaggttttacgttagaatttattgatcggcaagatggttataagggattacaagaaaaatatcatttaaatctgaatgtccaatcgatggaaccggcgttacgctatcaggcgattaataatggtgaggtaaatgtgattgatgcctattcaacggatagtgaattgagacaatacgatttagtaacgttagaagatgatcaagcgctatttccgccttatcaaggagcaccacttattaaaacagcaacgttggaaaaatatccagaattagcagaaatattgaataaattggcaggaaaaattagcgaagaagaaatgagtgaaatgaattatcaagtcaatgtggaagggcaagatcctagcatagtggcgaaagactatttaaaagaaaagaatcttcttaaataagtattttttactgaaaaagactggtatataaacatttatccagtctttttcagataaataaagagtttaatgtgaaaagtacctgtatttttactcatttttggatataataaaagaaatgaatggagaggagtggtctatatgaaaaaagcagaacgtcaacgtttgattaaacaattaattatgcaacaagaaattgaaacacaagatgaattaatcactcgtttggaagaaattggcgtccgagccactcaagcgactgtttcaagagatatccgtgaaatgagtattgttaaaacacatggtgcagatggtcgtgtcaaatatgcaattttttctcaagcacaaggcacaagcagtgaagagaaattacgagaatcagtaaaagattcagttgttcgaatggagcgagtacaatttattgtcatcttgcatacagagatgggaaatgccgatgtggtgagtaactttttagatgaagtagcttatccagaagtggctggtacagtggctggtgcggatacaattattgtgattacacgttcagaagaggatgcggaacactttatcgaacgcatcgaaaatatgattttttaaaattgaaagcatcaatagaagggagtttttttcttggcagaattgaaagcgctacaaaatggttcggatattcggggaattgctttggatacggaagagcaaactgcaacattaaccgcaacagcagtagccgagattgcggtgggcgtggttcgttggttacaggataaaaaacagctgccacgaaaggcacaacagcgcctgacaattgcaatcggacatgatagtcgtctaacggcggagcattaagcaagcattagtagatacgtttctttcattaggtattcaggtgattgacgttggtttagctacgacgcctgctatgtttatggctactcaatttccaacgcttcaatgtgatgcagcgattatgattacagctagccatttgccttattactttaatggcttgaagttcttcacagcagaaggtggagcagagaaagaagatattcggtatattttatctcatactgatccgctgacggccaatgaaaatggcacactgatgaagcaagagttactgccaatttatgcggagcatttggtggaaaaaatccgccaaggaattcattcgccagaagagaaacctttacagggctttcgaattatcgttgatgcgggtaatggggctgggggcttctttgcggagcaggttcttcaagttttgggcgctgatacgacgggatcacagtttttagaaccagatgggcattttcctaatcatgtacctaatccagataattctgaagcaatgaaaagtattcaaacggctgttttagctaatcaagcagatttgggcattatctttgatacagatgtagatcgttcggccgtggtggaccaatcaggtgaggtactaaaccgaaataatttaattgctgttttagcggcaattgttttaaaagaagcgcctggtagttatattgtgacaaattcgccaacctcaagtcatttaaaaacatttattgaagaaaaaggcggccaacagattcgttatatttctggttaccgaaatgtcattaataaaatgattgaattgaatcatgggggctttcagacaccgttagccattgaaaccagtggtcatgcagcgtttcaagaaaactacaatctggatgatggtgcatatgtcgtggcgaaaattttaatgttgttaccagaattgaaacaaaacaatcaaacgttaggagatctgattgctacattgaagcaaccggcagaaaccaacgaatttcgcttcaaaattactgcggaggatgttacttgttatgggcaacaagtcttgcgagactttgaattgtttgtagaaaatcaagcagactttgctgtggaccgtgaaaaccaagaaggtgttcggggaaacgtgtctggtcaatatggcagtggttggtttttgtacgcttaagtctgcatgaaccgttgcttgttcttcaggtagagaatgaccaaagcgataaaaatgcgtgtgtcatcgaaaaaattgccacttttttacaaaaatacgaggaaatagatagtcagcaaatagaaaaataatctaggaaattaaaggtgttcttatggaaaatgttttaaaaggaaaacacgttggcttttctcattttagagaagaatatatcgaacatattgcaaaacagcaatgggataatgaattgcttcggcatttgagctgggatgctttacatccgtgggggcttgaagaatggaaagatttcacaattaataaaggagaagatgatcgatttctatttgctattttagaaaatacgacagaggaatttattggttgggtttcgttgtctgatgtacagttgaaaaatagaggggccaatttagggattgctattttacaaaaagagcaacgaggtcaaggatgtggctttgaggcggtgtctttaatttgtaaatttgctttttatgaattgggtttgcacaaaatcagattagctgtcaatagtaacaatcaaaaagcgattcatgtttatgaaaaagtaggcttcaaaaaagaaggaattgatagagaagcgttatttcaagatggccaatggctggatatctacaattacggaattttacaaaaagagtggctacaaatgattaaggctgagagttagctcaggaactgtttaacaccaagacactgagcaaacgcagatatgccgttctcagcagtgaatgtgcggtaaaataaaaaagcagaagaaatcggcggttaccgtccgatttcttctgcttttttttaccataggccaggtgttgcagtcacaacgatttgtttttttgtaaacggatggagtaaatgaagttgtgaagcatggagcattaaacgagctgcctgcgattttgggttgtataacggatcaccaataattggatgcccttcgctagctaaatggacccgaatttggtgcgtccgacctgtttctaaaacacaggtaactgcggtttgattattagaaagagcttggaccacttggacatgtgtaatcgctgaatcccctttttgaggatcaatccgtcgtttccggcgatcatgtcgatcacgaccgatcggctgattgattgtctgctctttttggctaaagtgaccagctacaatcgcttgatattggcggtaaatttgttttgtttctaataaacgacctaaaataggtaagacaaaaggatttttagcaaagacaatcgcaccactggtttctttatctaatcgatgaacgacataagggacctgatttttctcggctaaataggcagcaacatgatttaacaaggtgtctgtttcctgtggctgatttggatgggttttaatgccataaggtttatttacaatcattaaatgttcgtcttcatataaaaccttcacatgcgttgcttcccccaaatgaatagtgggacgtacataatcggtttcttcaaacgttaaggtgacacaatcgccagcttggactggaaaatgaaaagcagctgtttctccgttgattttgacattttt

SEQ ID NO: 17 - DNA, 32768 bp; double-stranded, linear
cggaacacctgncgcctataaaaaggttggccaacaaaccctgatggctggggcgattgataaaccgaacacttacacggtcaaawttgatgtagaaaccgagggttctttaaaaatcaaaaaagttgataaagaatcaggtgctattgtaccaggaacggttttccatttagactttggaaaaactttacctgcaaaagacgtgactactgacaaagaaggcattgctacattggatgggattcctcatggtacaaaggtaaccattaccgaaaaatcggtgccggcgccttatacgattgataccatacccatgactgctacgattaaagcaggcgaaaccatttttatgacttcaaaaaatacgcgggaaaaaggtcaaatcattctggataaaaccgggattgaaacaggaagtgatctttggaacgacaattactctttagctggaaacacgtttgctattcgcaaggacagtcctactggtgaaattgttcaagaaatgaccacggatgaaaaaggtcatgcagaaacaccaaaagagattgctaatgcattggaattgggaacttactacgtgaccgaaaccaaagcatctaatggcttcgtgaatacctttaaagcagtaaaagtcgaattgaagtatgccaatcaaaccgtggcccttgtgaccagcaatatcaaagggcaaaaccaagaaattactggggaaacaactctgataaaagaagacaaggatactggagataaaacacaaggcagggcagtctttgaggggactgaatataccttgtttactgctaaggatggaaaagcggttaaatggagtgaagcttttaaaccagaattggtaaagggaacgaaagcttctgatgaaacagtgactctggctttagatgaaaagaatcaagctgccgttaaacacttagccatcaacgagtactactggcaagaaaccaaagcacctgaaggatataccttggatgaaacgaagtatcctgtwtcyatcaaaaargtwgatgataacgaaaaaaatgccgtrattacycgagatgttacggcaaaagaacagattattcgttttgggtttgatttcttcaaatttgcyggatcrgcygmtggcactgccgaaactgggtttaatgacttaacctttaaagtgtcgccattrgaagggaccaatgagatcacaggtgctgaagatraagcaatcacagcttataatgagcaattaggctttgatggctacggaaagtttgaaaatcttccttatggggattatttacttgaagaagtagaagcgccagaaggatttcaaaaaattacgccattagaaatccgttctacttttaaggaaaacaaagaagactttgtgaagagtgagtatgtctttaccattaccgaacaaggccaaaagcaaccaattaaaacggtgaccgttccttacgaaaagctgacgaacaaagcattttctgttagtttgaaccgtttgatgctctatgatttgcctgaggaagaagatagtttgacttctcttgcaacttggaaggacggaaataaaaaattgaatacccttgattttaccgagctagttgataaattgagatataacttgcatgaaatcaaagaagactggtatgtcgtagctcaagccattgatgtggaagccacaaaagctgcccaagaaaaagacgaaaaagccaaaccagtggtaattgccgaaacaacgaccactttggcgaacaaagagaaaacaggtacttggaaaattcggcataaattaacgaccgaacaagttttggataaaactatcgtcttgtttaactatgtgtatgaaaacaaggaagcttttgaagcaggcgatgagccagtagcgaaggatgctagcttgaataatcaagcccaaactgttaattgtacggtggaacgtcatgtttccatccaaacaaaagcccacctagaagatggttctcagacctttactcatggtgatgtggtggatatgtttgatgatgtatcgattacccatgatgtgctggatggatcaaaagaggctttcgaaacaattctgtatgcactactaccggatggtacaaacaaagaaatttggaaatcaggcaagattgattatgaagtaaatgataaagaatttaccaaaactatgcttgcggaaaaagtagataccggaaagtttccagaaagtactaagtttacttttgcagaaatcaattatgataaagatgagaatatcaatgggaaacacaatgaggatctaaaagaaaaaaatcaaaccttaacgcccaaaaaagttccaaccacaccacgtacgccgaaacaaccggaaacaccaactgttccaagtggctatcaagaatctagtcccacagtgaagacattccctcaaactggggagaaaaattccaatgttttactgttcattggttttactttgatttttgcgacggcgggctattatttctggaatcgccgtaactaaggtgatgagatgatacaagtaaatcctaagaaccaacgtgcgcgaccgcctcctaacaaagtggtcgcgctatttttgtatccaaaactaacaatgaaaagaggaaaagaagatggaattgaaatttgttgtgccagatatggccgaaacgtttggaaagttaagttatgccggtgaaggagaaattttaacagaaggatatggacggaatactacggtgattggtcgcagttaccatctatactccagcaaacaacgggccgatgatattgaggtggtagtagctgcggaagccggtgaaaaggattttgatcaagaccaaccgctaaaagccgtgaatccccatttggttgccaaaggctatgagattgaaaatcgtgggtttactgattacgtgttgtatgttgatgatttagtgaaagaataggaggaaaagaagatgagattaacagaaggtattgtcgtagattcagtattaacatttggaaagttgcgtttttccgcattacgccgagaagtacggaagcaaaatgaggatggaacggttagtaatgaggtaaaagaacgaacatataatttgaaatcctctgcacaagggcgaatgattcaagttagtwtcccggctaatgtgcccttacgcgagtttgcttatgatgcagaggtagagttggtcaatccaatcgtggatacagtcgccaattatgtttttcgagaaggaactactgtcaattggtttattaaggcagacgatttagtcttgaaacgacaaccaaatcaaggaaattctacgaaccaaattgaaggaaagaaataggtgaagattatggaaattaatgttgaacatattttagattgtctcgatcaatatggaaaaggtgagttaactgaggaacaactcgttaaagcattaacctatgatgaaaaaatgtttctgattatgcatcaaggtttacttggagaaaatagcgacagtgaagacgactttgatgtacaagactggttagaagaagaagagtccttctttatggttgtcgaagtaaatgaaaacttatgtcggcaggcagaatccgtcttggaagaaatcggtgtggagatgccagatgccattgaaggctttttaaatcaattggttgaaaagaaacaattccccgtagtaataaatagctagcataactatatgaaaatgcccaatgaaatcctatcgggcgttttttgatcggaggtggaaaccatcaaaatgtacaaagaacatcgcatacgtgcaagagatcagcatttggtttatcactttattcttggctggctaattgctttgttaatcagttggatgggtgtcttttattttcaagagtttagacaatttgatatttctagggtatcactttctactattgaaactgtttggtccatgaaggagttaatctgcttacttggaagtctcggtttttcaggagctatgctgttgctttatattcacttttttcctgatcattggcgaagcttgtggcatcggcaaaaactagctcggatgattctagaaaaccattggtatgaagtgaaacaaactcaaagtgagggctttttcaaagatttaaatagtagtcgaaccagagagactatcagttacttccccaaaatctattatcgaatgaaggagggtttactttctattcgcgttcaaatttcactagggaaatatcaggagcagctattgaagttggaaaagaagctagaaagtggattgtattgtgagttagtagaaaaggaactcaaagactcctatgtggagtatactttactgtatgatatgatcgccaatcgaattgggatagacgaagtagtggcagaaaatgggactctgcgattgatgaaaaatcaagtatgggcttatgattctttaccccatatgttaatcgctggtggcacaggtggggggaagacctatttcctcctcaccattatcgaagcactattgaagtcagatgcagaattgtttatcctcgatcccaaaaatgcagatttagctgatttaggtacggtgatgcctcacgtatattctcaaaaggaagaaatttctgcttgtgtggaagatttttatgaacgcatgatagctcgtagtaaggcaatgaaagaaatgcccaactacaaaccaggagaaaattatgcctatcttggacttccaccaaactttttaatctttgatgaatacgtggcttatatgggtgcgaatcgttttcctacaagcatcgaatagatgtgaaatggaagcctattgagattatcaatagtgacaactaatgttttgagagatggaatgaaagccttcaagttgagctgaaacatctccgctaatactcctacatgctctaatcaatgaagtagattggttttggtatgaagctaggtgaagtcgtctgaaatctgcctaagtgtttgagcataaggctgactatagggcgggcggctgaaaaagataactatggtaagaatgtctgaaaatgactgacgaatctgcgaatgtacgggtctaaaaggctgatcttgtcgaaagataggaacatacggacgtatggtgaaataccgacgagtaaggttccatgatatgaaaatcgggatagctaacgaagaagctataatttcacaggctcatagtagatacctaaggttatacatgatagctaaaaacattggaacgatgtaagcagaaaactatcaaataaatgactacttctagataggtgcatataagtaataacgaaattgctttgtttctgtgaaagtaagggcacagtaccgatgaagcgtctaacaaacgtggagggatagccctaagtctatttaataacaatgaatgttgaaacagatgaagttcaaggatctggtaagaacgtggggaaatccgttatggaggtgccacgcttgaacacaaaaatacgttactgggaatattacgatctacaagaaacattcgatcagctatttactcaaagtaaaaacgggaaaaagttttatcaattatacgagttaatcatttctgaaaataatattcttttagcataccgcactatcaaggcaaacaaggggtcttcgacaccaggaacggactccttcacaattgataactataaggaaatgaaccaagcagagtttatacatcttattctcagtcagttagaaaattacaaaccaaaatccataaagcgagtaatgatacctaaacccaacggcgagaaacgcccattaggaattccatgcatgattgatcgaattatccaacagatgttcaagcaggtactggagccaatatgtgaagcaaagttttatgaacatagttacgggttcagaccattgagaagtgcaaaacatgctctaggtcgcattatgtatctcataaacatcagtaagatgcactatgcagtagacattgatatcaagggtttctttgataatgtaaatcaccgtttactgataaaacaattatggaatataggaatttgtgacaaacgagtcttagctattctttcaaaatctctgaaatcacccattcagggagaaggtatttcgagcaaaggaacgatccaaggaggtatcatttctccactattatctaatgttgttctaaacgacttagaccattgggtctcaaagcagtggcatacctttgaaacaaagtatccctatacgaaaggttacaataaatttcgtgctttaagagatacaaatctaaagcaaggctatattgtcaggtacgcagatgattttaaaatcatgactaatgattatccgtccgcattaaaatggttccacgctgtcaagctctacctaaaagacaggcttaaattagatatctccaatgagaagtctaaaatcgtcaacttgcgtaaacgcaaatcggaatttttaggattcaccatttgcgtgaaacaaaaggggaaaaatgggtttgtaattcgcatatttctgacaaaaagaaaaatcaaattaaaaaagagattaaacaaagaattaaagatattcaaaagagccctacagcacaaaatgctctcctatttaatgctctagtgcttggtgttcataattatttcaggtatgccactcatattaacttagatttgaataggatgaactacgttctttcattcactacgtataaccgattatcaaattgtagtacaagatgttatcccaacaaagcttcccctacttacaaaaagttttactcgacaacgatgaaaacgtataaagtagccggagtctatttgtaccctctttgcgacgtatctacaaaaacaatttacggatttaatacggaagatacaccgtttaccccgtttggtcgtcaaaggttggagcacaaaagcttacagtctcttgtataccaagaattaagaaaattgatggaatcgaaaatactgaatagaatggttgagtatttagataatagaatatctcgttactcaatgaaatcaggcaagtgtgagattacaaaacagtttttgccagcaaaagccgttcactgtcatcactatttaccaaaaagtcttggtggagacgacaaatttgataacttgagaattattcataaggatatccatcttttgatccataccacaaataaaatgataatcgatcactacgtcaatgaactgaaactgctgccagagcaaatagcaaaaatcaacctttatcgaaaaatgtgtaatctgcaaaacattcaatagaaaataaatagatggaacgccgtatgaggtgaaaggctcacgtacggtgtggagcgggggaaaagatggagattatatcaaattcttacctatcgttataaatgttaacgacgaaagaaagtgcggtgattttaaataagctcaaacaaatcgtgatgttgggtcgtcagtctggtttctttctaattctggcttgtcaaagaccggatgcaaaatatttaggagacgggattcgcgatcaatttaacttccgagtggctttgggtcgtatgagtgaactcgggtattccatgatgtttggagaagttgataaaaatttctttatgaaacgcatcaaaggtcgaggctatgtggatactggagggagtgtgattagtgagttttatacgccacttgtgccaaaagggtatgatttcttagaatccatcaaacaagtagcacaatcaaaagaaaaatgacagatacagaaaaatttaatctactagttcatcgggttaaaagtatgataaactagctttgaaggtgtcagggaggtgcaataaaaatgacagaggatgattctttacaatatgccaaggagaacaagaaggaaattatttcttctgttattgatggaaaagaaaaagaagaggaaaaaactgccatttttatggctggaagtcctggggctggcaagactgaggctgcccaaactttaacggtattaaatagtaatctttgtgtgattgatgctgataagtttcgtgtattatttccaggttatgttgggaataattcagatgaatttcaacgaggatcatcactcttggtagatgcagctctcgatttagttcttaaaaaaggctatagttttattcttgatgctacttttgcgacctctaaggtaaaacaaaatattgaacgggcactgaaaaagaattacaatgtgcttgtctattatgtttatcaagatccatttattgcttgggattttaccaaaaaatgagaagtggttgaagggcgttttgtttctaaagagcgttttatcaatgcttttttccaatcacgaaaaaatttgatgcgtgtgaaagagcaaatttcaagatcaagtgacaatcaatatcttagtgaaggactttcaaaatacgatttctgattttctgatggatattgataatgttgagttgacattgccaatcagttatacaaaagaaatattggaggaagagctacatgactgagaaagaaaaagttgaggaaattatggaaaagtataaccgtaacttttccacattacaaaagaatgcttctgcgaaagagctgaagacagtctttaaatttgtagcagatgaatccaaccgaaaacaacgtgaattgattggtttggataaagaaaaataaatatgaaatgagaatagttgtagaagccaagagcaaaaatgttcttggtttttttctatgcaatgaaagtagatatggaaggaaaggaaatcacaatcagcaactcaactgataggcactgaccgcggaggatttgcgaagcagaaatcgtccgtggtcctgtgcctgttcatggacggcgctagcggccatgatgtctcaccccccgcatctaacaggggggtacaaaaacacaagaaataagcaagcaacgattaagaattgctggtgtagcaaggatattaagtaatttgcataggtgttaactcatttgaaaaagttaacaccttgaatttggaggtgagaacttggtacaacggaatttagattatcggttattaaaagatcgtcgcaatgaatatggtatttcgcaaaataaattagctaccgcttgtgggcttagtcgaccctatttaaatcagatagaaaacggtggcgtaactgcctctacaaaaaccatgagaaaaatttttaaccaactggaaagttttaatcccgatttacctttatcgttactgtttgactatgtaaggattcgtttccccacaacggatgcacggaaaatcattcaagagattctccacctgaaatttgattatatgctccacgaagattacgccttttactcctatcaagaacaatatgtcatgggcgatattgtggtgatgttgtctcatgaagaagataaaggagttcttttggaattaaagggtcgtggttgtcggcagtttgaaacttttttactcgcccaaaagcgtagctggtacgactttttcgaagattgtctaaaagccggtggcgtaatgaaacgcttagatttggcaatcaatgatctagtagggctattggatattcctgatttaacgaaaaaatgtcagaaggaagaatgtatttccttgtttcgtacctttaaaagttaccgttcgggggagctgttgaaagctgatgaaaaggatggtatggggaataccttatacattggcagtctcaaaagtgaagtttatttttgtttgtacgaaaaagattatgaacaatatatcaagctagggattccattagacaaaactgaaacgaaaaatcgctttgagattcgactaaaaaatgaccgtgcctatcatgcaattcaagatttgttaaagggtcgtagcattgaaagtaccacgttttccattatcaatcgttacttgcgatttgcggataaagtagaaggcaaaaggcgaactaactggccattaaatgaacaatgggggcgttttattggacggaatcggaaagagatacaactgacttctgagccgaaaccgtataccattgaacgaaccttaaattggctaggtagacaagtcgcccctacgtggaagatggccaaggagttggatcggttgaatcagacaacctatatccaggatatggtacagaatgcgcgcttatcagaccggcataaaaagattttggaacaacaaagtatggcaatcgaaaacttgattatatgaaaagaggaattgtggtaggaagtgtaaaagatatgttattggcatttggtggcagcatgcttagtgttaccgtgatgtgcttgatgcatgcaagtgtagcggcgaaccaagcaatggaaaagaaagtctagtggtaataagtcaagataatttttcaaaagatttttaaaggtagttaatttttgaagcgcactgaactaaacccgaccaaaattaaaaattttttcgggtacttccaaggattagcgtcaataacatactgttatttatctatcacgctccttggtggcatatagagttgatggttacgtagtagcgtatccaccagacgcgtaaattttcttgcggttagtacgatggctcgtttgtgtttatgcttgggtgtttcagcgtattttttcttataatacgcatggtactcaggctcgtatctccttacggagttggtggcttcaactagataataacggagataacgattgcctcgtttggccataggagtattttcatactcagagttacctgattggttctgtcgccaatataaaccggcatatttagccaatttgctttcatctgaaaagcgattgatagggccaatttcagcgagtatacccgcagcataaacaggaccgattcctggaatactggttaaacattgatattcaggtagcacaacgactaaatcgtcaatggctttgtctaagtctttaattaacttttcaagactacgaatttctttggctagaacacccaaaacaatatctacagagtcctgatggacttttcctaaccggtaggaactacgtatggctttagaaattgcctttgcaattccttcgggatttttaaaacgatacttccctagtttttgaattaggttcgcaaactcttctaatgacagttcggcaagttggtccattgtgtaatcttccgtcattagagttactaatgtggcacttaaaacggatccaccttctgcttttagttctttagaaagcgtgttgcatttataataaatgttttcgataaagtgttgctttgtacgaaccagctgtttaattagctgataacgcgttctagttaagtgttggagggcaaggtattcttcctctttaatgatggagttgacttgcctttggatgcgaaaatagtcagcgatataaaaagcatcaatttgatcgtttttgttttcttcaaaaatatcacgatactttttaattttatttggttgttcaactgaaaccataaggttcaattgatttaactcaagatcttctttaaaaaacatagctggatgaaagctatataaagatgtggcctccattccaatcactaagctctctatctcaaatttttgagaaaattcgagaatgtattctttgatctggcttgcgccaagttgactatttccataagatgcttcttttaaaacagagcaagttgaatcgtctgtcataaagcaagcatctaatttttcagaactaacgtctaaaccgacaaatagtttcatgtggaaggacctcctttcattgattattcggaaattgcttgggtactgtgggatatcccagaatcacgttgtctaacgacagcctcgcataatagagtttcattcattaaacctctaagccacccaatctctactaggattggtagaggtcaatggactcagctagtgtgttggaggttataccaacggttcgggtcacagactttctgtcgcagtaaaactgcagaaggtgatagcgtcttcccgtaagtcctttccaagacttattattcaggaatatcctacagtatccaagtagtaatcgttattttatttaaacatattaggaatagcccctaagggmgwttgaaggaatgaaagtttcttcaaaatatatattacgaggaaagtgacaagatgaatttcggacaaaatttgtatcaatggtttctaaccaatgcccaatccttagtcttactggcaattgtggtcattggtttgtttttaggatttaagcgggagttttctaaattgattggctcctggtgattgccttgattgcggtaggtctggtctttaatgcttctggtgtaaaagatgtcytactcaatttattcaatcgaatcgtcggtgcgtaaggaggagtcacgatggaacagatgcgtgtttatattgcgaacttaggtcgatataacgaaggcgaattagttggtgcttggtttacaccacctgttgattttgatgmgataaaagaacgaattggattaaataatgaatatgaggaatatgcgattcatgattatgaacttccttttgagattgatgagtatacaccaattgaagagattaatcggttgtgtggtttagcggaagagcttgaaggaacgccgattggtgaggttgcttcagagattcaacacgctttcttcaattcatttgaagaaatggtggagcatctggataatattgtttattatccagattgtaatgacatgagtgatttagcgtattacttgattgaggaagcaggcgctttaggtgaagttcctactcatttacaaaattatattgactatgaggcttatggtcgagatttagaaattgaagggaattatttggttacgagtcgtggggtctttgagctatgtgagtgagagtatattgaatactgcccttaaagatactacaatagaaaatatcgagtagtatttcaaaggagtggaagtggtgaatattgatgaggcaaaacagcttgcaaattatttttcagacggatctcctggatatatattggaattcaataatcttgaatgggacctatatactaagaaaatagttggatttggaattcaagaaagatttggtggctctaaaggaaattccttcaaagaatttcttgtctcagaggatattagtgatcacctaaagttcaaattaatatactcataaatgaaactatgaagcaaatgcttctattcgccaatttgaaaatccaagttcatataagtcacctaaaakgaatccacttgtgactcyawtgattgaagaggcatatcataagaaagatagtgcaagattgcttaatggtactaagttttcgaaagaagtgaatttagagtatattcaacaacttcctactcgtataagtaaggatattcaaaataaagatttcgattctgttttaacaaaatcaaacactatgattgatgaagtcttgaaatatatcattgagaacacaaaaggaaaaagcattgataataatactgtaaggtctaaagacttaagaaatcaagcctttgaaagactaaatataaaaattgacaaagatatggatamaagaataaaagctttagttggtgctctaaacactttgycagacaaaattctygagatgaggaatagtcaaggtgatgcccatgctcagggctccaggaggattgtaattaatgaagaagaagctatccttactgcgaactcagcaatgattttatgtgagtatctatttcgaaagtatgaaaagagaaaaaggttcagtgatgcaaaagagagttgatttttatcagctctcattttctatctttycaatttttgcgaatagcttcataagaatactagtttgttctataacaaattctacttctaggtcagtgaatgtttgactatgtttaacattttcattttgatagcttataagtcctttaataattaaacggaccaaattgattatttcttttggaatgcccttttttctcaataagggcaggagttctccttcgataggctggttttctaaagactttgagttttttaaaatatcctgcataaaaaactcaaaggccagcctgatactgtctaaagtataacggttatagatgctgttgtcgtaagactgtatggctttttcaaattcttcttttgctcttgaggaagcagtcaaccaagtgttagtttcattgatgatatttctatctattttatcattagaataaactgaaccataattttttagtaacagttttaaaatcttagcaacgtctttatttgctggattttgagcaagcacactttcacaaagctcttttataattttaaattgctgttcttctgtgaaagattgtaaattattttgaatcgcggtagccttagaagtaaagttcggaaagggagtcgaaataaagggaacagaagagttaaattctgctccatattcagcaaataaagttgcaatctcagttcccgagtaaacttcgttaagtgttccacttgccattgttattaagttttgcatatatacctccataaaaaattaagcatgatgtttatattatattaganagtgagccgattgaatatgaaaaaaataaaaagctacaccagtatctgggcagttgaaaaggtcatttatgcaatcaatgactttcagctaccttttcctgtgacctttaatcagatggcttggtttgttttgtccttgctgtttgtcatcgtttttgcccatgtgcctccgctatctatgatagagggggcctttttaaaatacttaggcataccggtggtggtcacttggttcatgtcgcaaaaaacctttgatggtaagaaaccactgggatttttacgatcctttctcagttatcacttacggtttaaggtcacttttgcaggaaagaaggtcaaagaacagaagaaacgatgggatgaacccatcactctagtaaggagtgtgaactatgtacccgattaagtatgttgaaaataatcttgtctttaatcaagagggagaatgttttgcctactawgaacttgtgccttawaactattccttcttatcgcctgaacagaagtatcaagtgcacgataactttcgtcaattgattgctcagaatcgtgaaggcaagatccatgccttacaaattgccacagaaagtagtattcgtgccacgcaagaacgatcaaaaaaggaaattacaggcagactcaaagaagtcgcgaaacaacgaattgaccttcaaacagatgcattagtatctatgattggcgatagtcagattgattatcgcttttttattggctttaaactaattgcaacagatgaagaggtcaatttaaagagtctcaagaaatctttcctttctgggcttcaagaatttgtctatggggtgaaccatcatttgatgggtgattttgtttccttatccaatgaagaaattcgccgatataccaagcttgaaaaactaatggaaagtaaattggctagaagattcaaagtcagacgggtcacaccgagtgatctgacgtatttaattgaacatatttatggcgaaaaaggcacaccgtttgaagaatatgaatttcagctaccaaagaaaaagctaaaatcagaaacgctggtgaaacgttatgatttattacatcctagtcgttgcttgattgaagaaaatcctcggtacttacgcatggaacatgaaaatcmtgaatcgtatgtagcctatttgacaatcaatacgattgtaggggagatggagtttccttcttcagaacttttttattaccagcaacaacaattcacttttcccattgatacttcaatgaatgtggagattgtgaccaataaaaaagctcttgccactgttcgcaataagaaaaaagaactgaaagatttagacaaccatgcctaccaatccgataatgagacaaattccaatgtcttagatgctttggattcagtaaatgagttggaaactaccttggatcaatccaaggagtcgatgtacaaattaagttatgtagttcgagtgagtgcggaatccgtggatgaattaaaacgccgttgtgatgaagtgttcgatttttatgatgatactaatgtaaaactagtccgaccctttggcgatatgatggggctacatgaagaattcttgccctcaagcaaacgctatatgaacgattatatccaatatgttacttctgactttttagcgggacttggttttggggctactcaaaagctaggggaattagaaggcatctactttggctacaatgtagatacggggcggaatgtttacctgaaaccggcattagcttcacaaggggtcaagggttcagttaccaatgctttggctgctgcgttccttggttcactcggtggcggaaaatcctttagtaacaatctcttggtctactatgctgttctttttggtggccaagctgtgattgtcgatccaaaaggagaacgaggtggttggaaagaaaacttgccagaaattgcggatgaaatcaatattctcaacttgactagtaaaccagaaaatcaaggcttacttgatccttatgtgattatgaagaaaaagaaagattcagaaagtttagcaattgatatcctgacttttttaacaggaatttccagtcgggatggggagaagtttccagtattgcgcaaagccattcggacggttacccaaagtgatcaacgaggattgctgcaagtcattaatgagcttcgaaaggagaactctccagtcgcggaaaatatcgccgatcatatcgagtcctttaccgattatgattttgcccatttgcttttctcagatggttcgattacccaatcaattagtttagataagcagttgaatatcattcaagtagcggatttggttttaccagatgcagaaaccacttttgaagaatataccacgatggagttgctaagtgtctctatgctaatcgtcatttccacgtttgccttggattttatccatagtaatcgagaaatcttcaagattgtggacctggatgaggcttggagttttcttcaagtggctcaaggaaagaccctttcaaataagctcgttcgtgctggtcgggccatgaatgccggtgtttactttgtcacgcaaaatagtgacgatttactggatgaacgcttgaagaataatatcggattgaaatttgcttttcgtagtaccgatattcatgaaatcaagaagactttggaattttttgggttggatcaagaagatgaaagtaatcaaaaacgcctacgagatttggaaaacggccaatgcttgatgcaggatttgtatggtcgggtaggcgtggttcaggtacatccagtctttgaagaactcttccatgcctttgatacccgtccacctgttcaagagagaatggagtgaggggatgaaaaagaaactttttcggattgtgggaatcgtttttattagcatactcactctgatagttctattgagtttagttggtacggtagccgaggcgacagggctagttgatgatacagttgaatcaggaaatctatattccaaatattcactgaacaactatcaactagatttctttgtggatagctcttgggattggttgccttggaattggggtgatggcttagggaaaagcgtgatgtatggtctttatgccattactaatttcatttggacggtgagtttgtatttgtcgaacgccacgggttatgtggttcaagaagcctataaattagatttcatttcggatacggctgaaagtattggaaagaatatccaaacattggctgatattactgaaaatggactccagacctccggattttattttgggtttctattattgatgattttagctctgggggtgtatgtggcgtataccggattattaaaacgagaaaccacgaaagcagttcgagccgtgattaattttgtgatgatttttctactatcgggttcgttcattgcttatgcgcctacctatatcacaaaaatcaatgactttagctcagatgttagtgaagcggcccttacccttggaaccgagatcgttgtacccaattcagaaagccaaggaaaagatagtgtggatttgattcgggatagtttgttttcgattcaagtccaacaaccttggttactactgcaatttgatgattccaacatagaagaaattggtgaagaccgggtcaacaagattctatctgtgagtccagatgaaaacaaaggcaaagatcgggaagaagcggtcaaggcagagattgaagacaatgacaatgcgaatctcagtattaccaagaccatgaaccgtttagggatcgtggtctttttggtattgttcaatattggcatttccttctttgtttttcttctaacagggattatgttgttctcgcaaattctcttcattatctttgcgatgtttctgccaattagtttcttattgtccatgttgccgacttatgagagtttgggcaagatggcgattattcgtttattcaatacgattatgatgcgagcgggtgtcaccttggtgattacgactgcattcagtatttctacgatgtttttcaatatttcggctacctatcccttctttatggtagcttttctacaaattgtgacctttgccggtatctatttcaaattgggtgacattatgagtatgttcaaccttcagagtaatgacagtcagtcaatgggcagacgggtcatgcgaagaccgcaaatgttgatgaaccgtaaattgcggcaactcaatcgaaatgtgggccgaactctggcttttggcggtgctgcagcagtyggaatggcaaaatgcattactctgatttatggtacaattttcccattaatccgccgtatgtaccaacggaaaacccaacaggtatttacaaacggacatttgctatagatgaaacatttcacgataaaaaaatcattttacgtttttgtggcgtagattcagcttatcatgtttgggtgaacggccatgaagttggctacagtaaaggtgcacgaaatgaagcagaatttgacattacgccttacgctaaaattggtgaaacaaatgatttaacggtgcgagtctatcaatggtcagatggtacgtatttagaggatcaagatatgtggtggttaagtggtatttttcgtgatgttgaattactcggtgtaccagaaaatgggctggaagatttctttattatttccgatttagatgattcgtatcaaaatgggcacttggcaattacgggtaaattttggcaagacaaaggacaacaagttcaattggagttgatggatcagcagggaaaaacggttcttaaagagactgtcgcaggaaatcaaggtacggttgaattttcagcaagtttgccgtctgtcactgcttggtcagctgaaaaaccatacttgtatcaactatttatcactgttttttctgaaggggaagtcgtcgaagttattccgcaaaaagttggtttcagaaatattcatgtatctggtgagactttcttagtcaatggtgtggccattaaactaaaaggaatgaatcgtcatgattataatccgaaaaatggtcgagtggttagtcgtgaagaaattgaaaaagatattcgtttaatgaaacaatttaatattaatgccattcgaaccagtcattatccagcatctgcttatttctatgatttatgcgatgaatatggaatgtatgtgattgatgaaactgatttggaatgtcacggctttgaattaaccggagaatatgattggattagcaacgatccagaatgggaaacggcttatgtttctcggatggtacggatgattcaacgggataaaaatcatccatcaattctcttttggtcgttagggaatgaatctgcgtttggtcataactttattgaaatggcccgtattgcaaaagaaatggatccaacacgtttggttcattatgaaggtgattttgaggcagaggtcacggatgtctattctacaatgtatacgtggttggaacacccaactagagaattactgatgaatacgattattgaaaattcaaaaaaaccgcatattttatgtgaatattgtcatgcgatgggtaatggccctgggaatttaaaagaataccaagagctattttatgctcatgataaattacaaggtggctttatttgggaatggtttgaccatggcattgaatctgtaacagataacggtgaagtttattatcgttatggcggcgatttcggcgatgatccaagtaacaaagatttttgtattgatgggatgttgatgcctgaccgtacgccatctcctagcttgtatgaatacaaaaaagtcattgaacccattacaactagcgctattgacgttctgtcaggtgaattctcattattgagtcggtttgactttgaaaacttggctatctttaagctggtttatacaattactgaagatcaaacagtgattcaatcagggacagtagcagtgccagcaattgctgctagagcagaaggaagactgcacttaccttatcatttagattttcctaaaaaggcaggagccgcctattatttaactctttcatatcaattgaaagaaacgactgcctatgcatctgctggtcatgaattagctaccgcacagtttgaattgccaattgcaacaccagggattgagatcacaccagttggctcgctaatggcaaaggaaattggccctcatttatacattgaaggaccaaacttttcaattaattttgataaagtgaagggcgccttaacgaatgtgacacgagatggtaaaaaattattgcataaagggccgaaatttacattttggcgggcaccaatcagtaatgatatggaaattattgatgaaatgaagaagaaatatttcttacatttagagcatgaaattgtccgttcttttgagtggaaaaaagttgatgattttatccaagtcatcgtaaaaacaattaacggaacgactaacagtgcttggcattatcaatgtacctatcagtatttaattgcaccaaatggcgaaattttcttcgacttaaaaggtagtcctgctggtaaaattgaaaatgcgccagatatgttaccacgtttgggtgtgactctccatttagacaagtctctatcagaagtaaaatatttcggtaaagggccgagagaaaactatgtagattcacaagaagctggtttacttggcgtttatgatgctacagtggcggaaatgttcactaattatgttgttccacaagccaatggtaaccacatggcgactaaatggtccgcattcacggatgatcgcggccaaggggtagtagcaacagcggctgattcatataattttagtgtttcttattttgaagaacaagcgctagatgttgctaagcataccaatgaattacaagaaagtgagtatgttgttttaaatatcgattacaaacaaaacgccctaggtagctactcttgcggccagtggcaattagaaaaataccgaactacgtttgaagaattccaattggcattccgcttaacaccttttaataataaagagattcaagcagcggatgtcgcacatgaacgagtaaaacgaccaacaatttcttaaataaaagctcagaacagtgcacttcggtctcctgttctgagtttttttaatgaaattatcagaaattattgcttttttttcatggaaataagcaaactattttgttatctaataaaaatagttcataatagtaacatagcgaattattcgctagataaagcatttaggaggaattattttatgcatactttatgggttttaatcgttggtgctgttatcggtgctatcgctggcgcgcttacaagcaaaggtcaatcaatgggttggattgcgaatatcgttgccggtttagttggttcatttatcggagaaaaaatcttaggtagctggggtcctcacgtagcaggtatggcaattgtgccatcaattattggggcagtaattttagttgctgtggtttcattcttcttcggacgaaaaaatagctaattaagtaaataattgtttaattagttaaaggaggtcgggacagaaccgtttagctccgagaaataagaagaaatttccgaaaattgctttttaatttttggataatttcggcttatttccgaaggagttggttctgttcccgccgtttatcagtttttgagcgtggagcaaaaatccaaagtgatttttgtcccacgctcctttttttattttctcgttaattttacgacaacttcacaacgagcggtttgtggaaacatatcaacagattgtaaatagtctacttgatatactttggctaattgaactaaatcacgtgctaacgtggatacattacaagaaatatacaccattttcttaggtggttgtttcaaaagggccgttaataatttacgatccaaaccagtccgtgggggatcaactacaatggcatcaggtttaaagccttctttgaaccatttaggtaataagtcttcagctgttccaacagcataatgtgtgttcgtaacaccaagtcgttttgcattgaatctagcatcgtcaattgcggcgggaatggtatccataccacgaacttgatgcgcttgtttcgctaaacttaagccaatggtcccgacgccacaataagcatcaacaacagtttcgtttggttgtaaatctaaggccttgattccttcattatataaaacttccgtttgttctggattcaattggaaaaatgctcgcggcgataaatcaaagacaacgtcgttaatgtgttcttcaatgctttctttgccccataagtgaagggtatcatcacccattactagagaggtttttttattttggacattttgcataatagaaacaacttctggtaattgttcattaattgcgcgaaccattttttctttttgtggaaatttctgcgattgtgtaatgaacactacttggacttcgccagtttggatgcccactcgaaccattaatgttcgaaagataccactatttttacgttcatcataaattggtaattgaaagtcattcaataaatcaactaatgtattcatcaccttggttgtcgcaggctgttggaccaaacagttatcaatcggtactaattgatgtgaatcagcttgatagagaccagcttctacttggccatcgatttggcgtaattggaattgggctttatttcgataattccaaggattatccatcccaattgtttttcgtagttcatagttttgataattggctggtttaaatttgttaagcgcctgctttaataaatcttttttaaagtctaattgtgctttgtaggctaaatgttgtagttggcagccgccacatgtttcatagacaggacaaggagggaccacgcgatctttagcagcttttttgacagattgaagggttccttcagcaaattttggtgtaacatttgtgatcgtggcagtcacttcttctttcggtagcgccccaggaacgaaaataattaattttttataatagccgataccttcgccattaattcctaatcgtttaatttttaaagaaatttgttggcctttttttactagttgttgggtcatattctttcatcctttagtcatctcacatttttcacttcctcccattttagcacatttttatttatttggcttccaaggattctatggtatagtagaatatatgttctgatttagaggggcaggagaataagatgacaacaatcacacgaattagtaaagataaaggtgaattttatctactttggctatcttcaggcgaaaaactgcgtgtctcggaagatattttagtacggcagcgtctgctaaaaggccaagagttatcagatactttaatagaagaaataaaaaaagccagttcttatgatgtcgggttacaaatggcgatgaattatttaagctatcaattacgttcaaagaaagagatttttacttatttaaaagagaaagaaattgtacctgaagatcgagtaaaaatcgttcaacgtttagaagagctgcggttgttggatgatgcaatttttagtgaaagttacgtacggacagctatgcgaaccagtgataaaggaccacgaaatgtggcacaacaattaaagcaaaaaggtattagtgaagaagatattcagcatggtttgaccttttatacgttagatgaacaacttaatgttgccacagcaactgcagaaaaagccatgaaacgctatcgaactaaaagttttaaagatgcacttcagaaaatgcgtctgcatctgatgcaaaagggctttacaaatgaaatcattgatctagctttggaatctttagcttttgaaaaggacgaagaacaagaacaacaagcgttagacaaggaaggcgaacgtttatggcgtgccaatcagcgatttgatttttctaaaaaagtccaaaaagtcaaacaaagcttattccaaaaagggtttgactatgatttgattcagcaatttattagcgaaaaggaagtagaacatgacgaataaagagccttgggaggcgtggagtcccgcaaaagttagttcattccaggaagattttttagcttggtatgaacgagaaaaacgcaatttaccttggcgagcgaatacagatgcatatcgtatttggatttctgaaattatgctacaacaaactcgcgtagatacagtcattgattatttttatcgatttatggaatggtttccgacgattcaagatttagcggaagcgccagatgataagttgttgaaagcttgggaagggttaggttactattcacgagcgcgtaatttaaaagtggcagcgcaacagattgtttcagaatttggtgggaaaatgcctgacacaatcgaagatattcggagtttaaaaggaatcggcccctatacggctggtgcgattggcagtattgcctttaatctccgcgaaccagcaattgacggtaacgtcatgcgggtagtgagccgtttatttgaaattgatgcagatattgcaaaagcgagtagtcgtaaagtatttgaagcggcgatgcttaaaatcatcgatcgtgagcgtccaggggattttaatcaagctttaatggatctaggctcagccgtctgcaccccaacttcccctaagtgtgaaagttgtccgcttcagcaatattgtgcggcctatcaggcagataaaatgaccgcttatccagtcaaatcaaaaaaagttaagccgaaagatgtgtattatgtcggcactattattgaaaataaaaagcaagaatttttattagaacaacgccctgaaaccggtttgttagccaatatgtggctgtttccgattgaagaaattagcaaaaaacaatttcaacaattgcaaaaactggcgcaaccagcagaaacggaaaaacaattaactttagagttagagcctgtaacagagcctttggtcgctgaagaacctgtcaacttttttacggactatgaaacagttgtctggcaaaaacgtaccttaggcgaagtcgttcatattttcagtcatttaaaatggcatatcttagtcttttatggccgaaatacaggcgaattagccacactagagtcgcagcgatgggtggcagcacaacaattttcagactatgtttttccaaaaccacagcaaaaaatggtggaattgttcaaaaaagaacacgaaaaaaaataacaaaaaagagaggctttttaacaaacaagcccctcttttttgtttcctctaggttatacccctatataaattctgctatgtttagttttgaaagggactggtaaaatagacttgtctcttgtctgcttagaggagtagtaatgatggtggagactttttaagagagaggaagtacagccaatgagtaggaagcgaaaaatcagcttaattagtttagtcatcattttggtttttgtcacagtcggctcagcatactttgctgtagcgggtagctatttaaagaaaacaattgataaaggctatgttcccataaaaaatgattataatgaagcgcaaaataaagatagtcaatcgtttttgattatggggctagacaatacaattgaacggaaattaggcacaactaggactgatgctatgatggtgattaccgtgaataacaagacgaagaaaataacctatttaagtttgccacgggatagttttgttcaaattgatgcgaaaaattaccaagggatgcagcgaattgaagccgcctatacctacgatggaccaacagcttctgttaacacagttgagaaattattgaatattccaatcaatcattacgttgtgtttaactttttatcttttattaagttaattgatgcggttggcggcatagatgtcaatgtcaagcaggcgtttgatggtgtcaccaaagacgggccaggatccattcattttgatgcagggaaacagcatttagatggtacgaaagctttatcttatgcccgtgaaagacatagcgataacgatattatgcgtggattccgacaacaagaaattattcaagcagttgaagacaagttgaaatctggtcaatcaatcatgaaaataatggacattattgattcgttaaatggaaacattcaaactgatgtggattccaatgaattgactcatttagtcaaagaaggtttgacttggaccaattatgataaacaacagctttcttttgactggcgcacttttagtaatgaagggcgcagtatggttgaactatacccagatagtattgaaaatgtccgtcatcaattacgtgtgtctttaaatttagaaaagccagatgaacgagatcaagacggctatgtcttccatacgaacggtgaatttttatatcaaagtgattataccgttcaagatgaagcagctgaggaaaacgaaatgacttccatcaacggcaatacgtatattggtgttcctggtaatacacagaccggcccgttgccatcagttaaaacggaaaatggctttataaaataatttattttccaagtgtagaaaatccgaacataacagattaaataatccgcttacttattattcttctaaggaaaaaacgaaggattttagcaaggaaacagcgtatcatttgatataaacccaacattccctttataatgaaagtaacaagcaaatttttgttacttagaaggggaagggagcaaggagttatgtttagttatacagataccattttgtcaattatgcaaagaattgaagtatacaacgaaattttcaaagccatctctaaagaagttcaagaatacggttgtaatcaggctgcacatcggagaggccgtgacacttatatgttttgccgaaataatgtgaatcgtttttttacagaagaaatgatgtttcgtaaaaatttagagccgtattatgataaagaagcaacgaaaatcttgctagaaggattagatacgtataaagaaggagtatttttctggttagaggcattaagtgaatcttgccaagtgacagatgaattgaaatatcaattaggaatccgccaaaaagaatcctcttatttattaattaatcaagcttgtaaagaagcctgtgagggcattcaaagcgctcatagtgttcataagatgtaaaaagttagggatagctgtcaatctggcagttatccctaacttttttatttcaatatcatctgataagcataacgttcgccatcgttaacatctaaaatcacgtcaccttgataaacaaagccagcttttttaatcaggtgctgcatagcgagattttgtggatgtgtatcgattcgaatatcagtagcaccttgcaaacgagcggctgtaaccagtgagcgcaaaagcaccaaagccagtccttgaccttgaaaggaactttttagagcaacacaatgaattgccgtatacgtagtttgagaatgaggttgccaagaaccattaaaaatcgcttcataagcaggatcaatctccgaacataaaacaccaacgcctgccaaggcatcctcaaccattaaaatatagcaagtttgctggtcgatatcttttgctaaaatttcttgattcgggccatcgccgttttgccattggggratgccacttttttgtaaggtgcggcgtccatcttcaatgatagcaaggatgtcaggcaaatcagaaggttctgcttttcttaagtaaacagtcaaaaaatattccctcctcttagaaacctgttgttgttttcaattggtaaatttttgaagggcggccaatgccaacgggacgttcacctaactcttcaaaatattgtgtcatggcttttttaaaatttgaatggtcaatgctgcgataatcaacgccgaggaacttcgcaaaaactttacgggcttccgtaatggtgaaatcttttcctaagacttgaagcacttgcggttcatgttccattttatcaacaacacgattaaacgccttaattataatttcactatggtcgaaggctaatgtatctttaccaagagaggccgctgttttcaagtctaaagtaatttccacatcttcatgagataacgtgatgtgttgaccatgccgttcaagattgaaccaatggacttctttggcatcgtcgccagcaattaaaggttcttcaccaataaaggctaaatagctgactgtcacgacccagccacgaggatctcgatctgggcgactaaagctgtgtaattgttcaatattttcttgagaaatcaccacaccagtttcctcttttgtttctcttaaaacactatcttcagtagattcgttgcgattaacaaaaccgccaggaagcgcccatgagtttctaaaggggtgacctttacgttgaatcagtaagacttttaattgatcagcttccttgttgtaacaaagaagaaccatatcaacggttaaagagggtttttcatattcaggtaattcttgttgatgataccaagttaaaaactctgctaagctagcttggcgttcataataatttttttcttcggctttagaagcaaattgtggcacaattgctcctcctttcaaaaagaaacatggttttcttttattgtatcattaagtggctgaaatacaatattcaagcgtaaaaagaaaagcaagcctgggacaaaaatcactttggatttttgtcccaggcttgtactataagaagtttgttctagacgttatttattgtgttaattctaataatttatttttcaaatcttcttccatatggccaagttcgatttcggcagcttggcgtttttcttttccttcttgttgaatacgtaatgtttcttggatagtttcaattaaatcattttgtgttttttgtaatgtttcaatatcgactaggccacgttcgttttcttttgctgtttcaattgcagaaatttttagcatttctgaatttttcttcagtaagtcattggtggtttcagagacttgacgttgagcagtcacagcatctttttggcggagtaaggttaaggcgatgactacttggtttttccataacggaatcgccgtattcaccgatgattgaattttctcagccaaagcttggttagtattttggattaaacgaatttgtggggcttgttgaatcgtaatttgacgagccaagcgtaaatcatgggttcttttttctaaacggtctaggaattggttataatcattaacaatttggacatccatttgatctccagattcttccgcttttttcatggcttcagggataatttgcgtccgtagttcttctgcttttaattccccagcggcaatatagatgtttaaggcatcaaaataatctttatttttttgatacaattgatctaacatggcattatcttttaaaagaccatctttttcatgggttaatttgacagcaattttgtcaatttgcgcaccaattttttgatatttggcggtaatttcgtaaacggattgtttgactttacctaacattttttgaataaagttgccttcgccagcacgtaattcattgggattggcttcatttaaacgaaacattagatcggtcagtgaatcaccaacaggaccaatgtcttgtgcttgaacgtggtttaacatcgcttgcgaaaattcgccgagtttgatttgggcatttgaaccataggtaattactgcttgtgaatcttggacatcaatttttgaagctaattcttttgcttgggcttgacgttcttgtggtaatttatcaattaaacgaggagctgcttgctgttcttttaactcagatagttcattttgttgcgttggtgttagttcatccattgatgaaaatggattacttaataaatcgtccaatgtattggttacagatgttgtttctttgggttgttgctcagtcattgtttttcctccctaatgattattgctggtcttcgtttacttgaggtgattcctcagttgcagctttttgcgacaagctgcttttagcgatcgacatttcgacatctaaatcgtctaagtcatcggaaacgatttcctcataatcatttttaactaattttgacaattggtcaatgatttgtgcgctttcttctaatttttcatacgtttgtttgttttttacttcgtgttgttcgatttctaaatgtttacttgttaagtcaacgatatttggtaaatgtgtatagagaaagtgattggctaagtgtaactttttaggttctttcactaactctttaaacagagctttagaaaccttcgtagtatcattacgtaagtcaatcgcccgtaatttagttgaacgattcatgttttcttgcaattgtatgatttgttttttggctgtgctcattgtacttctgaaaaaatcaatttcttgtggagataaccccaactcacgataatgggcttctttatctttcgttaagtaaggcatttgatcgcttttgtcggcggcatttttcttttttcgatagagaacgaatactaaaaagcctaccagaatcacaaaagcgaagaagccatattctctagcgacagcaatgattaaggctcctaaaagaatatagccaatcagtaattttgtatttaatttgttcatttatatagttcctcctatctatctaatcctcgaaagagtcagctctcgttacaatagttattttagcatactctgtgagagaaaagacatacagcggaagatgtattttatgatttagtgaaatcctaagaaaaaaagtataaaacgcaaaaaaagacccgtcctaattgggggtaggacgggaaaggagttaaaaatgaaaaagtgttttgttagggttgtttgttggtatgcttaaataatacaaggaagttgtgaattttttatgtctattttttttcgaaaatgtaatttttttctaaagcaataaatttttttctttgaaaagggtttaactagagaagaaggggtgcgatttttatcattttagggtatgataaacaagaaaggttggtgaaagtatgttaaattatgaggacttcgaagraaaaacacttcmacgtcgagraatttttaaaggraagrttattgatgtttttttggatgacgtggctttaccgacagcggcacagctaaacgcgaattggtttttcattcaggcgcagtagctatgattccgttaaccgcagaaggaaaaatcgtcttagttaaacaatttagaaaacccttggaacaagtaattttagaaattccggcgggaaaaattgatcctggagaagaaaatcaactggaaacgacggctatgcgggaattagaagaagaaactgggtatcgtgcaggtcagcttacctacataaattcaatgtatctgtcaccaggatttgctaatgaaaaattggctctctatttggcaacggatttgcagaaagtcgaaaatccgcgtcctcaagatgaagatgaaatcttggaactttacgagctaacaatagctgaagccaaagcagaggtggcaaaaggcacgatttgtgatgccaaaacactttttgctatacaatactgggaattgtatttactgcagagacagtttaaggaggacacgcaatgagcaaaggtccgttagtcactcggacagagcttcgcaaacgcagagaagcagaagaaaaagaagcggaacgtcgtcagcaagaagagcagaagctggcggaaaaagcgtataagcgaaaagaaaaagaaatttcgacgttttatcgtaaagaaaagaaaaaacaaaaaccgatcaacaagtcacgagtaggagaatactcgaagcgtcgagaacggagtacttggttaaacaaggcaattattattgtagcgattttattagccgttgtggcatatatcgttttgaatttatagaaaagaggaatcactatgaaaattggaattattggagcaatggatcaagaggtcaaaattctaaaagaaaaattgacagacacgatgtcatgggaacgagcaggcgctttatttgtttctggttcgttaggaagacatgaggtgattgtggttcgttcaggaattggtaaagtggcctcagctgtgaccacgactttattgattcatcaatatggcgtaaatatggtgattaatacaggttctgctggtggtatcggtgaaggactaaaagttggcgatttagtcattgcagacaaattagcttattttgatgttgatgtcactggttttggttatgcctatggacaattgcctggtggtgtgcctttgtattttgaaacaagtgaatacttgcggatggaaattgcgaaagccgctgaaaaaactggtttagctattcgtaaaggattgattgttactggagata

SEQ ID NO: 18 - DNA, 6930 bp; double-stranded, linear
aagtagaacgtaaatggtacgtagtagatgcaacagatgttcctttaggacgtctatcagcagttgttgcttctgtactacgtggtaaaaataaaccaacattcacaccacatgtggatactggagatttcgtaatcgtaattaacgctgataaagtaaaattaacaggtaaaaaagctacagacaaaatttactaccgtcactcaatgtatcctggaggattaaaatcagtgactgctggtgaattacgcgacaaaaactctcgccgtcttatcgaaacttctgtaaaaggtatgctacctaaaaacactttaggacgtaaacaatttactaaattgaacgtatacggtggagctgagcatccacatgctgcacaacaaccagaagtattagatatcacgaacttaatttaaggagggaaattcattggcacaagtacaatatagcggcacaggccgtcgtaaaaatgcagttgcccgcgtacgcttagtaccaggtactggtaaaattactgtaaacaaaaaagacgtagaagaatatattccacatgctgacttgcgtgaagttatcaaccaaccatttggcgtaactgaaacaaaaggcgcttacgatgtaatcgtaaacgtaaacggtggtggctatgctggacaatcaggagctatccgtcacggaatcgctcgtgcattgttacaagtagatcctgacttccgttctgctttaaaacgcgctgggttacttactcgtgacgcacgtatggttgaacgtaaaaaaccaggtcttaagaaagcccgtaaagcttcacagttctcaaaacgttaatatatcttatatatcaacatctcaagacactttccaaattttggagggtgtctttttttgtgtttttaggtacgacaatgggtacgagttttttaaaccagctattcattttatattttttgcttctgctaatcgttgttcaaatttttcataagtggatagatcaacgatgtttggtgtattcacatagacttctgttgtttttgtatcagaatgggtgagcgctctagaaatttgttccatggttgcgccaccttcatatgctagcgtactaaaagtatgtcttaacttatgagaagaagtatttattaagtgtttgtgtcgacgtttaactgagttgatgcggtagttaagatagtctatgtgtaccgggacattcacatttccctttctatcaatataagtgaaaagaaattgctctgcattttgnttaattccaagttgtaaaagttcttgtgcttgttcttttttccatttcattaacaactctataagggaggaaggcaattggaatttagtgttttttcttcctttggtaggagttaaatttcctagcttgwctttgctttggacaagtagtattgttccattctgtaaatcgacatgtttccattgcagagcataactttcacttttacgatcgcctaaatttaatgttaaggtaaaaaggacaaaatcttgaaaggttagatgtttgttattgtagtcttgttgaatggcttgaatccactcaagaagttgttctgcggttagtgcttctccttttagcgttcactccatttttctacgttgttttaaaggatctcctacgtaacgagtaatcttagcaacatgattgtattcgatgtaatcaagaagttctgcaatatcaaacaattgatttacatagcttttaatcgttttgatatttgcatatttttgcgctttcgcatttaattttcgcaaaactaaatctttatttgtattcaattcaaagagagagtaactaccgaacataggtagaatatgaagacgaaacaggtctttagtgtttaaaatcgtttgttctgatggaatcattcggtttctcccactagaaccattgcaatacatgtctaaccagacctgttcataaaattctttgaaagaaatatttgcttttaattcaaaagctcgttcatgtttttcaagttgtactttttcaatttttttaagaatatctttttcagctaccagagcttcatttttggaagagaacgtttttctgtatcgctgtgaagtaacacccagaatttctcttacttctttaggataaaatacttcgactttataacttccgcttttcatttttttgattgccattaatatttcctactttcttgcgtgaatcagaacgtagaaagactatcgtttgattatagaatagatacttgaatgtttataggttggtttaagcatatttttttaaccaattatcaatctccaacttatcataaagtactattccgttaatactgattcgtggaagtccaactgtaattaatttatcaatagtattgttggagagattaagatattggcatagctgatgctttttaagataacgattatttaatcctaaatcaatttgaaattgtgtgatttcattttctagtagtttgtgaatggcttcctgtaatctttgtttttgagtgtcagacaataaaatagtgagttcgttcatttatgcgttcctccatttttcttgatttttgtgtaacgaacattttgttcttcaaaacctatttctttgtttgggatattttgttcattccagtcttgaaagaagacaggtcttttacttacataattgttggtaaataagactttttgatcttttacttcataaggtcgatctgtcagtctttttatttcgagcggatgcttcaagttttgagatttaaagaaggcttttttcttatgctcttttagttctaaatctttatcaaaatacttgctgacataccgtcctctattttcagcgctatctatgtcaattttgttgattttgattagtccatgtccccaaatagctgttagttctgcatgaggtaaataggggaagctgaataaaataacgtgataatgaatagcgccatgtttttgtttctcccacgtagctaggtacttaatttgggctttctttgtcttgtataaatggtagtttagtcggttcataaattttttgaactcactatttgtataggctatatctgttatattctttttaaaagttaaagttaaaaattttgtctggttatccaaattcatatcaatgagtcgagcaacgacaaagcgttgatttttgtaatgtttttgttttctctttaaactgtcatattgtccttgtgcggttaaatcatcaaatgtctgttttgtagtttttagccaatcaggtttttctttcttttcatcattatctgtttttcgttttgttaagattaattgttcatattcccaaatttcaatgtacgtaggggtttcaatgattttttgattgtatccatgtagcaatcgcaatcactcctactacagaaattgagtgttcttactggttattcagttgtcaaagaacgagtgtataactttttgatttttcgccagataatgttctataaatcaagttaagtaggaagaaagcctacgcctttcttccagagcaatcatccatcgtgtggttgattttcgagcggaaagcggcttgagctttgatggctctaccgctttcgtcgaaaccacccgctggaagtctgctcttgggtggatagtgattcttcaagttgagccaagcgttgttctaatgtttgatagcttctttccaattgttggtacttttttgttaatgcttgaaacaactcctctttatttgccaacttaacttcaatttgattgatgatttcagttagtaattcactatgattcatggtatctaaatgatgtttcttatcaaaaagttttcgtaaagaagtatttctgcccaatatagggatcagttttattactttttgaaatttttggatttcttccagtgaaaacattctggttttgcggtgattgatcgttcttttagttcttgtgtgactggcaaaacgaatataatcatagtgaaattggtaatcgcactctttttgaataaaatttgcccatttgtttaaagtagagagggaattcagcccctctactttttttagcacgtcatgggcggtgaagtaatcagtcatttgtttggaactagtgtggctttataggctgtagcagttagtccatagctaacaaattgtccatttacacgaccccaaggagtaatcataagattatcaaatcgaacgattgccatacctttttcatctaatgtttctttcgtgattacaggagcttcacttttaactttgacactgattttttcaaatcggagttttggaagaacacattcatacgtccagcccaacgttcgccgtctttttgccaaagggagacttggactacttggtattcattttcaagcttttctttaggtaaagttaaatcgttaatttttactgccatttcatatcctcactttcttttagtacattttttagtacaaacatattctaatggagctagaaaattttgttaatattttttagcacaaaaattagtacaaagctgttttactcttagtgcattatttgttatgattgttttgataaaaattggcttttaaccattgaggagattgagctttatgaaaccaaacaaaaaaaagtaggcgaaagaattcgagaaattaggacaaatctaggctacagtatggacgaatttggaagtttattaggtgattctccacgaattctgtgaacaattgggaaaaaggggtcagtattcctaaaagagataaactagaaaaaattgcgatattagggaatatgttaccagaccagatactatatggtcgagcagatgaatatttatatgatttaattgatagcagtttcaatgttaaattcagcgataatattctttatgaaatttttgaaagtgtaccacctgaaaagcgttcttatgatgatttgatgtggttagccgttgcgaaatattttattgataatggtacatatggaaaagttgttggaaaattcaattatatttcaatgctaggtataccgaacctttatacaggaagctatcaaaatgaatttattgaacaacgtgaagattataaacaacaagaagttaaatactatgtatatgcagatccggaaaaaaacatattacacattatgccatttgttcctaatgagaagaatatagaactgctttatgaatttcctgaattattagaacaacaagcagatcacgaagtatttactgcaaattttgaacaaattgggcttaccttaaaaggatcaaccattgtgtattatggaattgataaacaaaaattagaagctaaaacacaggcatataaatatgatgaagcggttgatttatatagaatagctcaactaccagaaactttatcaatgtttgatgatgaaatccaaaagcaaatttcgtttttaaaaagtaaataattgcatataaaaagaagtcaacagtgtttcataactgttggcttctttgttttgctatttagtttataagttaggccagaatcaagtatatcgtaagtctaaattctaaccttttctcttctttttaaattttcaagctgtttttctaaactctcagtacgttgtagaaagtcattgagaaagattttgaatatttgggcatttgcatggtattttcgaatgatcttttttttattaattgtttcttgttcaaaatcaaaaaatttgtttaatatctctaatgttgatgtccatgattgaagttgttcaagtgttatttctagcgcattgatatcttgttgagtaatgattttaatcggctgattcttctttgttagtaattctttattttctttttccgatgtcataaggtttcctcctgctattttacaaaatccatgtctatacgaacaacaatctaaaattattatactataccatgtttatatagacaacacggggagtgaatatgaatgaacgaaaatgaaggtggtagaaaagtggaagtgctgatcaacgatttattagcagaacgtcaaatgtctttaagagaactcgcaagattgtcgggaattgagccttcaaatttaagcaatttggcaaatggaaaaagacagaaaatttatttagaacacattgaaagaatcgcagatgcgttggagattgatgatatatcgaggatattaaagttgaataggaagtagtattggggatataaagaataaatataaaaatagttaaagatattgttaaatactttagattaaatgaaaaaattacagaaataaatttgatagaagaaaagtataaagcgaactatttgatttttaatatttactgatgtttacgatgaaggtggaatataaatgaagaatgataacactctttctgaagaaggaattgatacagataaaggaatagttggttcaatttttgaaagtatgctatcggatactttatcagaaattaaaaatttagataatgttaaaatacagaagatagtagaaaatatagggaaatatgataaaaaagagtttttgcaaagacttgctgcactaagaattccctttgaaaatagagataaggctgtattattggatgcaacaactacagcaacactgaattggttatcggaaaacaactggaattttaatgggctttcaatgagctatggtaaattcaaaaaagttattcaacagattaaccaattagactctaaaatggctattgatccattggataatccctatatagataatatccaattttatggtaatcataaggtaatgcctggaataaattttgcaagctcgtataatttgcaaatgatgatccagtctatatttttatcaaatcgtacaaagttatctgatgagaaaaatagatatatatccatttcattaaatgataaccttatggtttctaccgatgtttgtaaaaatgtcagattccaaacgaattnccatcattcactcgcgaaatatntatncctaataaa

SEQ ID NO: 19 - DNA, 25580 bp; double-stranded, linear
tgtactttcgtccaatatttatttcttcttcaagctgataaatagacacatctctatcttttgctagtttttttatacgttccaaaaggttcatatgaaaacattctccttctagttacgmgttatttmcaaaaaaagttagtaaaaatgtttgacatttacaatatttgttagtaatgtaatcacgtaagctaatttattagctaataagttctcaaataaaacctataaacaaaacttgaaaatcgttggggaacggtaaaagtattgttttagaaggcttttaaagtcttatttagctatgggttcattttacaatatgtgttagaaagtgtcaacgaattttattaaattagctaattttttagcttacaaattaaaaagaaggaatggaagaaatgaaaattgacgaagctgtttcaaaagcaatgaaaaaaggaaaatatatttacagggagtctgaaaatgactgttcagctcatgtaaatatacttcctacaaatacctatgattgttgtctattactacaagaaaatagtaattctgttggcaaacggtggaaccctacagcaaatgatttaatggcgagtgactgggaaatacgttagtcaaggcccagtgtttttgtaataactttagctgcgatttcactcattatgtcaattgagacacttgctagtttggatgatattntttttgattccttccaattttcggatctcgaatattgtccaaatatttatgaccatcgaatgtaagggaagagatacatgtcatataaggtttgttagatgcaaacttaacatatccttttataagttgtgcatcgtcatcacctaatttggagacggcataattaatttcctctgaactatatttttttagtagatctgatttaaatattttatcaccaaaagccggttcattgtacggaaggctttcgctaaataataaaatatcacgaatacaatcatgagacagtttcatatcattcaccaccttatcagttatttcagcagaccacttgctgataaggaaattatatcaaaaaaagaaagtgaggtaattaaatgtcacaagatttagctattgaagtaagggcagcgctaattcgtgcaaagaaaactcaatcttggttagcgaaacaattagggatttcaagtccgtacttatctgatattcttcatggtcgtagacgttcagaagagcaagttcggaatatcamaaaaatattagatattagataggaggtgtaggtaaaagtggaagaagcgattatcaaagttgacttacaaaacttaaagaagttgatcaaacaagcaaaggagcaagctgaccaacttcaaaaaactttagatgagataaataaaactaaaatcctaatttcttagctacccattctgatccagcagcagacttcatatcttcccacgaatcgaagtttgtgtttgagctaatgaaattatctaatttattgtcatctattgattccatatcagagaaatcaaatccggatttttcaataaactcatcaatattagagaatttagtattttcaatcataaattttttagtgaatagtttatcgaatggtacagaatgttcgtcatctaaagactcgccatttttagcaaattgatttagctcatgttgtaattcgtcaaatccatttaattcgaatttcataatatttcacctcgctttcaaattcattttaccaagaggtgaattgtaaaacaatcagtataggaggtgatagcaatggaagtgattttaactccagaaaatgaagcttctctaagagattttgtacacggaattattgttgatgaaatagaaaaagcacgaagagataccgcagttgataagcgagtcttaaatcaaacagagrttgcaaaatatttcaatgtttccacaacaacaataagggaatgggagaagctaggtcttccacatggatcagtaagtaaacaagggaagttctacgacaaagaagggtgtcggagatggcttctatcacaaaaaagataaatcttgggcaagcgaaatcaagggaggaaataaatatgaaaaaaatatatcacttaagacgtatggcggcactgttggttgtattcggactaggtctattggtaggtggcaatattggcccattaatccaaaacatatatatagcagcttttatcatttggttgctctactacgatttagcgttggaagatcgagaagaaaaaaaacaaaaataaagacccacttcgacggccatcaaagtaggtcagttacaaatatcaaattcaaggagagtgtaccacatgaatagaaaaattgaaagaatgattattgaacttgaaaaagaatgtaaggcacagaatgttgaacttcttttatgtgctacaaattttgaaacaggccaaggaagtactgcgttttgtggttcagttatcggtttagctatactcttgcaaaaacttgtaggtgatctaaaagagcaattaagtataagcgaatcttgtgattgtccagaatgtgtagcagaaaaagccgaagatgctgcaaatgaaaaatctatggatgaactactaactgcatttttacgaggtgaactgcaatgattgaagtaagaggtttaagtgatgatgtttacgaattaatgttagcgaatgctcaaaataggattattcaatcaattcgaactgcagcagcaaatggtaatacaagttgcgtagtgaatagtaaaggtcttacatcaacgtttttatctcaattagaaacagaaggatttgatcacgttgaacttgaagaaaacaaaacgaaaatattttgggagtggtgaaaatgcctgaatttgattcattaggggctagacaagaacctccagaagaaaaagaagcattagagccaacatgggaatatgacgaagaagaggagaatgacaatgagtaacgatttaacacaaataacacaacgatctttagatgaacaagtcatcggaaatttgaatagattgcaagagcagggattagaaatgccaccaggttatagtccacagaatgcattgaaaagtgctttctttgaactaaccaacaattcaggaggaaaccttcttcagttggcagctaacaatccagaaactaaaacatctatttctaacgccttgcttgatatggtcatccaaggattatcgccagctaaaaaacaatgttatttcatcaaatatggaaataaagttcagcttatgcgctcatatttcggaaccatggctgtattagatcgagtaactggaggggcagatatcacgcctgttgtagtaagagaaggcgatgtatttgaaattgctatggatggtcccgacttagttgttgctaaacatgaaacggccttcgaaaacctagacaacgacattaaggctgcttatgtggttattaagctagcaaatggtaaagaagtaacaaccgtcatgacaaagaaacaaattgataagtcatggagcaaagcaaaaacaaaaaatgttcagaatgattttccagaagaaatggcaaaaagaactgtcatcaatcgagctgctaaatatttaatcaatactagtaacgataatgatttatttgtgcaagccgctaaagacacactcgaaaatgaattcgaacgaaaagatgtaacaccagagcgagaagagcaagctgcggtacttgaagaaaaactattttccaacaatataaaagctgttgatcaagaaaacgagaatgaacgaattacacgtgtagctgacgtaccagagcaacccgatattgaacaagccaaaccaattgaaaaagataatttaacgaaagtagctgaccaaattttagaagaaccagttcaagaaactttagatgtgatggctggttatgaaaccaatcagaaagagagtgaagctgatgtctcaacgattgaagaagacgattatcctttctgatgaaaattattattcacaagaagcggacctagcttatatgtctgtctctcaatataaaaaatttcttgaatgtgaagctgcagctcttgccaagttaaaaggcgaatggacaccagaaaacgatcctaaagcattgctagttggtaattatgttcattcttactttgaatcaccagaaattcatgaagcatttaaagaagaaaataaaagcaagatgttttcttcaagaaaaccgtttggcctactgaaagatttccaaattgcggagcagatgattgaaagattaaaacaagaagaagcctttttaaatatttatcaaggtgaaaaagaagtgatcgtcacaggtgaaattggtggtgcaatgtggaaagggaaaattgattgtttgaatttagaagaaaagtattttgtagacatcaaaacaaccaaagatatgcatgagaagaaatgggatgaacgtttaaacagaaaagcaaacttcattgaacgcttcggttacgtgttacaaatggctgtttattgcgaactgcttcggcaacaatatgacaaaatttttcttcctctcattgcagccgtttcgaaacaaacacctagtgaagcaaaactaatcactcttagcgaagaaaaaatgatttacgaattagaagaattaaaagaaaacatcgagcatgttgtgcgagtgaaaaacggcgaagaagaaccagttagttgtgggatttgtgaatattgtagaggacacaacaaaattacaaattttaccagtatggacgatttataaaaggaggcgagcaggttggccattggaggttggataaaactttataggaccattcaagatcactggatttgggaaaatcctcaataccttaaatggtggcttgatttaatattcatggccatcaccagacagaaagattctttttgatggagagttaaaacggtgaaagtcggagaaagawttacatccgaaaaaaaactttctgaaaggtgggaagtagccgaaacaccgtcagaaaatttttagatttgcttgttaaagatgacatgattgaattaagcagaagtagacaaaacgggacatggtacaaagtcagtaactacgcagaatatcaaaacttttctgaaataaaaaaacaacgaactgaacaacgaagggaacaacaagctgcacatcaaactgaacaacgaactgaacataaacaagaacctaaagaacctaagaacctaagaaataataataataacaataaaggggcgttcattcgttcaatttgggaaaataacggatttggattgatgtcgtctaaaaccatgaccgattttgattattggatttctgattttgaaaaaatcggagctagtcaaaaagaagctgaacaattaattgttaaagctattgaaattgctattgatgcaaacgcaagaaactataactatatcaatgccatattgaaagattgggaacaaagagggttcaaatctgttgaggaacgagaagcggcaaggaagcaaaagaaaacaaccaaaaaacagaaatcaaacacaggtcattctgattacgatgatcttggattttaggaagtgaaagaatgcagtcagcatcagatggattttcaaaaatgattaaaacgttgctttatatcacgcctgatccatgtccagagtgcggaggaaatctttatgcttggcgtgcaaaaaacaaagatgggtccgataggtgtccgccaacttgcatggaatgtggctataaagcacgcaaaaaagcagaagaccttgaaacagagaaaatgtttaacgatagtttgaaagccagagcgattaattatctgaaatatagttcgctttacaccgacaaaaatttaattaattgtcgttttaaaacttacaaaacagtagacacagaaactaagcttgcttttgaaattgcaaatcgagccacaactgaaattcttttgaataaaccaattcatatgattctttcaggcaaaagtggtgttggaaaaagtcatttagctatgtcaacggcttgggaagtgttggagaaatcaaactatgataaacgctgcttatttattagctatgcggaactcttagaacaactaaaatttgcgatgaatgatgagcaagccagaaaagagataacaggtagtttgatggcagaaatcaaaagcgcagatttagtagttctggacgatttaggagccgagttgggagttaaacaaattgatgataggaataaaagtactaacttcaataacgacaccttgaatcgcattgtagaagctcggcagaataaagcaactatttttactacgaacttaactggtaaagaaatgagtcaagcttatggggagagaattctttctcgtatcatgagtaattcacaaggttttgtgatgaaaattgaagggacatcagacaaacgagtagcaggcatctaaaatgttatttttagcgaatatattcagcgtagagcggttttacaatcaagtgaatataaatagatacaaagaaagaaaaacggattaaaacgcattttaaagccttaaaaacaaatcgatagaaaggggaatcattcaatgccgtatgtagtgaaaatttcagcctatcttggcaaagatggtcgacctgtagccaatttaaaagatgctgtgctatttgagcaaaaagagacagcagctattgcaacaatcgtatctggcggaaccgtttcagaagtaaaggaagccattataataccagaaaaaccaaagaaacatatagggaaatctattaaacggattgataagaaggaaccgaccgaaaaagctaccaaaagtaatcaagcctggatgaaaggggctaaataagaatgaagtgtgttagatgtcaagatcagcgcgtgatttggggcaaagacagatttaattatgcaacacctattccatgtcctgaatgcaacaaagatggaaaagcagttcgagcggaaactgcgaccaaggaaagggagttaaaacaatgcaatcaccaacagccctgaataagcgaggaaacaaagtcacaattgatggttacacatttgatagccagaaggaagctaacttttatacaaagtttgtcaaaaattgtgggttaccttttgaagttcatccgcgttttagactaaccgaacttacaccaactgcggatggtataggcaaaatttcggcgatagcttattcacctgacttcatcataaaaaacttagatgggagttggagacatgtcattgatattaaaaactcttttggcgtgtatggtattgaccaatccgttaagcttcgttttcgtctatttgcccttcgatatggtcatccagttgaagcgattgttgttcgtgctagagattttaaagtgatcactcaaggtgtaactaagcctttaaacgaaaaaagaccattcataaccgataatttcgattacgaatggaaagatgcaactaattattaaacgaaagtaggaaaataaaatgacaaaacaagtaaatttcagaccagaagtgaaaaaagtgacatctaaatcaaacggaaatatcgaagtgctattagtggttagcaacgcttcattaaaagggaaatatgaaagtttaaacgaatttttaggtaaaacagtatcaacgaccattgagccagaaacagtagaatacaaggtaccagttaacaagcrgaccawtaaaccgnatgtcgaatatattgygmntaacgacggaacagttgaagttctaaaagaagaacaaacttctttagaaatgggcgatgatgtgcaagaagttgaagaagttgctgtgcaagtatcgaaagaaaccattgacgaattcatcaagaaggcaacaacaatcgaatggccagaatcagtaacaatcaacgttcgtggcgtgttgcatcgaatcgatgaaggggaagccttagaagaaattgcagctgatcatgatgtttcagttgaaaatctaatcaaccaagttgaacttgcacgccaacattttgcaccgtttgcagattcttggagcaaaaataaagagaacatcattttccctgaaaagacagttgaagatgatgaagaagaaatcgaataataatctcgtagaaagtgagtgttcattttgcttgagatttattatacgccaacatccgcaattattgcggatgcactggctaaaacatatgaagtcgtttctttagaaacagctagaaatattgccaagaaatttaaggctagcttgaagcagaaaacggatctttatgtaattgagggaattttgattgatgctggttataaaaaagagccagtgaatttatagaagggagtggaggtttgcggccgcgattaaaaagctttttactccgttgagattatgaatatttaccaaaagaaaatgggtaaagttatgaaagtcctttgcggtaaaagaagtgaaaacattgggtaaataaaaagtgaagaagagtagctttttactactcttcttcgctagaaaaaatttttgaacagaataaaaagccaaggtcagttacatgtatggagccacgaatacttataatgctaaaccctgtatctttaaaaaaagaactgtttgcaaaaaaactattaagattatatttcaaagttttaaaataagttgaattttcaaaatcatcataaatttttgtatgttttttttgtgttaattcaatagaaggtcttatatcaattaatccataagagcgtaaagtttgtaaagagggacttaaatcagaaaaattattttcaacaattcctttctgagtaaggattaaattttctatataatctataccgttaccattaggagcctgtactctaacctttatagttggggtaatactaagtttatacaatttttttaatagatttgcatctatagtcgttagttcagataaaataattgaaaaccttggcgaagaatcttgattttttctgttatcaactaatccagcaagtaaattagaaaagtattcacgcatatcttcatcttctaactgatatctagcgtcttccattgtttttaaagcaaaccctaatttcgaatcatctctgttatctacagggatactatcggttttagaattaatcttttctacaaaatcaatataagatttttcactaacaacatttagttttctaagaggacctacaacataatttacaatcccgccaaggccttctccaattgattttgtagcaggtccaaagagattagttatcaattcctttggtaatagttcaatgttaattaaagattttttatcgtcagacatttaaacatctcctttttcaaaatattataccaataaagaaaggaattttctatgcaacttagaccatatcaagaagaatctcgttccgctgttcaaaatgaatgggagaataagaaaaagaaaacatcattagttttgcctgcaggatgaatctgaatgaaaatatattgatatgaaagttcaaaaaatactgggtgttggacagaaggcctagatcactcaaataaaaaatttgaaaaggaaaaaggctacttgatggttgacgatcctgaggaagatgaaacagtaaaactagtcacaattgaggtgataaacgttttaaaatccttaagaatgaccgtaactatcaaaaaggcgatatcttacgcttaaacgaatatcaagacggacagtatacaggtgatgttcatgtctcagaaataacatacattacagattatactcaacaagatggttatctagtgttaggaattaagtgaggaggattaataaatggaacaattcttattaacaaaaactggtaaaaaacaaattgatataaagggtacgggaatggatcataacgaaattgtctttacgttagctgctactttagttggatatagcaaagaattaggcctaacaaaagcaatactaaacgaaagtatgtacgtgctgtggaaagatggtgaataaatgaaacgtaactgtaaaagtgtaataaataaagttagtggcattgcaataatgattcttgtagcaaaagcaaccgtgagccatttcgtgtatggaaatgacataacaagcagtgaccttgtttatttcctttcatgctcgtttattttgggattagggctatatttaggaggttccagtgtatgagttatccagaagtttatatcataggaaggcaagtcgatggcgtttatgttgaatacttacatggagcagagcaagccgatttatttttcgattatacgatagctcgtgatgaaagaaatcatatgaataaaaccaatatgaaagatggtacttggaaaattttgaaatatggtagaccgataacggtcgaattaaacaataaaaaagccaaccgaccaatggttgactaagaagaatattttaccagaaaagtggtagcttgtgatatgtgaggttactttgccccaaacattggtcacaataaaaatattttatcatgagtaaagaaagctgccaacaaaaaaagccggatttctccgactgtggataatgtgtggataaccttgtggaaaagtcgttatcattataccacaaatcacaaacgggggaatcaaaggatggtactttttgacgtaaaganatatgaaacaccggatgcaaaggacgtagatatggagcaaactaaacataacgtcagtgtgttcctgtctgcctatcttgctgctagatgtcgtgttggccagccgagggaaccaaaagtaacagcttcattctctttggttccaccatccacggccaaaaacacttttgaagccgagcaaatgttaatccagaaagaagaagcccaagaagagtttgattatttgcataagctttttgttagaggttattctgcgattcagcatccgcacaaaccagatgttaccgagcgaagaaaaagaatcttctatgatcgatatatcaacggtaatccaatctatctagcagcgcaacgaaactgcatcagcgaagaatcagtgaaacaagaatctaacatgattattgttcaatttgcttcagcgctggaactggttgcttttaagtagccatttattacactttttatacctcttttatacactttatctacacttcatataccttctaaacgagttattatgatagtgtcaaaaaaataagaaatgcgacacacttacacaaaatttaaacggaacgattgcctacttatttttttgatttgagattacaaggaagtaaaaaaattctactttcttcgtttagtcacttgtgatctcatttaaattctctcgcaaaccaccaattataaaactaaagaagtgaggtgaatttcctctctcttttttctacaggtttgcgagagttaatggagcatagcttaatcggcagagcagcggtctccaaaaccgttggtataggttcgagtcctattgttccagtaagtggcataagctgcttaaataaaatagatcgtcaataaatgttcggacaaacaaattggcgctactacctttcactagggctgcatttatatgcagtcctttttgttttaagtgtagtagatttttcattttgaaaggggataagtaagacaatgcgtgtattaattagaagttcagcatctggttcagagtattgggataccgaagaaaaaagaaatgtgtttgtacctaaaggtcaagaacctgattttgaagttactgaaaatcctgaatcaatgctaagtaaagaagctgatttacatgttggtggattaccaattactgtagggaatgtaacgattgatactgatggaattaaaggcgaacgattattaacaactgcaagtgctgctgatgatgaagaacaagatgagcttgttccgtctgatgatgaatctgttgtattagaagaaatgaatgtaaaagaattgcgtgaatatgcaaaacgaaaaggtattgagattccaagtgctgtacgtgcaaaaggtgaaattctcaatattattaaagaatctgaataatgcgctattgccagtttgaaggttgctctaatacaacagaaaaaggagcttattgttccgaacatgctaggaagtcaagaaaaaagaaaaagccaatcaatgtttatcatcatgataacaaatcattttatcgaacaaaagaatggcaagatgtcgctgactttgtctatgaaagagaaggtggttgctgtcaaagatgtggccgttttgtatttggaaggcaagcgcatcggcatcatgtgattccaatcaagaagaacgaaatgctcaaacttgatccaaacaatattcgtttgttgtgtccgaagtgtcatgtgattgaagaaaatgaagcagatgagaaaaaagtttttccatcttattttaaaaaatgaagcccccctatcaaatctgattcaaattttttgtcgggggatagggtagggggcagtcacgcgtgtcgttaggtcaaaaattttaaaaataaaaggggggtgtataaaaaatgaccacaaaagcgcaacgcaaagcgattattgatgaaaaagttaatcacgaaaaaacgcgaattttagaaattatgcgcaagtctgatttatacactattactcttgatccattgattgaatcatacttggatatttttgaagtttaccaatacaaatacatgctgtggaaagaaaaaggatttcccgaaacccaaaaaacaacaaacaaggytggagmtaytaacaatagcaagcatccactagcgcaacaagtcgaagtttgggccgataraaaaatgaaagcattggatttattaggattgaccaataagtcaaaaacaggcagacaaattactggtggttcaacagctagagcagatgnagaaatgaaacggccagaagaaaagcctgtaaatgaattggcagaacatcggaaaaaatggcgtaaaaaggcagggaatgaaacatgattgaacctggtgtaaattatgctgatttatttgcgaaagaagttcgaaaacatcctaagaaatatccgaaaacggttcgtttagcaatagatcgttggtatcgatggaagaaacgaaaagatatttggtttgatgttgatcgtgcaaatgaaatgatggactgggtagaatcttttattgttcatacaaaaggcgatatggtaggtaaaccatttcttttagagccatgggaaaaattcatttattcttggatttatggctgggtaaaagaaaatgaaaaagggcaagtagtccgtgttactcgtgaggcatacgtacaaataccaaagaaaaatgggaaaacattaatagccgtaggggcgttgggatatgctatgtatggcgaaggtgccttatctgtcgattgctatgcatgtgcttctgattttgcgcaagcccagtatgctgctaagccttttgccgctactatcctaaataatccagtgctattagatgggactaaaatatttaaaggtccaaaaggcaccgtttcaagtattacgtatgactatttacatggagatatggcttatacaaataagtttattgttcagacaaaaaacattgataacatagaaggttccaatccatattttgttttaaatgatgagctgcataaacaagagaaaatggaacagtacgataactttaaatctgcacaaatttcattgccacagccgttaatgtttaatatttctacagctggtaaaggaagtagttcggttggtattcgtgtttataaagaagcaaaagaagtcttgaagcgcgatgataatgattcaaactttgttttgatttatgaaccaaataagggatacgattggacagatagaaaagtttgggaaatgtgcaatcctaactggggaatatctgttgatttgtctgctttagaatcagcctttaaaactgcgcaacgttccgctcactcgaaagctgaatttttaacgaagcatttagatgtgtttgtgaatggtgcagataatttctttgaacaagatcaagtggaaccgtgtttggttcccacaaatgaattaggtaacttaagtggtgagccatgttggattggtttggacttatctaaaagtcgagatttaacttgtgtatcattaaattttcctacatgggatgccgaaggaaaagcgatactcaaagtaaaacaattatattttattcctagtgaaaatattgattttcgagaaaaggaagataatgtgccatattctgaattagcagaacaaggatttgttgaattttgcgatggtaagttaattgatcaagaacaaatatttcattttattgaagattgcatggatttttatgatgttcaacaagtcaattatgatccagcgatgagtgaccgattagttgaaaaattggaaaatttaggcttggaatgtgtgcaagttgatcagtacgcaagagtattgaactcgccgcttgaagatgccgagcgattattttatgagcaaaggattatgtttgataatcctttatttttgtattgcgctttaaatgtggttgtcaaaatggattttcaaggccgtaaagtaccaagtaaaaaccagtcaaagagaaagattgatggatttgttgctttcctttgtgcgcataaggaaacaatggatcaaatgattgatgtcaacgaagatgatatggatgaatatttagattctatctatcgataatagagaggcggtgagattttgaagctaagagatagactttcaaatgcagtctatggatttttggaaaagcgtggctggattgaagatatttatggcaatgtaacaagatattcacaacgttttgttaacgattcttctattatggaatcgtctgatgtttatgaattggtacaagatatttctaatcaagttgcactagcagaaccagtagtaattgggcctgatggcgaggaagtgaaaaatcatttcttgttaaacatattgaaaaatcctaatgattatttaactggttttgaatttgcaaagcttgaaacaaatacattgttaatcaatggagaagcttttcctattacagataatgaccagttacatttgggatatggtgttcaaacgaaattagatgatcgtttgattgaaagattttcaatgaatggccaaccaataccagggagtatgattcgtcatataaaaaatattggtgtggattccttaaaaggtgctggaattattgatcttgcaaaaagcacactagaaggtgttttaagtgctgaaaaggttttgacagaaaaatataagaaaggcggcttgctcgctttcttgttaaagctggatgcgcatatcaatccaaataacagcgctcaacaaaagatagtaaaagctattttaaatcagttggaagaaacgcaagataatgatagtcattcagttaaaatgattcctttgggcaaaggatactcaattgatactttaaaaagcccaattgatgatgcagctattcttaattatttgggtgtttacaaaaaagacctaggaaatttttaggaatagatgtaaatacttatcagcattaatgagaacagatattgnaaaagcaatgatgtatctgcacaacaaagcaattaamccaatattaaaaaataagagcgagcattactcggctcttttttttatgcctaattctggttatcgagtggaatggaaaattaatattttggactttgtaccttattccaccaaaacaaatattgggtacaacattgttcgaactggtattaccagtcctgataatgtggcagaaatgcttggttttcctagacaaaatactgaagcaacacaagccgtctatatttcaaatgatttaacggaaatcggcaaaaagaatgctaccgataactcattgacaacagaggatgacttgaagggaggtggtaagaatgaagaaacaggaaattcggacatttgacatcacaaaccttaaaacaagaagcgaagaagatagtcaaacacagattgttactggttatgcggcggtgtttaatagtccaacagaattatgggaaggcctaaatgaagtgattaagcctggagctttcagtcgtgctttgtcaaattctgatgttcgttgtttattcgatcatgactggggcaaagtattagggcgcacaagaagtggaactttgaaacttgaagaagatgataagggactacgatttgaagttgagttgccccaatacaactgttgccaatgactkgattcaatcaatgtcacgtggggmcattawtcagtgtagctttggtttttatccaacggaagaaacttgggattatagttcagacccagttttaagaactatccatgaagtcgaattgtatgaagtttctattgtttctttacctgcttatgaagatacagaagcagcactatcaagaaacaaacaagaaatgaagcaagatattaaaactagaaaaaaattaattgaaaaaatcaaaacagcgcttgaagcgtaggaggaatttattatgaacaaagaattattgcgtcaattacaagctcgtcacgagaaacgattaagtgatttacaaggcaaaattgaatctggagaagtgcgtgaagcagatttagattcagttaatgaagaaattgatggtttaatcgatgaattaaaagccattaaagctgaattaggggatgataattcagaatctggtgatggtgaaggcgatgacgggaccgctaaatctgataatactgatgatgaaagtaaagaagatcgtgagaaagatacgaacggaaacaacgatgataaaaacgaagaaaatcgtggcggcatgattagccaagaacagcgtgatggtttgttacgcacaattcatgaaggaatggaggctagaaatgtgatgtctaatgaacaacgtgaaaaacaaattcgtaaagcatttgctgattttgttattggtaatatttcagaaagtgaagcacgtgcattaggtattgaaacaggcaatggttcagtgacagtaccagaagtgattgcatccgaagtgatttcttatgctcaagaagaaaacctattgcgtaaatacggaactgtgattcgcacggctggcgatgtgaagtatccaattcttgtgaaaaaagcagaggctaatgtaaacaaaaaagaacgtacgacagatattactgaaacagcgattcaatttgatgaaattctacttgatccagcagaatttgatgcattagcaactgtaacgaaaaaactattaaaaatgtctggtgtgccagtagaagatattgttgtagaagaattgaaaaaagcatatgttcgcaaagaaattaattatatgtttaatggcgacgatgcaggaaatgaaaacccaggagctttagctaaaaaagctgttgcatttgaaaaacctgtagatttaacagctgcaggtgctggtcaaaaattatatgatgcattgattgaatttaaaaatacaccagtaacagaagtaatgaaaaaaggtcgttttattattaatcgtgcagctttaactgctattgaaaaaatgaaaacagatgatggattcccattgttacgaccattcacgcaagcagaaggtggtattggttatcaattagttggttatccagttgattggaccgatgcagcagataaaaaaggtgaaccagatacaccagtattatattttggtgatttttctgctttcaaaattcaagaagttattggagcgttagaaattcaaaaattggttgaaaaattctctggaaaaaatcaagttggtttccaaatttacaacttgttagatggccaattagtttactcaccattcgagccggctgtttatcgttatgaaattacaaaaccagtaggtggttaatgtgaataacgaagctgaaacattatctttagaagaaaaattcaaagcacatattcattttgaagaggggatggatgattccatgctctctttttatttaaatatggcaaaaaattatgtaaaaactgcaactggagggcaagaagaatatttaattttgatggttgctggtatgcttatgaatatcgtgtttcagaagatgaattagataaggcgttgaatgcgatcacgccatttatcatccaaggagtgattcaacatgccgaagaggcagacgaataggtttcgatggaaagcggacttgctaaatgtaaaagaagaaacagattcgaacgataaagtagttacgacctataaacttaataggcttttatggtacgaagatattggagtaactgcacaagaaaaatatctttcacagcaagccaaaacagacgttgtcagacggattaaagtgagattggataaatctatcacagaaaagtttagcgctgttagaatcgattctgtgacctataaaatcactcgtatttacacaaatatggataaacgagaaatggagttgagtttggcttatgtcgattagttttgaaaaattgagaataactctgaaatcagtaggcgtacctgtgacacgtgataaagcggaaaaaggaacggactatccatatattgtttattcaaatgttagtcaaggtaaaaaaatggcatcgtctaaagtgcatagacgaatgccctactatcaaatctctttttatacaacaggtactgaaaaggatttaattgctttagaaaatgcattggaggaagctggtattccttacactgattttgtaggcattcaaggcgatgaaaatgatgatactgtgacaaatttttacacatatgtgaggtgtattgaagatggaaaataataatggttttgcagatatggcagactatttaggaaagctttcgcaagtagatgcgacaaaattatcaatagaatcattaaccgctgcagctaatttttatatggaaaaattactacccaatatacctaaatcgcttctaaaaaagaagcacatggttgatcaagtgaaagtaaatattaaagataatgaagtacaagtagcttttgaagatacagctttttattggcgattcgctgaaaatggaacagtaaatcaaaaagcgcaacattttgccagtggaacatttgaacaaaataaagatcaaattgaaaaaattatgactcaacaaatattagatttatggaaaggatgagtaaattgggaaaacaagatgtgtattattttgaaggcttagatgacatcttaattgccatgatgaccacaaaagatgcagtaggtacagaaccagcatttggcgaggttgttcgtttgccaatagccacaaaattgggaattaaaggaaatggaacagctttagaaaaatgggcatcaagtaaaatgttccgacgcgtaagtcgtgaaacgaaacatgaaattgcgctagatcatgtgggcattcctattgcggtgatggatgaaataaaaggattaatcgctcaaagtggagtgacttttggtaaaaacactgcgcgagaatttccttattttgcctttgggtttatcggaaatattgaaaatggtggaaaaaaagctgtttggtatcctaaaacgcagttatcaaatgttattgatgaagaatacactactgcagaagatgaaaccaaaattgatgatgtaactgctaactttgtttcaactggtttaacatacaataatgttatgtattcaagttttgattctaatcgggatagtgcttcaatagaactatttgaaaaatttatcgcacaacctgtttatgacgaagaacaatggaagaaactagcaggtccttcacgtggaggtggcagtgaataatggcaaaattagcggattatgggattgttatttcagatacacccacagttactattcaagggcatcagtttcccattttgttaacgatggaaacaatggagtatattgctgatgtttatgatgatgactattcaaaatttgaagcagatatgaatgaaatgattaacaagagtggtggtcgtatttcatcaaaagatttatcagcttctgatttaaaaattatgcgtgcattgatttacggcatgctaagaactggtggattggaagaaacgccagaaaccatttttaagtttttaggtatgagtgccacaattgttgaaatttatggtgcatgtatggaaatatttgcaaagcagaattttcaagttgaagacttaaaaaaatccaagaagccacaagattatcaaactccgaaaaaaaggaaaaacaaaaagaaaaagcctcaacggaaataggaacgccgtgggctttttatttatatgtagctctcactcttttgggatggagtgaggacttttttttaaaagcaactcccaacttgtggcttaagtcatatattcagtggttagtaagtaatacggagtttgaaccacccagaagtgtgacaatggataaaagtccttggtggtaggaaaggagcgctaacgtgtcaaaacaagaatccgatgttgtcttaaattttaagatgaatggagaaataaactattcacgaacaattaaagacattaataaagaaatgaacttagcggctaccgagtacaaaaaccaggtatccgcaatggataaaaatgcaactcaaactgaaaaattaacagctacaaagaaaaaattagaaaaacaattatctttagctgaacaaagaacaaaattattacgtgaggaatacgaaaaatcagtaaaagaaactggtgaatattcagagcaatcacaaaagctgtataagcgtttattggaatccgaaacaggtgaaaataaactgcgttctgcattgcaaagtaccaatgaagctttgaaagagcaaggtaatttatcaataaaaacagctgaaaaactagccaaaattgaaaaagctggagacaaaattaaatcagttgggcaaaaactgtctgttggattaacagcaccaattatgggaattggtgctgcttctattgccgcattcaaagaattagatgaatgtttggataatataacaacagcaacaggggctactggtagtcagctagaatctttacaagccagttttaaaacagtagcaggtcaaatacccgcggatatgcaagatatatcaactggtattggtgaagtaaatactcaatttggcttaatggataagcaattggaagatacaacaggccgaatgcttaaattttcagaaattaatggctcagatgtttctcaatcaactattaatgcaaaaaaatcaatggacctttttaggttgtctattgaggatttgccaatgattttagattcagtatctaaaactagccaagatactggagtaggggtagatcagttatttgatgccgtaaatagaggtgcgccccaactcaaagctatgggacttggtttttctgaatcaactacgttaataggtcaaatggaaaaagctggtattgattcagcaggaactcttggctatttggcaaaagctagtgtcgtatatgcgaaagataataaaaccatgcaagaagggcttagcggaactattgaatctattaaaggggccacaactgaacaagaaaaactcactattgctagtgaagtttttggaactaaagctgcttcaaaaatggtagaagctattgatagcggagcgttgtcaatggatggtttagcagattcagcaaaaaacgcagctggcactgtggatcagacgtttagtgatattcttgatccaattgaccaagcaaagttggcacaaaatcaatttaaaatagcaatgggtgaacttggagaacaagtacaaatagcattattaccagcatttcaagctgcaacggatgcaataaaaaaagtttcagaatggtttggaagtttaacagatagtcaaaagcaaaccatactgaaaatagctggtgttgtggctgctatcggtccagtattagtagttttaggaacacttgctagttccattagtagtttgattccagttattgcttttattgcgtcgccaattggtttagtaattgcggcggttgccgcttgggtagctgcaatcgtagttgcatataataaaatcggttggtttagggattttatcaatacctcctttaaagtaattaaagatattgtggttggtgtatttaatgttttgaaagatacgacaaaatctacttttgatttcatcacaggatttattggtggtgccatggatggggctgcaaaaattattggcgattatgtaaatgaaattaagcgtatttttggcggtatcgttgattttgtaacgggagtatttactggagactggtcaagagcgtggcaaggtgttgttgacatttttggtggtatttttgaaggcatcgctgcagtagctaaagctccaatcaatgccatgattacgttaatcaatggatttattggtggattaaacaatataaaaatacctaaatgggtgccaggaattggcggtaaaggatttcatattggaaaaatcccttatttagcagaaggtggaactattctaaatggccaagccattgttggtgaagctggtcctgaactattaaccgctaaaaacggcaagacaacagtaactccattgtcaccagaagaaaaagctcgtggaattggtggtgctttgaaaggtggcaacactattgagcaacatgttcatattggccaagtagatgcaaataatccgagtgagttagatcgaatgaatcgcaagctttataaagcaagtgcgcaagctttctatgacttaggaggtgttccaacgtgatttttatgaatcctgatgaaccaaatttcatttggaaagatttgaatgcagttcgtgatatggggtgcattatcgaaaatgagctgtcagaggttttaccaaataaacgatatgaaacgtattcgattatcggaagaagtggtgaatttaatgaaacgttcaatgattatgaaccctttgattatgaaattgaagatgtaactattccatatgaaaatttagcggcagtcaaaagatggttaactggtaaaagtaaacttattactcacaatgatgaagataaatatttagatgctatttgtacaatgagtaaaccaacttcattcaaaaatgaatggggtgttttttatacctttaacgttgaatttagatgtcaaccgttcaaaagaaaagtaaacgaacaaccaaaagtgattaaaacaaaatcaattgaaattactgatcacggtgatgaaattgcttttccttatatcgaaattaattcaaaaggtggcgatattacgttaaacattggtagtaactcactaacgattttgcgtacacaatcaggaatcgtcactattgataccgaaaagggaaaagcaatacaagaaggaaatccactatttacacgcggcagttggataaaaacgaatcccggtcaaaataaattaaatatatcaggaaattttatagaagctaagttttggaataggagcgcgtatttatgacacaaaattttatttatgcctatactgctattcctgaaaatttaaacgataacggaatggctttgccagattggcaagatttaccagaaattaaccgtgtgttaaatggtgtgtatcgattctatggtaactatgcaagagatggccagtatcgctcatacttaaaaaaaggaaactttctaaaggcacaagttgaagatggatcatatcaatattttgagatttacaatattaaaaaaaatctgcagtcagtttcagtgacagcgagacacattggttttatggcaaataagaatttcattattgattcgttcactgctaacggaaatggcacgcaaattatgaataatttaaaggctgcattaacgtttaagcaacggtttaactatttgtcgaatgtcggtactacacatcaatttacagcaaaacaagtaggtccaatcgatgcaattattggttctaacaatggcaatcaaaatttaacaggtgttactggtggagaattagagatggataactttaatttgaaattagtaaaacaaattggagcagataatggctttagaattgattttggaattaatttggaagctatagatgaggactatgacgacgaatcaattataaacagtctttttcttatcggtggcgtaccagacaatgattatgaccaagataaagagccaatcacgtatggctttttagaaattgctggtgtaaatgatagtaacagaagaattggaaaacgtgaaaattcggaatgtaaaacagttgatgagcttaaaaaatggggccagtcattgtttgataaagaccgcattcatgaaccaaaagtaacgcacactattagcatggtagcattagaacacactttggagtatgaagacatgtacgaagagctttcttctttgcattttggtgatgtagtacatgttagagcaaaagaagtcgatattgaagtaacggagcgcatggtggaatatacttggtttccgactttaggcaaatttaaaaatattgttttggggaatgatttatcactttacacctcaacagtaaataatcaaactcaagagctaaaacaaaaaattgataatcgaacagaaacattagtacaaaatgttttaaatgcaacggcatggattactggaaacagtggtggacatgtcgtttttcgtccagaaaaggccccgtctgaaattcttatcatggacaaaaacaaagtagctaccgcaaaacgtgtgtggcgctggaacttaaatggtttgggttattcctccaacggcgtgaatggtccgttcgaacttgctatgacttctaagggagaaatcgttgctgattttattaaagtgggcattattaacgcgaatgttttacaaacaagctttaataaagcaacagacgatgtactaaaattagtagctggtgctttgcaaatttggaacaataagaaaaaaatcatggaattgactaaaaaagggatggaattttggaatggctctagtcatattgggacaattggtacgaaaggaaatccctttccaggggtagtagataaaaatggaaatcctgtagtttctgatgggaattcattgctattagtcgcagataatcccaaaaaaattattggtttgtctaaccaatcaggaacaggacatttaattactggtcctacacagttttttgttggaaataattttaacttttttggtccgaatggaagtaaagcaattctgacagttgatcgattgattgtgggcggcaaagaagttatacctggtcaaaatggtggtggcggttctggagctggaacaggtggttatccatcagaagttacaagcgatgcagataaatttgcttgggacttatggagttacctattagctaacggatacagcaaagcagctgctgcaggtatcctyggaaatgtacaaggagaagttggtccaagtatgaacccagataccgaacaaataggcggtccagcttacggatgggttcaatgggacggttcagcatatccattggtaggcgcaccaacttggaatggccgagaatatgtacaacgcttaatcgcagctgcaggtatcaaacaagactataggacgtcattagcccaagctcaattaattaattggtgtatgttcaatgggcaatggttaggacaagtaagtccattaacagttgatgaatttaaanntctacggtctttggttggtaacgttacttctgttttttcagaa

SEQ ID NO: 20 - DNA, 1260 bp; double-stranded, linear
acttaaatacaaatgttggtcgtgcacaatgggaacctcaaagtatcgaagcgcccaaaaatacgtttattactggtaaattagccagtgcaggtgtctcaggttttgaacctttggatgaacaaacagctactcgttggcacaaaacaaacattacaacaggtccccttgacatcacttggaacttaactgcccaacatagaactgcttcttgggattactatattactaaaaatggctggaatcccaatcaaccattagacattaaaaacttcgacaaaattgcttcaatcgacggcaaacaagaagttcctaataaagttgttaaacaaacaattaatattccgacagaccgcaaaggttatcatgtcatttacgctgtctggggcattggtgatacggtgaacgccttttaccaagcgattgatgtgaacattcagtaaaaatactcacatcttaaactaaattaaaggagttctcaaaaaatgaagctaaaaaaaataattcctgcttttccccttctttcaaccgttgcagttggcttgtggttaacgcctactcaagcttctgcagatgctgcggatacgatggtagatatctctggcaaaaaagtgttggttggatattggcataactgggcctcaaaaggacgcgatggttacaaacaaggaacatcagcatcactaaacctttcagaagtaaatcaagcctacaatgtcgtaccggtttccttcatgaaaagcgatggcacgacacggattcctacgttcaagccttataaccaaacggacactgccttccgacaagaagtcgcacaattaaatagtcaaggtcgcgcagttttattggcacttggtggagcagatgcacatattcaattagtcaaaggcgatgaacaagcctttgcgaatgaaatcattcgtcaagtggaaacatacggctttgatggtttagacatcgacttagagcaattggcgattactgctggcgacaaccaaaccgtcatccctgctacgttgaaaatagtcaaagaccattatcgagcacaaggaaaaaatttcatcattacgatggcaccagaattcccttatttaaaacctggtgccgcttatgaaacatacattacttccctaaatggttattatgattacattgccccacaattatataaccaaggcggcgacggtgtctgggttgatgaagttatgacttgggttgctcaaagcaacgatgctctaaaatacgagttcctctatnata

SEQ ID NO: 21 - DNA, 8188 bp; double-stranded, linear
tccaatggcttatcgattacaacaactggaagttcttttaaatcaagcttgctttttccaattagatacctatggaaaccatcawtaataatatattcgtcttttttatcatcacaatagcaaacaatcggttgtgtatatccgtcttttaaaatcgataattctaaaagctccatttcaggtccagcgacatgatttgggttataactattactttttattttctctactggaaccatttttacatttaaaacgggcatatcaatcttgttcattgatttctctcctaaaaaataaataattctttgtctctctatattgtttaaaacaataatgtttcagattatttaagtactggtctttttttaaagaaattcgtacacactttttttcacatttcttgtctatgaaaaataaaaccttctccaataaatactttcgagtatcgtcattttcatcttcaacaaaaacatctccaatatcaataaactcattggaaatttgaatggaagaaaatccaattatcctttccttattcattaacaaaaaccaaatagtactagatgtatttattaaataaggtaattttcttctatatactctttcagcaaaatatttccccattaaactgtaaaaattttgtytattgtatgggggtatataaactttaatatctattttgctcatttcattcctcctattttttgtacaatattttcgtatttctttccttttaattgatttatccccaaaaagtctttatattctttaaacatttcatatagttcagcttcatcttttttcgttaaactataatttctagtagataaaacaaagtcatttttttctaaagctttagctatccctttccagtcattccaaagcctttcatcttttatccaatcttttctttttgattcatctggcatatcttggatatccatattatatgtattcktgtaataagcaaaaagaatacatatctttctgtaataatgattcattaaaagaggagaatataatcctaatgtttctagtaaaaaaatagaatatctttgccaagtcataaatgaaggtttttgagaagtatttaatcctaaaagactagttttaccatatatatttccaaaattaactccacttactctttttactaatttatcccatgtttcaggttcaagttcagcaaattgatttaacgcttttctttgttgtaatccgaaaggctggcatactctcatgtcccggtacttatatccaatcttatacattttctcatagatataattatattctagttcacatttaaaagttgcagcccaaatgtcaccaactttccaatcaaataaaggataaaacaaaatatttccttctaaagttatatttatccaacatcgattcttatatttattttcaccttttgtaacagcactatgtctgtgtaaactttcttgtgcccttatacctacaccacatgatatagcactttggggatattgttctttataccaattttgaaaatagcgaagaaatctgtcgggattaccatttgataatgaataatatttttttaaaccgtcatcaatattttccaaagttatggcatttttaggaagagaatgaatccatttttctttttcgcttggatcccacattttccattgaggttgaaaaaaactagtgttgttatcctcaaaaaaaggtaagcaaaaatgataaatattttttactctaggtaactgttcaattttttttataaaatcaacagttgctgtgtaatttgcttcaatatttaatattaatagatcaaaatttctatctaatttttctgcaactagattagctaactgaaccattagcccactatccttaccgccactaaatgaaaaatacaccttatcaaattcttcaaatatgtattctaatctctttaaagtagcatcaaagacattcattttccatcctccctaaaaaataagcatttaatatcaatggtaatacattaaaaactttgtcaataataaggatatattccaaaatccattcattggaaatagagaccttctttattaatgtattattacttacatagcgaagcaatacaaacattatccaatagtttcatctacaaaaaataaattacttttaaaacatcttgattatgaattcatttcccaaaggccttttaaaattgatacagatgttcgttcactttttttagacttattgtacaagtctttttaatagtcccagaacaaaatagtttgtttatccagcttcaaatcattaaaggctaatgaacggtttattttttcgattactttagataaagctacagaaatttttatattttcacaatgctcagtttgaatttcaataattatatcatcaattagtttttgaatttcttacctatcaacatattcagtcttagaaagagaatcttttaaagctactagtgattcaacgatttcagacattttcttcctcctttctagtggcctgtaaaaccgtgtagaacagagtccatcgaaccggtaattacactatctacagcgccattccaatttactctacattttcatttttcagatttgtcagcccatacagatagcctttttgacgttcatattcggattataccattcagccgcagaagcagattcgctcgacacaaacaatcccataccaacaaaaccaatacacatcacactatagccaactagttttttcctctcgkatccatctcctaaaaaatagaatagttcttgtaattattcataagatatacttttccgttttttatcctttctgctttataacaacttttttcaagtaaagaatgacatacttcttcttaaaaaaacagtctgtttttttctattttttcggtgtataattaatacgaatgttcattttttgttttaatacgcactccgtacataatagatcttgattgcatcaatcttttgtactttttgatttatcttaagctgaatgaatagaaacctagttaccgcattacttttttgttctccaaataacaagtaatgatccgtttgggttatatcttgtgaaacattatgaatacgaccaatgtttttttgttgtacatgtggatcgttgtcaattccattttcttttatacaacaatcgattaaatagttttttacggattgatttcgttcgtatatgtccgtgtaatttacccattttcttccaaaatcctttaacaaatgttgaattacttcaaatatgttggattttattttgttttcctgatttcttttactttctatacttaaactttctgcttgcatcatcgtttctcttgatattgaggaaactgctgtttttttcttcagaagaaacccacctacaacttctaaggacaaacaaaagcaaccaagaaaaaacaatactttttcacaattgtttcatctcccttttctactaaaaattttcattgagagaattcttttatttggctttacgaatcaaacttcgaattttcgtttggttataggtgcgttgatacagtgctatgattccccttgcttggcgttctgttccacagttgaaaaataattctcactatctgaaacatccgttatgataccggtgtgtccatagattccaggagacaattggctttaccagttggccatgaaaggattcttttaaacgacactgaaataaaagaaaagaagccaaataattataaggcttccttccttgaaattgttttcgtgtcattgaaaaagcaaataaccacggacaaaaaatttgtcgagtaatcgtatgttccatatcaaatggaaaaattcgaaaaatcccccccaaaaaagccaatcctaaaccataccacaaatgtttgtgttacgggacgaggtaacgcgaccccgtcccacaatttataaaacactcgctctatataccaaatctttgtccaattgcgtatattgctcattttatcgcccccatgaccgcatgcgatccagaatccaattgaatactccagacgtatctccaactaaccaaacagctactgccagcacaagaatcaatggaatggctttgcttgcttttcgttcaaaggcaatataggccgcaccaccccaagcatcgccaatataatcaaataattaaaatccccaacaaaattggtaaacacattttgaaaaaaatcatttgcttttttcctccctgttaatacacattgaactaatgacaatacacatcaccacagagcacaactgataaaaatttcacttgatattcctcattatgcatttgttctgttctttgattgctgtttttacgtaagaattataaataatttctcacacggcgatacattattttcacaggaacatgcgtacaataaatccggttctgcgtacttttctttgttttaggatcaagtttcatagaatagaaatcataaaaatatttaccacttttttatcatatgttccttcgatcactagtgaaaagctagggtggtaaatccaacaaatataattgatacttccctctactggataaagggacaaaaccaagtacctttaaatggtctgatacagtcataaacacgatctatctcctcccaaataaaacaaaaaaaggctgtaatcgcattttgattacagtctttttttgtaaatgtattaattaaagctttacttccggtctttttatttaatgactttagtcagttgaaatctctaaagagatttcgacaaaaaaaccacgcgtaatgcgcgtggaggtcagagctttagcgataaaagtttagcacatactcgttggaattgtaagtatcatcttgtgtttacaccaaaatatagaagaaaagtaatctatggtcaattgaggcgagatatagggaaaatactaagaaaattgtgtgagatgaaagaagtcgaaatcattgaagcgcatgcaatgcccgaccatatccatatgttggtaagaattccaccgaagttgagtgtatcaggttttatgggtttcttaaaaggaagaagtgcagtaatcattcatgaacgtcatgcgaatttaaaatacaattatggaaatcgatccttttggtcaaaaggttattatgtgagcactgtaggactgaaccaaaaaacgatagcaaagtatatacgagaacaagaagcagaagatcgagtaagggatagtataaacaaaagagagtataaagatccatttaggaagtaacagctagataagaatagaaaggtagcggttggcggtctctaaaaaagctcccttaaagggagcagcaggtagcgagcccttctagggctattaaaaagccacccgctatgcgggtggatatttacttaataaatcaattttcccaaattattttctttagctttcttaacgatttctgttgcaactaccacatctaatacagccgaaccaactgttttgaagatcgtgatttgttctccacttgtccgaccgaccaattcttcattgatcagttggcctagttctccatgatagctgtctctttgaatatatccatcttgcagcggtgaaatgaagtccccagcttcttttagaacaccgtccatggtatcaaaaataacaacatctgcggctttaattatttctcgtggaatttcacacatttccggtgtgtaagcaccgactccattgatgtgcgcaccttttttgacccactcagcagagaatgtcgcacgttttgaagtggtcacacttgtgatgatgtctgctccttcaacgcattcttgactggtttttgttgggcgcatcgttacagaaaattgttgcatcatttcttcagcaaattggttggcacgctcaaaatcaatatcaaaaatccgaacttcttctaatttacgaacggtcaacattgcttctaattgtgactgtgcttgtccaccggttccaatcagcgcgccgattttagcatctttttttgcaagaagttctgttgctgctccttgaacagcgcctgttcttaattgtgtcaaataagtaccatctaaacaagcggataccatacccgtttctggatccaatacgatcatcgttgctggtacacttggtaagtttttcttgatgtttttaggatacacggaaacgattttgacacctagtgctccttcgccaccttctacataagctggcatatataagctttgtccgttactttttggcacatcgatattggtgcgaagaggcacaattgcctttcctgctgaatacaatgacaatgcttttttgtctgcatcgatggcttctctcattgaaaaatttttgataatatcttcttttttaagaaatagcatttgaatcgctccttaattagctgctgtagctttttttaattgactgctcaacatcgtatatgcactgtatagtaagaccaaaatcacgatccatttcagaatataggtatctaaagatttgactaggaatacagcgaccaatacccctaatacaccgaaggttgaagtgaaaagtgtgatttttctgctgtattcatcaaatttaatgaattgaacactgccgatcggtactgagaatgtacaagcccccatcataataggaaaggctgcaactggattcaagcctagcaagtagacagttaccattgttaacgcataagaaccaatgccgatattgttcaatgcgccatagacaaagagtaaaaatcctgccaagattaattttccgccatacaattcactggctgttccgtttgagggaakccaattcatttgtcccataaaaattaagaatgcagcaatgaccaatcctatgccgacaaacagtttgatcgttttctctggtaacttcacgacaaatcttggtcctaaatatgcaccgataatttggcagataatacaaacagctaatgtcttgatccctacgttgatagcagtgatataagacaatgccatgacggctaccggtactacacattgggtattcaacgttccgggtagttttttcatgctgacccatttcaactttggataaaggacggttccgatagcaaagtcggaaacgccaaatgttgaaagaaagaaggtgataaatgacgtgaagggcaacagacgcatatccccaggttcttctttgaaattttgtttgtttttgaaaaggtctcttagaaagtaaataataaaatatagattgattgcgacaattagtgccagcaaaatattccgaatcataaaaattcctcctactagtaaatctttctgattccctcaaagttctcaccatattttgctttaagttcttcagaagattctgcaatcacttttagtgtatatgcatcatgtttgacatattctttagctagattgaccatggcgtggttttttgtccaagtgacatcggttgattgcagttcttcattaatggtgccaaacacgacttcttgctcatcggcgacgatgttgatccatcttgccccaaagtcatcaagtttgtctgtttcaaaaccatgaatgtaatacttttctaagggaagatcatattcatgggtagaactgaataaaatcagtacaaatttatcgacttttttttcggcctgctgcaatgcctttagcagtgaatccgtgaggttctcatgccaaacttggatgagcaaactttcttttgcatttttcaccaaatgctctgcttatccagaacatactcgatgccatcaactttnccacagcatgtcttcttcatctttttccttaatcattcctagattctttgtaagaaaagaaagatcatttttaacacttttttctaatttctctaaaaactcatttgccgagatggcatgataaagtttaggttctgatttattgacgacaatcaaattcttttttaatagtttttccaaaatgttatatactttcgagcgtggcaccctgagattttacttacttcatatcctgtaagattacctttttctaatagggtggtatacactcttgtttccatctctgaaaaatcatattttttcatgatttgaatcatcgtttccattgattaatcctcacttcatttttagtagctactacggtaacaactataatttttttttgatcatctgtcaagagttagttcaataaaacacatataagaattagcttaaaaacaagctttttattaaaaataaataatataataggga

SEQ ID NO: 22 - DNA, 3467 bp; double-stranded, linear
tgatgagcataaggaggacaggcatgaacaaaaagaataatggcatgaaaaatggtttatactacgtcttagtagtacttgccatggtcagngttgtctatttcatttttggaaataacaaccaacaatcgccagacatcgattactcaaccttccaacaacaattggaagacggaaaagtcaaagacatgaccattcaaccaactaatggggtttaccggattgaaggtcagtataaagaaaaacaagaagtgaaagacacaggtggtctgtcattgtggggctcaacgcaagcgtcgtcaaaaggcttcacaacaaccgttttacctagtgatacaaccttagctggcattcaagatgcggcacaaaataacaaggtgaagctagttgtcaaagaacaatcaacaagtggtgcttggttgtcactgttgtttagtttcttaccattagtgattattttcttcttcttctacatgatgatgagccaacaaggcggtggcggtggcggcggtggccgtgtgatgaacttcggtaaatcaaaagccaaagaagccgataaaaaagctaaccgtgtccgcttctcagatgtagctggtgcggaagaagaaaaacaagaattagttgaagtagtggaattcttaaaagatccacgtcgtttcgctgaattaggcgcacggattcctgcgggcgtactattagagggacctccagggactggtaaaacgttacttgctaaagccgtagcaggtgaagcaggtgtgccattttactcaatctcaggttcagatttcgttgaaatgtttgtcggggtcggtgctagccgtgtccgggatttatttgaaacagcgaagaaaaacgcgcctgcaattatctttatcgatgaaatcgatgcagttggtcgtcaacgtggtgctggtatgggtggcggacacgacgaacgtgaacaaacccttaaccaattattagttgagatggatggttttgatggcaatgaaggagttatcgtaattgctgcaacgaaccgttcagacgtgttagacccagcgttgttacgtccaggtcgttttgaccgccaaatcttggtaggacgtccagatgtcaaaggtcgtgaagsgattttacgtgttcatgcgaaaaacaaaccgttagctgatgacgttgatttgaaagttgttgcacaacaaacaccaggttttgctggtgctgatttagaaaatgtcttaaacgaagcagccttagttgccgctcgtcgtaacaagaaaaaaattgatgcttctgatgtggatgaagccgaagaccgcgtaattgctggtccagctaaaaaagatcgcgtgattaataaaaaagaacgcgaaatggtggcttaccatgaagcaggacacacaattgttggtttagtcttaagccgtgctcgtgttgtccacaaagtaacaattatccctcgtggtcgcgcaggcggttatatgattgctttaccaaaagaagatcaattcttaatgactaaagaagatatgtttgaacaaatcgttggcttacttggtggacgtacagcagaagaaattatctttggcgttcaatcaacaggggcttcaaatgactttgaacaagcaacagggattgctcgtagcatggtaactgaatatggaatgagcgacaaattaggacctgttcaatatgaaggaaaccatcaagtctttgtcggtcgtgattatggtcaaacaaaagcttactcagaacaagtggcgtttgaaatcgatcaggaagttcgtcgtatcttaatggatgctcatacgaaagcgcatgaaattatcgaagcgcaccgtgaacaacataaactaatcgctgaaaaactattagaatatgaaacattagatgcaaaagcaatcaaatcattatttgaaacaggtaaaatgcctgaaggtgctgacagcgactatcctagtgaaaaagaagcgcaaacattcgaagaagcaaaacgtgctttagaagaaaaagaagcgcaaaaacaagttgaagaaaaacaagactttgaagaagcgaaaaaagaattacatgatgaagcagaagaagtcaaagtagaaagcgaacaaacagaaaaagaagtccaatctgaagagaaaaaagattcagattccaattctgaatatgatcgcaataactacgaagatcgttataaataaccaattagtagaaggtgcagtatttgtcgagttgacgaatactgcaccttctataatattaagatattctatagaaggaagattatttggttgaaaaaacacctgattcctagtattatcygactaatggacmaaaaagcaccaagagagngaggaaaaagaatggaagattatttagtaaaagccctttgttataaaggttcaatacgagcatatgccatcagtgccactgaaactgttagcgaacgcaaagaagacatgatacatggagttcttctactgcagcgttaggacgcacattgattggagcccttttactaggagcgactttaaaaggtgacgataaattaactgtaaaagtacaaggaaatggcccagctggcgctattattgtcgatagtaatggccgcggagaaacaaaaggctacattaaaaatccacatgtcagcttaaagttgaatgcaacaggtaaaattgatgtacgtggtgctgtcggtaacgaaggaattttcacagtcattaaagatttaggattaaaagaaaccttttctggacaaacacctattgtttctggtgaaatcggtgaagactttacatattttatggcggtctctgaacaagttccttcagctatcggtttaggtgtattggtggacacggatgaatctgtgaaagcagccggtggttttatgattcaagtaatgccaggtgccgatgaaagtaccattgattttattgaacagcgtctagcggaagtgccaccaatttcacaattactagaaaatggagaaacacctgaacaagtcttgtatcgcttattgggagaagacgaagtagaaattttagaaaaaatgcctgtacaatttaaatgtgactgttccaaagaaaaatttgcgaccgctttgattgctgttgggatcgatgaattaaatgcgatgattgatgaagatcatggagcagaagcagtttgtcaattctgtaacaataaatatcactatagtgaagaagaattaattgaacttcgcgatgaagcgattcgcaatacgaaacaaaagtaggaggaaagactatgtggaaaattggagacgttgaaatccccaaccgtgttgtcgtagctccgatggcgggtattagtaacgccgcttttcgtgtgactgtaaaagaatttggcgcaggattagtcgtttgtgaaatgattagtgacaaaggaattaaattaagaaacaaaaaaaccttagaatgctatatattgatgagcgggaatancctttaagtgtacaattttgg

SEQ ID NO: 23 - DNA, 21126 bp; double-stranded, linear
cttganacaattggggcaaaaaatgttttggcaaatgaaaaaggctggttaccagtgacagaagaagcggccattgctgcaaaaccagaggtcattttaaccaatgttaactatatgaaagatcccgccaaagaaattttagctcgtaaaaactgggaaagcgttccagcagttcaaaacaaagaagttttcgaaatcgataacatgtctagctctttaccaaataaccacattaccaaagcattaaaacaaatggcaaaagctgtttatccagaggaatacaaggatttaaaagatgagtaaaaaaacgtgtctcatactgatgctcttgattagtatgagcatgctctttttgggtattaaaattggaagtgttcagatttcgttaacggatttgcttcaaattttagtgaaaaagacggtttcagaagatgggattttagaaggaatcatctggaatgttcggttaccgcgtgtcgtgatggcctatctcgtgggcgcaggcttagcagtaagtggcacggtgatgcaatcgctcttaggtaatcctttagcttcttcgtatactttgggcgtatcagcgggagcatccttaggtgctgcgttaatcatggtaactggagtaactgcttcgatcttaggggcatttttattgcctttaactggttttatctttggcttagcaacggtctttttagttttgttatttacgcaaacaatggatagtcaaatgtccaatcaaacagttgttttagtaggaatgattatgaccttgtttgtcggtgctattttgacgttgattacagcacttttccaagattatttgaaacaattagtcttttggcaaatgggtagtttttctggcagtaattggcaaaaaattgctatttattgtccaatcttgcttgtcagcagtctgtttctttggtttgatgccaacgcattggatgttctcggtttaggagaagaacatgcgatgttagcgggagtagaagtcaaaacagcaaaactacgcattattcttttggctagtttattggcaggaagtgcggtttcatttgtcggtgtgattggttttgttgatttaatagcaccacatattgtccgtcgctatttaggggcgactcatcgctggctgattcccggttcagcaatcttaggtgggaccatcatggtactaggggacacgattgcccgcacgattttatcaccaagagaaattcccatcggggccgtaacagccttgattggagcgccattcttcttgtatatttactttaaaaaaaggggcgttgctgcatgattgaattaaaaaaaacagctgtaacgctccaacaaacccccattttaaaagatatttccctcgtttttccgacaggtagtaaaacttgtattttaggtccaaatggttgcggtaaaacgacacttttaaaaacgattgccggacttgtcccttatagtggttctgttttaattgatggtcaagaagttcatggacaaaagcggaaggaattggcaacgaaagtagcgatgatgagtcaattcacgacagttgcttttgattatacggtttacgaaacagttttgatgggggcgtatcgacaacaagcacaacgttttttacctattgtttctaamcargaaaargaacgagtccttwatwatttagaacgcacgggtttattgcctttaaaagataamgttgtcaatcagctttcaggaggacaacaacaacgagtatttttggctaaattatttgtacaagatccagaaattattttattggatgaacccmataatcatttggatattcggtatcaacaagaattgattcagcagttaaatgagtggagtgcgcaagaagggaaaacgttaatcggggtgtttcatgatatccgtttagcgttaacgctaagtgaaaaaattgtgtttatgaagcaagggaaagtggccgcgcaaggtgattttcaaacgttggcttccaaagaatttttacaaacgatttttgaaacagatattgtctcctattttcagaaacaacataaagtttgggaaactattcaataattttgacaagttttttggaaacaggtaagataaaggcaaagaatcagaaacacaatggcgtgttttaacaaatcggcaaaggagcccaagactaagtacgtgatggtacttgctttgggctccttttttatggaggtaacgatgaaacgaatcattttaatgggagctatcggttgtggcaaaaccacgttatgtcaagctctgcaaggcaaagaattaatttatgataaaacacaggcggtggaatttcatacagaaatgattgatacaccaggcgagtttattttgcatcgacaatattataatgcattaaacgtcacagcggcagaagcagatgtgattggtttggttcaaagtgctgtagaaacacaacaagttttttcaccaggatttggtagtattttcccgaaagaaatcattggtattttaaccaagattgatttagcacaagattctcagcagttagagattgttcggcaacaattaaaaagtgcgggtgcaacaagaatttttgaaatttcttctgttgaaaaaattggcttgcaagaattagtagattatttagaggaggatgaagcagaatgaaaatttatacaaaaactggcgataagggaatgacgaaattagtcggcagctcaaccgtcgctaaggattctgatcgagttgaaagttatggaacgattgatgaattgaattcttgggtgggctatattatcagccaacttccacaagaaaatcaagaaattaaagaagaactagaagctttacaacatttactttttgatgcgggaacagatttgtcaacaccgattgaagcacaacgaccatttaaattacaaaaggcaagtgtgcattggctagaacagcggattgatttctacactgcacaatcaccagatattgatcgttttattttacctggcggaaccccagcagccagtatggttcatgtggctcggacgattgcacggcgcgcagaacgcatcattgttcgtttaaattggacagccaaaattaacgaagaggtattaatttttaccaatcgtttatcagattatttttatgcgttggctcgctgtttaaatgttcaagcacaacgacctgatgttttttatgaacgaagcgaaatggttttccataaaattaaagaagatggattgtaaacagttgcttttctaaaaaacttatggtaaatttcagatagattaaacgaatattttatgaaaaatatgaatggaagccagtgagaatctggcacggtcccgccactgtgaagaagcaaggttgcttttaagtcaggtcttttcattttttcattattgggcatgctgtttcgaggcaaaacaggatgtttcttaacaacgcttgtgttgaaaatccagcccaagatatttgtattaatccaattaatggcacgaggaagtgcttttgggaattttgggctggtctttcaatgttgaaggagatttcaggtacaatgacgtactgctatattccctttttttattgacaattaattaaaggcgttgtactctatggataaggtttcgtgtacaatggcgtatacataaggaagcaaagacgcttcagacagatgatttttcgtttgtttgaagtgtctttttgtattttattaaggaggaattgagatgaaaacaattcatttccctaccgaactatgggtaggagaaggcgcattagccaatttggaaacacttcatgatagacgtgttttcattgtcacagatccattcatggttgactctggatttgtgaatgaagtgacaaagcatttaacaaaaagtgaatggcaaatttttagtgatatcatccccgatccaccaattgataagattgctgcgggaattaagcatttagcgacatttcaaggagatacgatattagctttaggtgggggatccgctattgatgcggccaaagcaatgaaattttttggcaaacgtactttgcaaactcagattgctgagtttattgcggttcctacaactagtggaactggttcagaagttacgaatttttcagtgattacggttgctgaaactggcaccaaaatcccgcttgtaacggatgaaattcaaccagaaattgcgattttagatacaaatttagtgatgagtgtcccaccaaaaatcacagcggatacaggaatggacgtcttaacgcatgttattgaagcgtatgtttcaacagaagcaaatccgatttcagatgcgttgtgcgaaaaagtcgttcgcttagtattcgacaatttagaaatagcctttaatgagggtagcaaccaacaagcccgtgaaaatatgcatttagcttcatgtatggcagggatggcgtttaatgttacttcgttaggcttgaatcacggtattgctcatgcggccggtgcacgtttacatgtgccacatggacgaatgaatgcaatgctcttacctgaagtcattgcatataacagtggcttagcgaatggcaaagtcaccaacgaaccaacagctaaacgttatgcgcagttagcaaattgtctaaatgatacacagacaaccaatgcacggattggtgttcaacaatttattcgacaaatcaagcaactccgtcaaaaattaaacatgcctgccacttttagtgactatggtttaccaaaagaagaagtccaggctgcaatcccaaaaatagctgaaggcgcattgatggatggctgcaccaaaacaaatcctgtccaaccaacagcagcagaagtgacaaaaattttaaattctatcttataagcgattgacaggatgaaatcgatarcatataatgtgggtagcacaacggcgtgcttcmaaatttaagagcaaagaagctccttagtagaaagcgaaagtggaacctttacgttttttattgaggattttttatttgctaaattaaaggagcgagtctggttggaagaaaaacaacgaatgattcaagaatatgttcctgggaaacaagtaacgttagcgcacatcattgctagtcctaataaagaaatttatacaaaattaggattgccagaaggcaccagcaatgcactaggtattttgacaatcactccgagcgaagnccaattatcgctgttgatattgcgactaaaagcggagatatccaaatcggttttattgatcgtttttctggatcggtagtcatttctggtgacgtaagctcagtggaagcagccttacaagcggtgattgaaggtttacaacagattttaaacttttctgtaacttgtaaaattaccagaacatagcgttgaaaggacaagggcgtgaagaaaatggatggacgaattgtaatagtcgatgatgaacctattacgagactcgatattcgtgatattgtgatagaagcagggtacgaagtagtcggtgaagcagctgatggttttgaagcaattgaagtatgtaaaaaaacacaacctgacctagtattaatggacattcaaatgccaattttagatggtctaaaagcaggtaaaaaaattgttcaagaccaactagccagtagtattgtctttttatctgcatacagtgacgtacaaaatacggacaaggctaaaaaattaggcgcactgggttatttagttaaacctctagacgaaaaatcattaatacctacaattgaaatgagcattgaacgaggcaaacaaacgcagctgttactaagtcaaatcgataaattaagtttaaaattagaagaacgtaaaattatcgaaaaagccaaaggtattcttgtaaaagaaaatcatatatcggaagaagaagcctaccaaatgttgcgtacgttaagtatgaacaaacgcgcacgtatgagtgaaattgcagaattgattgtaatggatgatgaataaatgaaacgattagagcaattatgtcaccaatataccaatctttcagaatcagacattaaagaattacaacgtacagcacgttatctttcttcgacgacactctatcaaagtgcagatgtttttattgatgtgtataaggaaatgtcacagcaagcactagtcgtttatcataagccgcctgcgaagacaacttctttatatagtggagatgtcgtcgggatggaagctttattaaaaaatgaacctggtgttctgcgtaccatgcaaactagcttaaatagcattggtttgttagcagtgactcaggaaaatcgtttgattaagcaaaatatctatcccattcgcaatgaacatcgaacgattggtgtcattattgtcgagattgcggcagatgaagagattcaagcggacttacaaaaagaggagctaaataactgccagttagcaaaagtagcgaaatcaactagtcaagtcgacgcattatttattgatcaattggcagaagccgttttgatttttgatgcggcgggtcacttattaattaccaatcacaatgcacaagagctttatcgcaaacttggttatcgggataatatcattggaatgagttatgacaatttgtccatcgattatacaacttttgaatatgtgttgtatcaaatgaaatataaaatgagtaatcaaccaattgaaagcaaaacgacctaccttaattattattttaaggttcggaaagtgtggttggcatcagaagaacaactgattatgattattcaagacaatacagaatttaaagaaaaagaagcggaaattatttccaaatctgttgcgattcgtgaaattcatcatcgtgttaaaaataacttgcaatcggtggkttccttattgcgtattcaagaacnggcgaacgcaaagccccgaagcaaagaaagtccttcatgaaagtgtcaatcgaattatggcgattgcagccacccatgaattgctgtcaaaacaagtcaaagatgacgttgctttacggcaaacattggaagcagtgatgtataattttagacatctttttcaaggcgcacaacccattgagatgatgatggatgttgatccagccattatggtttctagcgaacaaatggttaccatttcccttgttgtcaacgaactattacaaaacatttttgatcatgcatttgagccacaaacaagtggcgttgttaaacttagtggaacattagataataaaatgattaccattactgttacagataatggtaaaggctatgatgttcatcaaagtaacgagaccagtttaggtttgatgattgtcaaaagctacgtaaaagataaactaaaaggaaaaattacaattgaatccaataaacagggaactaaaacctgtttctatttcgaacagaacaccagtgatgttgttcattgattaagcaaaggcgcttaaagaaaagtagaaagaaattttctaacgattctttaagtgcctttttgtatgcaaaaggaggcgagtcaggcgatgtcgaaggaaacacttttaaccgtaggaattgatttagggacgtctacaacccaattagtcttgtcagaattaactgttgaaaattttgcctctgcgtttacagtaccacgtatcagcatttctgataaaaaagtcatttatcgaagtgacattatctttacacccttacttaaccaatcagaaattgatgcagaacctatcaaagcgtttgtagcggagcaatatcgccaagcaggcattcataaacaagatattcaaatgggtgcggtaattatcacaggtgaaactgctcgaaaaagcaatgccaacaatgtgctacgagcacttagtggctatgcaggtgattttgtcgttgctacggctggtcctgatttagaaagtatcattgccgggaaaggcgctggtgctcaaacttattctgaaacgaaacgcaaaccagtggttaatttagacattggtggtggaacgacaaatttagctgtctttaaagatggcgaagtgattgacacggcttgttttgacattggcggacgcttaattaaattagatcaacaacaaaaaatcacctatatagctccgaagattcaagaaattataaataaaaaagggctaaccttgcaccttggtgaccaagccaccgaacaaaacttactgccaattatttcggaattagttgccgtgttagaaaatagcattggcttggggacacaaagtccgttctaccagttattagtaaccaaccatccactacgaaaaggtgaggaattaccaattgtaacattttctggtggtgtggctgattgcttaaatacgacaagtacgaatctctttaaatatggggacatcggcttacttttagggaaatacttgagaaagtcactgattttttcggaaaaagaagtcttagaaagcgcagaaacaatccgagcgacggtcgtcggagcaggttcacacactgctgaaattagcggaagcacgatcgcttatcgtgagcaaattttgccggtaaaaaatatcccaattctaaaattagcgcaagaggatgaaacccttactgtgacagaattaggccagcgaatccaagaaaaactcaattggcatcgtattgaagaaacaccccagatagccctagcaattagaggcatgagcaatccaacatttgctgatattcaacgctatggtcaagggattgtggaaggattagctagtttagttgctgaacaaattcccattattgttatggtggatgaagacatggcgaaagctttagggcatgccttaagtgcccatctgccaaaagactatccgtttatctgtcttgattcggtcaaagtagaaaacggtgattatgtagatatcggtttaccagtggcagaaggagccgtccttccagtcattgttaagaccttagtatttaattaaaaaggagcgacacaaagatgattttaaaaaccaaactatttggcaaagtctatcaatttacatccgttaaagaagtcttagccaaagccaatgaagaaaagtctggcgacaagttagctggcgtagctgctaattcagccgaagaacgcgtggcagcaaaagtcgttttatcggaattgtccttaaatgacttgtttaacaatcccgtcgttgrttatgacgaagacgaagtgacacgcattattattgaccaagtcaatatgcgaatttttgaaagtattaaacattggacagttgcagaattacgcgaatttatcttatcttcggaaacaaccgattttgatatcaaacgaatttcccgtggactcacttcagaaatgattgctgctgtctgtaaattaatgtccaacatggatctaattgttggcgcaaaaaaaatcaatattgaaaaaaccgccaacacaacaattggccgtcccggaactttttcaaatcgtttacagccaaaccatccaaccgataatgtcgatggcattatggcatcagttatggaaggtctttcttatggcgccggtgatgccttaattggtttgaatcctgttgatgattctacagaaagtgttaaacggatcttaaacaaatttgaagagttccgcagtgaatgggaaattccaacacaaacttgcgtgcttgctcacgtaacgacacaaatggaagccatgcgtcaaggcgcgccaactggcttagtctttcaatccatcgctggttcagaaaaaggaaacactgcatttggtttaaatgcagaaattttagctgaagcacaagatttagcgcttcacagtggtcaagcagctggtcctaatgtgatgtattttgaaacaggtcaaggctcagaactttcttctgaagcgaactttggcgcagaccaagtcacaatggaagcgcgttgttatggcttagccaaaaaatttgatccgtatattgtaaataccgttgtcggctttattggaccagaatatctttacgattcaaaacaagtcatccgcgctggtttagaagatcatttcatgggcaaattaactggaattycaatgggctgtgatgtctgctacaccaaccatatgaaagctgatcaaaatgatatggaaaacttagcaatgttattagcaacagctggttgtacgtatatcatggggattcctcatggcgatgatgtcatgttaaattatcaaacaactgggttccatgaaactgcgacgattcgtgaaacattaggcttacgtccaattaaagaatttgaagaatggatggaaaaaatgggcttaatggaaaacggaaaattaacaagtcgcgctggcgatgcatctgtatttattaaataaacgaggtgagaatacaaatgaacgaaaaagaattaaaagaaatgattgccggaattttaacagaaatggtcgctgacaatcaagcggtttcgactgccactgtgactgctgaagaaaaaccagtcacaacacacgtcactgaaacgacagaaattgaagaaggcctaattcctgacattactgaagtagatttacgtaaacaattactattgaaaaatgccgtagatcctgaagcactattaaaaatgaaagctttctcgccagctcgtttaggcgttggtcgtgcagggacgcgttatatgactagttcaacattacgtttccgagcagaccatgcggcagcacaagatgcagtcttttcagacgtaagcgaagacttggtaaaagaaatgaattttatttctacaaaaacaatctgtaacagtaaagatgaatatttaacacgtccagattatggtcgtcaatttgatgaagaaaatagtgaaatcattcggaaaaatacgacaccaaaagccaaaatccaaatggtcgtaggggatggccttagttcagctgctatcgaagcgaatattaaagaagtcctaccagcmattaaacmaggattaaacatgtacmacttagatttcgacmatgtagkttttgttaaatattgtcgcgtgccagcaatggataaaattggtgaaatcactgacgctgatgttgtttgcttgctagttggcgaacgtcctggtttagtaacagctgaatctatgagtgcctacattgcttacaaaccaactgtcggtatgccagaagcacggcggacagttatttcaaatattcacaaaggtgggacaccggctgttgaagcaggggcctacattgccgaaattattaaaaaaatgttagacaagaaaaaatctggtattgatttaaaagaagctgaataaaggaggatttctcatgaaaaatgatcgtctaggcgcaaatgtcctaagtatgaaagtcattcccaatgtcgatccggcattagcaaaagaattatcattgaaaccagaacatcgctcattaggaattgttacttccgattgtgatgatgtcacttatgttgcattagatgaagcaaccaaagccgccgatgttactgtagtttacggtaaaagtatgtatgctggcgcagcaaatgcttcaaccaaattagccggtgaagtgattggcattattgctggtccgagtcctgccgaagtcaatagtggcttgagtgtcattacgcaagtcattgaagaagaagccagcttctatagtgctaacgaagatgacagcattgtttattttgcacatgtagtatcaagaacgggtagctttttatctgaacaagcgaatattcctgaaggtgaagcgattgcttatctgattgcaccaccgctagaagcaatggttggcttagatgcagcaatgaaagctgccgatgttcaaatgggtgtcttttatggcccaccttctgaaacgaactttggcggcgccttattgacaggtagtcaatctgcatgtaaagctgcttgcagtgcgtttgaacaagtcattcaaaatatcgctgacaatccgttgagttattaaggatgtgacctgaatgaaagcattaggaatggtcgaagtcaaaggatttttaggtgccattagtgtggccgatgcggcattgaaagccgccgacgttactttgttaaaagctgaaattattaatggcggtttaacaactgtggaactgattggtgacgttgccgcggttcaagctgccgttgaagtaggtacggaagtagctaaagaattaaattgtttaattgctcatcatgtgatctcacgggttgatgctcaaacggaagtgattttatcagatccagaacccaagtcagcacctgaaccgatggaacaagtagaagtaattgaagaagagattgaaacaccagatttggaagaacacacaggcacacgccaaaaattagaaacacaacgcgtggttgatttacgcaaacaagcctacaaaatgaacctaagtagtttaaagaaaagtgagattaaatttgccaataaagaagctttaattcaagcaatcatggctgaaatagaaagaagtgaagacgagtggaattagtagataaagacttacgttccatccaagaaacaagaaatttaatcagaaaagccaaagaggcacagcaagtattagcaacattttcgcaaaaacaaatcgatgcgattgttcaagcggtttcagaggctacatttaaccaacgagaaaagttagcgaaaatggccaatgaagaaacaggatttggtatctatgaagataaaatcatcaaaaatgctttcgcttcaaaagtagtatatgacgaaatgaaggacaaagctacagttggtgtgatccatgatgatgctgccaaaaaagtcactgaaattgctgtcccagtgggtgtaattgcaggattaattccttctaccaacccgacatcaacagtcatttacaaagcattaatttcattaaaagctgccaacagcattgttttttcaccacatcccaatgcgttgaaatcgattattgaaacagtggaaattatccaaaaagcggctattgctgcaggggcaccagaaggttgtgtctcggtcatcaaaacgccaaccatgcaagcgaccagcgaattaatgaaaaataaagaaacaaatttaattttagctactggtggaaacgcaatggttaaagccgcgtactcttctggaacaccagcaatcggtgttgggcctggtaatggaccagcctacatcgaacgaagcgcaaatgttcctcatgcagtgaaacaaataatggattcaaaaactttcgataacggtacaatttgtgcatcggaacaatcaattattgttgaaactgtcaaccgtgaagcggtcaaagaagagttaattaagcagggagcgtatttcttaagtccagccgaagccgacaaattagctaaatttattttacgaccaaacggtacaatgaacccgcaaatcgtgggacgttccgttcaacatattgcttcattagttggtttatctattccaaaagatcgccgcttaattgttgccgaagaaacacatgtaggcttgaaatatccattttcaagngraaaattggcaccgattattgctttctatacagttgaaaactgggaagcasttgcgcgttatcaattgaaattttgaaaggtgaaggtgcgggtcatacaatgggcattcacacagaaaacaaagaagtcattcgtgaatttggcttaagaaaacccgtctctcgtttgcttgttaacacctctggtacacttggcggcattggtgcttcaactaacttagtgccagcattaacacttggctgtggcgcagttggtggcagctcaacttctgataatattggggttgaaaatctgttcaatttacgtcgtgttgcatatggcgtgcgtgatttagaagagattcgtcaagaatttggtcaaacatcaaccacatctgtggctacttcttgcgaaacaaccaatcaagaagaactagtaaatgccgtggtagctcaagttttagctcgcttaaactaacaagaaacgagcgagtaagagtaaaacaaataaattattggatttagggtttgggacctaagtcaaattgctaattgtcccaaatttttaaaaataaaacatacatcttaggaggaaattataatgtcaagtacaaatgctttaggaatgatcgaaactcgtggtttagtaggtgctgttgaagcagccgatgcaatggtgaaagcggcaaacgttactttaattggaaaagaacaagtcggtggcggtttagttacagtaatggttcgcggtgacgttggtgctgtaaaagcagcaacagatgctggtgctgctgcagcagaacgtgttggcgaattattatctgtccatgtaattccacgtccacatacagaagtagacgctattttaccacacgcaacaactgaattataattttgattttttggggcagaggtaggttcattacttctgtcctaaactttcattgaggaggggtgttatgacagttattacagaagatatgcttcgcatcaaaaggctaaaaaaagaactagaagatggcacggattttgtgtttcctgtaggcagttttctgacgccagccgccaaaagctatctacgcgagcatcggattaatagcagcttctcttcaacaaacccattgctttctgaggttcattcagtgaaggcctcctcacaaaaacaagaacatttatcgaaagaaacaatttatgagattcggcacttaagccatctattgtatttgcctttcttaacgaatgaagcgttatcaacagaaggttggttatatttcgaacaacaacaacagtggttagagaaatttattttagaacagtcgcttgtaatggaaccagtcattttggaatcaaaggtaactattctaactaaccaacagagacaatggcgctattcctcaaaagaaattcaattacaactagataaaattattctccagttaaaaggagaatcacaactgttcggactttttcaagcttgggctacagaattaattagcaccatggctgaaatatcacgaaactaggagatgaacaaattggattcaatgaatgaaattgttgaagaagttgttaaacgaattcagcaacaacaacaaaatacttttgaagttgaagcttctggccgacatgttcatttgtctcgtcaagagattgatgcattatttggaccaggatatcaactaacaaaagtgaaagatttatcacaacctggacagttcgtttgtaaagaacgaattacggttgctggacctaaaggactctttcaaaatgtggttattttaggccctgaacgtagcgaatcacaagtcgaagtttctatgacggatacgcgtattttaggaattaatgccccagttagagagagtggcaagacagaagggacacctggcgtcacgctgatgaacggatcagcagttgtgacattaagtcacggcttaattgttgccaaacgtcatattcacatgacacccgaagacgccttgaaaaataaagtaagcaatagccaaattgtgcaagtcaaagtggaaggcacacgtccgttaatctttgatgatgtggttgtgcgaatcagtccgcgatttgcaacgtacatgcacattgactacgatgaagccaacgcttgcggcttaaccaaaggagctcgtggctacattcttaagtaaaaggaggcaagacaatgaacgtttctgraatggaaaatttgattcaacagattactgatcaaatttgtcaacaattgctgtcgtcgtcttattcagtggctttagcagaagcaaaagaagcatttcctgaagaaatgtttgttcgttttcctgatgtaaattgggtaaccmaggagcagaagctagcacgaggcttggttgtaaagaggctaacgatttcccaagtaaatgcgattgcgcatttacaggaaacggatgaattagtcaaaaacatcttagcattcttatttgaaggtaagccggtattggttttaaccccaataccttcagtgagtaaaaattcacgattgaagtatcgtttgaaacaaacgattcaggaaaacgtggacatgtgccaacagtttgggctgattttttatcatgattcagaaaattacgctgtgtttcaggcggcctgtcaaaaacaattcgttctttggctgagaccaaacgaacctacattactgaaaaacaattgataagaatgacagaatcaggtgtttctttaagtaaaaacgcctatttaaccccgttagcgaaagattatgctaggaaacatcaattgctgacgtaaggaggaaaaacgatgcttttaggaaaagtgactggtagcctttggtcaacaagaaaagatgaaaaattaaatggctggaaatttatgatggttgatattttgaatcaagaggacgaaaagcaaggatttttaattgctgctgacaacgctggagctggtgtcggggacaaagtgttaattagtcaaggcaatgctgcccgtatttcggcagaagatccgaatgtcccaattgatgcaatgattgttggtgtcattgattctacagcggaagaatagggaggacgagacatgagcattaatgaaattattatgtatattatggttcttttcatgattattggaggaatcgataaatgtattggcaacaaactaggtttaggggagcaatttgaggaagggattatggctatgggttctctagcgctttctatggtagggattatcactttagcgcctgtcttagccaatcttttaagtccgattgtcgttcctgtctatgaattactaggggctgatccagcaatgtttgccacaaccttattggccaatgatatgggcggctttgcgttagcgcaacaattagccaatgatccgcaagctggtttatttgcgggggcaatcttaggtgcaatgatgggaccaacgttagtctttacaattccagtagcgcttggcatyatccaaaaagacgaccaacaattcttagcaacaggtgttttgagcgggattattacaattccttttggtttattagcaggtggtttaacagctggcatgccattgtcattgattattcctaactwaattccaattattattgttgccgctttaattattttaggtttatggttagcgccaaagggcatgattaaaggcttccaaatttttggtcaaggcgtagtgattgtcgctatctttggtytagttgtgggggcgattcaactattattaggaattacagtgattcctggcattgcaccagttactgaaggaattgaagtcgttggcgggattgctttaactttagctggcgctttctgtttagtagctgtgattacgaaagtctttaataaaccattgatgaaactaggaaaagttttaggaatgaatgaagtagcggctgcaggaatggttgctacattagctaacaatattcccatgkkccaaatgttaaaagacatggataatcgagggaaaattattaatatcgcttttgctgtttcggcttctttcgttttaggtgaccaccttggttttactgcaggcgtacaaaagaaatgatttttccaatgattgttggcaaattagttggagggattaccgccatttttgtggctatctttatggcaaatcgaatgctagggaaacccgaaacagaagtgaaataatgaggtgtaaatatgacagaattaaatcgtgaaatgattgaaacgcttgttcgacaaattgtcacagaaaaattaatgccgactaaacaagtggatccaagtggaattatgtccatcaaattacccgaaatcgacgtaacagaagacgaccgcttagatacaggcaacccagcggacattgtttacacaaaagatctgttttctttagaagaaagtccgcgccttggttgcggtttaatggtgatgaaagataccaccttcgactggacactagaatacgatgaaattgattatattatttcaggacaattagatatactgattgacggacgtaaaatttctgcaacagccggcgaaattattttaattccgaaaagtagcaaaattcaattttcagtgacgggtgatgcccgctttgtctacgtgacttatccagcagattggcaaagccaataattattttatcggcagtcagagaataattttgccaaaaccctttactcagcgttataataaataagaacgaaaaaaggggttgagtgaatgacatttgagaatccaagtcaaaatcaaatttttgatattttaaaacaagcaaaaaatattgcggtggttggtttgagtaacaagcccgaccgcacaagttacaaaattgcggaaattttacagcaacatggctatcgtgtattgcctgtcaatccagttttaaaaggtgaaacggtgcttggcgaaacggtttatgggacattaacagagattcctgaaaagattgatattgttgacgtctttcggcggagtgaatttttgccagaagtggccgcagaaacattgaaaacagaagcgcctgtcttttgggcccaactaggtttggaaaacgaagaggcagcgaacttgttattaaatgaaggtcgtcaagttattatggaccgttgtattaaaattgaattggcaaaaatggcagatgctgaataaacacgtgtaattttataaagaaagagcgtcctgaacggaaagctctttcttttttgacccagatagagtattattgtaatgatggttttagaaggagcgaacggaaaacgcaagaaaccggctcactcttcttctaattctttaagrratagttaatgtacgcttattaactaaacgagaatctargtataaggagttttttctttggctaaaaaaattaacaatgagtacaatgatgcctctatccaagtcctagaaggattggaagcagtgaggaaaagacctggtatgtatatcggttcaaccgatagccgtggactccatcacttagtctatgaaattgtcgataacgcagtcgatgaagcgttatctggctacgggaatgaaatcaacgtaactatccaaaaagataatagtatttgtgttgcagactctggccgcggaatgccaacagggatgcatgcttctggtatcccaacagtagaagtaatttttactgtcttacatgcgggtggtaagtttggccaaggtggctataaaacttcaggcggactccatggggtaggtgccagtgttgttaatgccttatctaagtggttagaagttcatattgttcgtgatggcgtagaatacatggaacgatttgaggacggcggtaaaccagttggtaccttaaaaaaaatcggcaaaacaaaaaaacgcaacggtacctccgttacttttttacctgacgacaccattttctctacgacaaatttttcttacgaaattttagcagaacgtttgagagaatcagctttcttattaaaaggcgtcaaaattactttaacagatgaacgtggggaagaacccaaagaagaagtcttccactacgaagaaggtattaaagaatttgttgcctatctaaatgaagaaaaagatacattaacacccgttgtttatttttcaggagccaaagaaggtattgaagttgaattagcttaccaatacaacgatggctattctgaaaatgttttatctttcgttaacaatgtccgcacaaaagatggcggtacccacgaagtcggtatgaaaacgtcaatgacgaaggcgtacaatgaatatgcacggaaagtgggactattaaaagaaaaagataaaaatttagaaggtagcgacttccgtgaaggcttagcagccgtcctttctattcgagtaccagaaaacttactacagtttgagggccaaaccaaaggaaaattaggtacacctttagcaagaaccgttgtcgataacgtcgtaggcgaacaaatgggcttctatttacaagaaaacagtgaaatgagtcaatcattaattcggaaagcgattaaagcccgtgaagcccgtgaagcggctcgtaaagcccgtgaagaaagccggaacgtaaaaaacggaaaaaaggtgaatcgttactttctggaaaattaacaccggctcaatccagaaatcctaagaaaaatgaactatatcttgtcgaaggagactcggccggtggctcagcaaaacaagggcgcgaccggaaattccaagccattttaccgctacgaggaaaagtcattaatacggaaaaagcgaaaatgcaagacatcttgaaaaacgaagaaatcaatactatgatctatacgattggcgcaggcgttggtcctgaattttcaattgaagattgtaattatgataaaatcatcatcatgaccgatgcggataccgatggtgcccatattcaagtgttgctattaacgttcttctatcgttatatgaaaccattaattgaagccggcaaagtctacattgccttaccaccactttataaagtctctaaaggaactggaaaaaaatcagtcattgagtatgcttggaccgatggtgaattggcagaagtgattgataaagttggtaaaggctatatgctccaacgctataaaggtctgggggaaatgaatgcagaacaactttgggaaacaacgatggatcctgaaactagaaccttaattcgtgttcggattgatgatgcagctcaagcagaacgccgtgtgaccacattaatgggcgacaaagtcgaacctcgtcgaaaatggattgaacaacatgttcaatttacgttggaagaagatggcagtattttagatcgttcagaagaagacacttctgcaccaacaggagaaagtcttttagatgcggaaaaaacaaaagaagcagaacaaaccgatgacactgaaatcagtttgtttgacatagagtagggagtgacaattttggaaaaacgccaagaagttcaagaattaacccttgaagaagtaatgggcgatcgttttggaagatattccaaatacatcattcaagaacgggccctaccagatattcgagatgggctaaaaccagtacaacgccgcattctcttttcaatgaataaagacggcaatacctttgataaaggctttcgtaaatcagcaaaatctgtcggaaacattatggggaattatcatccccatggcgacagcagtatttatgaagcgatggtgcgtctaagtcaagactggaaattacgggaagtactaattgaaatgcac

SEQ ID NO: 24 - DNA, 3222 bp; double-stranded, linear
nagagaaanccggtagctttttacggttttctcttttttgactttcaaagtcaaatcaggtacgacttctttttaaacagataagaatgtggtatcattgtaaaggactatataataaaggagatggacgttttttgacagataatcagtcaaaatctttggaattaatacttactgattctgatgatgcacacatgcttttaggaacacatgataaacatatcaaatttttagaagagaatactcacgtaacgattaatagtcgtggcgaagttattcagttaattggcgaatcatcagaggtagagttagtcgcttccgtgttaagagcgctacaaacattaattcaacgaggcatcaaagtgcatacgccagatgtcgtttctgctttaaaaatggccaaagctggaaatttagaggcgtttattgccatgtatgaagaagaaattatgaaggaccatcatggtcgggccatccgaattaagaatgttggtcaaaaaaaatatatcgatgcagttaaaactcatgacgtcattttcggggtgggacctgcggggacaggaaaaacctttttagccgtggtgatggcagtagcagctttaaaaaaaggcgaagtacaaaaaattattttaactcgtccagcggtggaagctggcgaaagcttgggctttttaccaggtgacttaaaagaaaaagtcgatccttatttacgtccagtttacgatgccttgtatcaaatttttggtatggatcatacaaatcgtttaatggaacgcggcgttattgaaattgccccgcttgcttatatgcgtggtcgtacattggatgatgcttttgtcattctagatgaagcacaaaataccacggttgcccaaatgaaaatgtttttaactcgtttagggtttagttcaaaaatgattgttaatggagatactagtcagattgacttgccacgtggtgtaacaagtggtttagttaacgccgagcgtacgttaaaagacattgaaaaaattgcctttgtaaattttgaagccagtgacgttgtgcgtcatcctgttgtagcacaaattattcaagcctatgaaaaagaacaacaaaagcattcctaagcagttagggaaggagtgaaagtaccttttgaaaaaagtacttacaaagttaggggatcgtttaggtaaagcctatttacctattttattagccgttttttctcttcttttatttatgattatgtttggcagcgtccatcagaaaagagtagaaattaaagaaggtcaactggccgagaaaaccattcgtgcaaataaaaatatcgagaatacctacgaaacagaacaaagaaaaaaattggcagcagaagctgtcacacccgaatatatttatcaagaagatacggcatctgtccaacataatcgtattgataaattatttaaattgattgattctgcgaatgaaaaagtagacaaagagtacagcaacaagcaagcgaaggccaaaaaggaagaaacgattcctgcgccgaccgtggaagaacgagtagctagcttaaaatcattgtttgaatctttaccgcaagatgaagttacgttttatcaaagttttcctaatgttttttatcaaacaatctttacattaacctctgagcaattggataaggttcgttcagaaagtttgatgttggtggatgacgcgatgcaaaatcacgttcgagaatctgatttggataaaattcgccaagaagctaacggtaaaattcaatacttagatattacgagtaccatgcaacaagtcattcgttacattgttaaccaagggattgtggtaaacgatattgccaatgaaaaacgaacagaagagctacgccaaaaagcgatgaatgctgttcaacccgcaatgatttatcaaggcgaaattattgttcgtgaaggtactcaaattgatgcaaaagcggtcgaaaaacttgagctactaggaatgactagtcaaaatacctctatttttccgatggtggcattagcattagctattttacttcaagttgaagtgttaattttctttacaaaacaagtgactgagccttcgcgacaacgctcgtttattatcttttacacgggtgctatgctaatcagtgttattttaatgaaattcttccagattttccaaacagagcagttgatgtatattcccttgttctatccggcagcctttgcgccgctgattctaaatcattttgtaaatcgtcgttcagggataatcgctgctattttccaagtcgtttttgcgttatttatcttttataattctatcggcacaaactcgttgacggttattctgattatgtacttattctcaggatttctagcaacagttgttaaacggaaacggatgagtgagcaagttttcccagctttaatgtgggtagtggtctttcctgttttcatggcggttgtcttaatgatttatcaagggatgagtttaacagatggtaaaacgtggacagctttaatttgtgcaagtgcaggaacggtactttcatttttagcaacaatgggcttgcatccatatatcgaattattagtgaccgatgatagtatgattgtcttgaatgaattaagtaatccgaaccatccgttgttaaaacaactgttagaagaagcgccaggtacctatcatcatagcatgatggtggctagtttgagcgctaacgctgttgctgagattggcgggcggtcgctattaacacgagttgcttgttattaccatgacattggtaaaattaaacacgccaatttctttgtggaaaacttacctgctggtgcagaaaatccacataactttttattaccagaagatagtaaacaaattatttttggccacgtaattgatggcgccaaaattttagaagagtacaatatgccgcaaatggtgattgacatttgtcgtcaacatcatggcacaacattgatgaaatttttctatgtgaaagcaaaagaacgcaatcctgaaattaaagaatccgacttccgttatcctggaccacgtccacaaacacgagaagcagggattgtgagtattgctgatacttgtgaggctgctgtgcgggcgatggatcatcccaccaacgaaaaaattncaagcctttgtgcataatgtgattcaagacagnatttcagatggccaattagatgaatgtgggttaacgatgaaagagattcgcatcat

SEQ ID NO: 25 - DNA, 7812 bp; double-stranded, linear
ggacatgattacgttagacttaaacttacctagtatggatgggatggctgtttgtcgtgaaattcgcaaagtttcagccaatgttcccattattatgttgaccgctcgtgattctgaaagtgaccaagtaattggccttgaaatgggtgcggatgattatgtgacaaaaccatttagtccattaactttgattgcacggatgaaagctctacatcgtcgtgccgaggtggcagaggctgcgcatgatacgtctgagaatacagatgaaacatttgacgtgattacggatcattttaaaatgaatacgaaaacacgagaaacatatttagataatcaattaattgaaggcttaacacctaaagaatttgatttgctatacactttagcaaaaaaaccacgccaagtcttttcacgcgaacaactactagaattggtttgggactatcaatactttggcgatgaacggacagttgatgcccatatcaaaaaattacgacaaaaaattgaaaaagtgggtcctcaagtcatccaaacggtttggggcgtagggtataaattcgacgattcaggtgttgcttaatgaagtatttgtatcaacaattacttgcttttataggtgtgatcgctctgattattctcattgtcggaacgtctttcacacaattgaccaagcgcacaatgcaagaaaataactatgaacagctgtatggttatgcagaatcggctttagaaacacgtgacttttttattaatgtcgcaggcgtttcagatcgagatgttttatcctattcatttcagttgactgagcgcgtactccagaagcaagatgtgcaatttgtgtttattaacaaggaccgcgaagtgcagtacccaccagttgatagcacaaaaaaattagacttttccttaatcgataaaaattgggatcaaatcatgaaaggcaatcgtgttatgcaacagaaaacattgatatttacggggcccgaaatacttcgtcctatgtaatgttaccggtgtatgcatcaaatcagtcttctgataaaaaagtgattattggttcactagttattacacaacctgccaaaaacgttgaccgaagtgttcagtccgtgacacaaaacttgattaaaggctttattttttctggtgtgattgccttgttactaagctatctatttgcgactttccaagtgaaacgaataaatcggatgcgtaaagccaccaaagaaattactagtggaaattttgatattcaattaccggttcatgacaaagatgaatttgatgacctagcagaagattttaataaaatggccgcgtctttaaaagaatcacaagaagaaatcaatcggcaagaagagcgccgtcgtcaatttatggcggatgcctctcatgaaatgcggacgcctttaacaactattaatggcttgttagagggattgcagtataatgctattcctgaaaatcaaaaagagaatgcgattaaactgatgcaaaatgagaccgctcgcttgattcgcttagtcaatgaaaatcttgattatgaaaaaattcggaccaaccagattcaaattgttgtgaagaagttcaacggaacagaagctttagaaaatattgtgactcaactaacggccaaagctgaagccgccggtaatcaattgtatttagacaccaccgaaccaattgatgtgtatgccgattatgatcgtttcgttcaagtggttgtcaatattgttcaaaatgcgatccaatttactgaaaatggcgaaattcatattgctttagaaaaaggctatttagaaaccattgtccgtatttctgatacaggaatcggcatgacggaagagcaaattctgaatatctgggatcgttattacaaagtagatccatcccgtaaaaatacgaaatatggagaatcaggattaggcttaccaatcgttcaacaattggtccgtttgcataaaggaaaaattaatgttgagagtgaacttggtaaaggcaccacgtttattatttcatttcctgatgttgaaattactgaaaactaaagaaaacgtctggtcacaatcagtgccagacgttttctttagtttaataacgcatgtagagacagggggtgcacatagggactatcaataatttgtggatcttttgtcagaaatagcaagcgcttgtttcttttttgaactgctatttttaattgaggtaaaatttcttgacgttgtccaatcgttaatgaagaaaagatgtcatcaatcactaacgtacttgtttttgaaagcaaaagttgtattatgcgcattttaattttttcaaaagtcgtaaaagaagtaaaggaacgaccaagtaaggcaggttctaattggaacacctggaaagcttcggctagaactacttttcgatcccgttctttgatcgtactagcgataaataaattttcttctaatggcaagtagggcaaaaaggtttcactagaagaaagcctagtaatggttaattggtttgtttggaaaaaatcggccaatgcgagttcttgttctggagcagaataaatgattccataaacttctcgcaaagctaacgcgtcgaatgaggattttttttcggttatttttttgaatgatggtgtgacattcatagaaaatccctcccttatttcttatgtgtacgtaaataaatcaacgtgaaaggagtcccgcaaacaagaggaatgccaagcaagattaagcagttaacaaagcaattacggattgtataaagtgactgcatacttttaaaatcaaaagaaaacgcttggatcgtttgaatccctaaatgctggatatttgtaatcgtgacatcctggtcggtacttttagctaaaaatgctggagtttccaaatgagaccactgtaaaatagcatcacgagcagcccaaagaacagtattatacgtttcttgaaacattaaagtgaaaagtaaaaaactgaaaattcctaatagagccggtaaacataactctagtaagagctgtttggtgacatacatatttgaaaagtgcatgtgataccatgtatgtatttcttccttttttatgcgtaatgtcacatacatcaacagaagaaaagtaacaccaaagaaaatgacactacctagatagaggtgccaatagtattggatcagttggtaatggtaactagtttgtttttcaatatcgacaaagtctggcatcgttcgtaaaaactctttttcaaaatcaattaagttaaacagcccagtcaataagaaagagaacaggaagaagaagagtgcggtgattaacgtgatttttttatgataaaaactactagctgtagcgtaacggacacttctcatcaactttcacctctctaaactatctttagtatagtgaaataatatgaattawttakgaaaaagtagcaaaaagcttgagcaaatkgctcaagctttttgaagatttatttacccgttttttgatagccttgataactgtcagtgtgatattcatcaacggttgatttattatkgtttttactgtaaacactcgttgattttncaccntttctttttcaattgcttccagttgttgcaattggttcttgtaatcatagtcttctgggttaactggttttaagccgctattggtatagaaacgaagcaagtcaccgttagtaatttggtcagacgtttctaattgtttcgtcgctttggcttttaaatcagcgacttctttcttaacttcttcggttggctctgtaattaaagtgcctgttttagtatcgtaaatgctagaacctaaaatagtatatttaggtgttacaacattgccgttgcggaaagcaacgatttgattgtgttgtttagagaataaatcttggcctaactgaatgtagtttttcgtatcgacaccaagcaagtgtagaagggttggtaaggcatcaacttggccgccatacgtatggttcacaccgccattttcttgaccaggaacgtgaatcatataaggaacacgttgcatattggcgttgtcaaaatcgttccaatctgctttggttttacctactaactctgctaagttttggtttcttgaattagaaaccccatagtgatcgccataaagaacaatgactgagttttcatagagacctgaagatttcaagtagttaaagaattcttcgaccgctttatctaaataattcgctgttgcaaagtaaccattaattgtttcgtcagaggtttttgcaattgggaatcctgcttcatcgtttgtaaattgagaataaggataatgattggacacagcaataaatttagaatagaacggttgttgtaaatgttctaaatattgaacggattgattaaagaatggtttatcgtgtaacccatattggaatgagttatctgaattaacatcataataactagcatcaaagaaatagtcatagcctaaacgtttataggtttcatttcgattccagaagttaccggcatttccgtggaaagcagcgctagtgtaaccttgcgtttgttttaaaatatcgggtgctgcttcaaacgtatttttgccaccaacttgtgtaaagagtgaaccttggtctaaaccaaatagtgaattttcaagtaacgtttcggcatcacttgtttttccttgaccaacttggtggaagaagttatcaaagctaaaggtacttttactattgtaaagactattgataaatggtgtgacttcgtgttctacgccattttcatcttttaatttgtaattaactaaaaattgttggaaactttctaaatggatataaattacatttttgccttttgcaataccaaacttactatcatcgggtgccgcatattgttgtttcacgtaatcttcaacttgtttcatatcgttagcactggcttcggcacggacttggtttgtttggtaagtcgtaatgccatcgtacacggtaaaggcatttaagcctaagaatttcacgatatagtcacgagagaattgacgtcctaataattggggacgttctgtttcagccataaatagattgaataagaaaaagacaacagaaaggagtgtgacagagactgctacacgtgcgcggactggacgcgcatctgttttaatttttttcgttaataataatacgccaataataatgaagtctaagaaataaatgacgtcataaggtctaaagagacgtaaggcactttcgccaagaccgctagctactttgccagcaccaagcatcgtattaactgtgatgaagtcagtaaattctcgataatacacgacatttgagaagagcagtaaactcatcaagaagtaaataatcatcattgtaatataagaagcttttttacggcgaacatacaaagcgatggctaataaaaagaccgttgtggcaattggattaattaagagtatgaagtactcgttaatattttccaaacgtaaatggaaatcaacggcgtacgcaaagaggttttttagccacagtaagatggcgattagcgagaataaccccagtcgcgtgttcaaaatatttgttttaaataattttttcaaaataaacgtcctttctaaacgatgattctataaaagtaaaattaggtaaatttcgtattttacaatatcgctttaattttactctttcacaaattttatgtcaattcttaccgaagtgaggaatggtgatgttaaagaaaacttactatttccttaaactttttagttcgttaaatgacgtgaagcttgaatcctttaaagacagatgggcctttttttgctatactagataggactttgaaaagtaggtgtacagaatgaaacttcaagtaactaaaaaagcagaacataaatttaaaaaaggatatcctttaattcagaaagaagatttgcaacaagtgccagcgccgttgccaacagattggcttactttgattgatagtaaaggccagcgtttagccgaaggatatttaggcgaacaaaataaaggaattggttggttgctgtcatggcatggaccaattaatcaatctttttttcaacaactctttgaaataagtcgtgagaagcggacgtcttttgaaaaggattcgctaacaaccgcgtatcgattatttaatggagaaggggatggcattggggggctaatcatcgatcgctatgcagattacgccgttttttcatggtataatgaaaccctttatcagaaaaaagccgaacttttgacggcgtttcgcacagtttaccctgacattattggtgcctacgaaaagattcgcttttccacaaaagatttaccagaatcacagtttttgtatggcgaacaagcacccgagccattacttgtcactgaaaatggcgttcaatttgctacctatttaaacgaaggattaatgacaggcatctttttagatcaaaaagaagttcgtggtcgattagtagatggttttgcagtaggtaaaacagtcttaaatatgtttagttatacaggtgctttttcagtagctgccgctatggggggtgccgtggccaccactagtgtggatttagctaaacgaagcttaccgaaaacgactgagcaatttgaagtcaatcatttaaatcttgccccgcaaaagrttattgttatggatgttttgactactttaaatatcttcgcgtaaaggcttgmgttatgacatgatcattttggatccgccganttttgctcgcaacaaaaagaaagttttttccgttgctaaaaattatggggagctagtgaaagattctattgatattttaacggataagggaacgcttattgcctcaaccaatgcggcaaatttatccttagccaaatatcaaaaaatggtgattactgccttgcaagagaaaaatgtccgttacaagattacggacacgtatcaattaccggcagactttcaagtgaatcctaattttccagaaggtaattacttaaaagtcctgtttatcgaaattgaaaaataattttttacaccaagcaaaagtcccagcgccgctaatcggtattgggacttttgcttggtntttattttatagtaacttttgggctttttgagtgtttgcaaaatgcagttcgcgtagtttgctaataagtctaggccgccttttttcaaaatacgggcggctacttggtctgatttgctgccagcaccagagggcacagagaaacccaattctgcagattctttgtctaactcttctaaaaaagcagcgcggctaataatagaggcggcagcaacggcaacatgatactgctctcctttagtgacgaagaacaatttttcagtgacttgatttttttcattacgaacatatttccgataattattttcaggggtgaactgatcaattaaaatcccttctggctttgtgggagccaattcttgtagcaacagataaatcgcttggttatgcaaagcgactttcatgtgtacagcattgtagtttggttggatctcattgtattttttgggttcaacgattaataacttgtaaggaatcagttctttaatgacatgtgacaattgaataatttgtgggtcggttaattctttggaatcacgaacacctaatgattttagtttgctaatcatgnttttgtcaacataggcagcacagacagttactggaccaaaatagctaccattaccgacttcatcggaacctatcacaggacccatttgcccaaaatccagcagggcagttggtagttagtctgggggaagaaactttttntcttcttgggtgttggttaccttcggtttccctttcccccaaaaccg

SEQ ID NO: 26 - DNA, 1769 bp; double-stranded, linear
ttcagcgacagggatgttattgatgattaaacgttatcaatcgcaattcgtgttttggctactaggaaatattttttcaattttgttatggttccgagcagggacgcacgctggtggtgattatgcgatatttgttatgtattgtatgtatacttttaactcaatttttggtatgtttaattggttgaagataaaaaataaaatggaaaaaaataggtagggagttcgatggcagtgattgttttagcaggtacgattggcgctggtaaatctagtttaacagctttaattgcaaaccgtttaggttcagaagccttttacgaatcagttgatgataatgaggtattacctttattttatgcggaaccggaaaagtacgcatttttattacaaatttattttttaaataaacgttttgatagtattaaacaagcattaacgcatgaaaataatgtattggatcgctcgatttatgaagattcattactttttcatttaaatgcagatttaggtcgtgccaacgaaacagaggtcaaagtgtacgatgacttattacaaaacatgctccaagaattgccttatgctgcgcataaaaaaagacctgatttgttagttcacattcgtatttcatttcccaaaatgttggaacgcatcaaaaaacgtggccgtccttatgaacaaattgagacagatccaacgttgtatgattactatcaaatgttgaacgagcgttatgatcaatggtatgaagactatgatgaaagtcctaaaattcaaattgatggcgataaatatgattttgtcgaagatcctgaagcgtgtcaatatgtcttggcgttaattgagaagaaaattgaagaattagaaagataaataaaaagaagcaagtccggacttgcttctttttgacttaaaatgtggatagataggctaaagttgctactaaataaaggagtgtagtgctaaattatagaatcggattttaaccttcccctaagttaaaatcggataatctatctatcgacagtttaagtttgtataaaatagcggtagctattatcaacgaagtcattcatcggttgacctgacttctctagaagtataccatcgaaaataaccgacagttgttcaaaatttggacttagtaagtgtaaattttgattgaaagtttctgtaaatcaatcatttattcaaaaaataatgctcgaaagaaggaagataaatgagccaaatttggtttgaacgcattctacgttggcgcaaaaaagcgcaacgatttttacaaggacgttatgcccggttcgatgaattgaatcgaacgctgttgctaacaagtgtcgtgctggcgctcatcaatatttttactggctatctttgggttcggttattgattttaatcacagtcgcctacgtgtattatcgctttttttcaaaacatattcacccgcgattgaatgaaaatcaatggtttattcttcgaaaacaacgcctaatgcaaaaggttcatgcttttcgcaagcgacatatgactcagaaagagtatcgttattttaaatgtccaaaatgtcagcagtcattacgtgcgccgaaaggacgaggaacaatcaaagtcacttgttcaaactgtcaaaatcaatttatcaaaaaagtctgatcttctgtgttttttggtctaggcaactttcggacttgtggtatacttgagaaaagaaaccattggatattctaaaaggggaatatcttgktaaaaaaggagagraaaaacaatg

SEQ ID NO: 27 - DNA, 1908 bp; double-stranded, linear
cngtcgttgacgcatcaacgcctcnctcgagtatatgngttcaccttcaccgcgtttaatagcaaacgctgttaccgttaaattttcattggcattagctaatcgatttgttacttctgcaatcgttgcttcgacattttccttttctttggcaacaataagactgacagaagacttataggtaatcaccgcaaaaatggtaaaaactacaaatataaagaaagaacttgcgaaagcccactttatagttaaagatgggccttccagttcttttttaatcgttcttttcattaattagttctcacgaacgcataacgtagccagttccacggacagtttggatgtagctttcttctccaggtacgtcaattttatttcgtaagtagcggatatacacatccacaacgtttgtttctacttctgtttcatagccccaaactttatttagtaacacatcacgtgccaagacaacgttcacgttttccattagcgttaatagtaatcgtattcgcgkttkgttaattcaatcatttcagaattacgacgaacgacacgattttctttttcaattgttaagtcacgatatgtaatcgttgtttgttttgcaacgtttttatcgccctcaatatcaatacgacgaagtaacgcacgtaaacgagctaacaattcttcaattgcaaatggtttaacaatataatcatccgctccatggtctaagccagaaacacggtcaattactgaatcacgcgcagtcatcataataattggtgtatttttcacttggcgaacacggcgacatacttctaatccatttaattctggtaacatcaaatcaagaaggatagcatcccattcgttgttaagagcggcttccaatcctgtacgaccattgtagtgtacttctgtcgtatacccctcatgttttaattcaagctcaacgaatctcgctaagttcttttcatcttcaataattaaaatgttgctcatttgattaattgtcctttctctttaaaagctatactcaagctcaacctttttattccttactacttattagagaattactactcaatctatctggttcttttttaagccacagtaaaaccatgagcatggtgagccacactcatggtctccagcgtgtttattcttcgttgtaccagctgtaatggtagattccttctttgtctgtgcgttcgtacgtatgagcaccgaagtaatcacgttgtgcttgaattaaattcgctggtaagcgatctgaacgataagaatcgtaataagcaattgcagatgagaatgttggtacaggaacacctgcttgaacagcaatcgcaacaacttcacgaacggcttgttgatattttytcgtaatttctacgaagtattcatctaacaacaagttttcaagtgctggatttttttcatatgcatcggtaattttttgtaagaattgtgcacggataatacaacctgctcgccagatttttgcaatttcaccaaatggtaaatcccatccgtattcttcagaagctgcacggagttgtgcaaaaccttgcgcataactcattaatttactaaagtataaatgttcgcgaattttttcaatcaattcttttttatcgcctgcaaagttaaaggctgcaggttttgataaaatgccacttgcttttacgcgttcttctttgtaagccgaaataaaacgtgcaaatactgattctgtaattaatggtaatggtacgccaagatctaacgcactttggcttgtccatttacctgttcctttgttgcctgctgcatcaagaataacatcaacgattggttggtcggttccttcatcatctttacgtgtcaaaatgtcagccgtgatctcgataaggtaactgtctaattcgcttcgttccattcttt

SEQ ID NO: 28 - DNA, 7515 bp; double-stranded, linear
tcttctatkgttaattgcawcttgtccaactccttgycttcttctacattataactaagttaggtgactttttcactaataaccaattgaaactttttcttgaaaactttttgcatttttcataattttgcgttattagcggatacattaatgaacttatggtaaactaacattctggatggttcattccagccagccaattaaaaactatttttagagcgttcaacacgcttattcatgatttttttataaaggtggacttattttgatgaaaaacaaatcgaagcttttatggttaggaagttttttcttgccgtttttacttctgttgcttgtatggatgacattacaacttgcgccttttggtgacaacaacttattagttagtgatttaggcacacaatacatgcctttcttgagttttttaaaacgctcttttcacgagggaataactacattctactctttttccaatgagattggtgaatcgattgttcctttggcagcctattacttactgagcccttttaatgtgttggctttcttttttccttatgaacaattacctatagcaattttatggattattaccttaaaacttgccttgatgggcactacgatgtttagctatttaaaatacacctatcaaaaagttgatggcaccacgttacttttttcaacgtcctatagtttctgtggctttgtcaccgtctatagccaaaactttatgtggttggatgcactgattctattcccgcttatcttattgggactccaacgtttatgggatcaacgcaaatggggcttatacagtatcaccctatttttagcgattgtgacgaattactatatgggttatatgatttgtctctttgctgttttgtacagtatctattggttctttaaaaagaataccaaagcccatgctattcggcaattttttaaacaaagtccgttattcatcctcgtttcttttttaacaggaaccgcaactagctttttattattacctgcagcagaagggatgctctatacaaaaaaagcagactttgatgtctcgacgttctttttaacgcctaagttcaacacttcattcttctcgcaattaggcttaggttctattaattatgagttgcgtctagaccatttaccaaccgtttttgctggattatttgtgacactcctctgtgttgcctattttcaaacgaaacaaattgcgttaaaagaaagaatagcttcagcaattcttttattcattctttttttaagcttttggttagaagcctttaatactgtctggcacatgtttcaaagcccagctggtttcccttaccgaaatgtctttatttttagctttttattgattgtctttgcctatgaagtttggcttaaaaaagtgaccattccttggaccgcacctattatttttagtctgctgttagtcattggctacggatctttgtattatggtccacaaaagaatctcttaatttcgatcaattatttatggctaagtttactttttatttggttgattttcttttgcttgcgtttagcgcacaaaaaggccttaagaaactatgtagtcgtggctttattcttactggtcagcacagaattaacaacgaatttctggatttcttttaaacacatgccctttggtagccaagcaacatttgcccaagattaccgaaaacacagccaattaatcgatgaaaaaatggcctcagcaccagaactttatcgcatgaaacaagtcattccttccaaagaaacagggttccgtgaaatcaataacggctacaataatcctttactttatggctatgctggcgtttctagctatacttcgactttaactgccactacccaagacacattaagtgcgctaggtttatatcgaaaaaatgatcgccggattgcttatgtggataattcacaactaactaatttacttttaaatgtgaaatatgactttttaccaattgaaaaacctaccagtgaaaaattgctaaaaacagttggttccacgaaaatcatggaaaacgatgaagcgatcggtatgggctttttggcgccaaccgcattaaccaagttaaaattagcaaaaaataatcctttagatgcccaagaagaactcctgcaaacgctcgtgccgacggataaaccttactttaaaacagcttcgttgataaatgaacctcatcataccaacgaaacaattgaagcaacctttaaagtgaatagcactggtgacttgcatctttatattccgaatttaaaatggaaaaaagttacacaattgaaggtaaaccaacaagttatctcgacgccgatttatattgcaaccaatcaactgttcaatttagggcattttgaaaaaggaactaccgtgaccctgtcactaactgctgaacaagtggttgatttaaccaattggcaacttcaaactttagaccaaacagcctttaatcgtgcggttgacaaattacgccaacaagctcttcacgtgaatgcaactaaaaaaggccatttaaatggcgcactgaatgtacctggaaatgacactcagttactgtatacgtccattccttatgaccaagattggcaagtcaaatcgtcgctacaaaaagaacccttaaaaacacaacgcattctaggtggctttttagctgttgaagtcccagctggcaaacagcagttaacctttgcctatcatccaagaatgatttatctcggcactgccgtcagcggaacgattttactgggaacggctggttatcttgggtttaaaaaataccgtcgaaaacgtcaggaggccactcatgactaatcagaaaaaatttttaaatggactcattcggtggttacccctagttggactggtgcttttcttcggcttaattctatggggatattccagaggaatttttcattctgttgcttccttgcaagcttttattaaacagtttggtaactatgcggttctgtgtttcattcttttacaaatcgtccaagtgattatccctattctacctggaggaatctcttctgttgcaggaatgttgatgtttggcaatttgcaaggacttttgtatagctatcttggattgattaktggtgagtttattggctttttactggttcgttactatggacgtagctttgtaaaaataatcctttcacccaataaatacaaaaaatttgaagagattttggacaaaaatgaacacaatgtcaaaaagctcttaatctttactatgttagtccccttcgctccagatgatattgtttgtttagtggcgggaattacagatatttctttaaaagaattcatgaaaattgttcttttattgaaattctggtctgtggctacttacagctatttaatgttgtatttgtttcaattatttggcaaattataacaaaaagacaacaaaaccaacgttggttttgttgtcttttcttttttagattgaacgtaattgggcaatccgttctttgacagcctcttgtttttcaaggtagtccttttcttttgcacgttctgcttccacgacctcatctggtgcatttgacacaaaacgttcatttgaaagtttgccttgcacacgtttgacttcttttgtccatttgtctaattctttttctaagcgagcaatttcttcctcgatattaatcaacccagctaatggtaggaatagttctgcgcctgttaaaacagcggacatggctaattctggcgcttctatttcacgactgatgactaattcctctgggttacagaagcgttccaagtagctagtattagctgttaaaaattcttctacttctgtatcgtttgttttaattaacaaggtaattggtttagaaagtggtgtattcacttctgctcgaatattccgaaccgaacgaataacttctttcagaacttccattcctcgagctgctgcttcatcgttaaattcttcatgaacaactgggtactctgccacaaccaatgactcaccttgatgcggaattttttcccaaatttcttctgttacaaacggcataattggatgcaataagcgtaagatttgatccaatgtgtacaccaagatgctccgtgttgtttgtttagctgcttcattgtctccgtaaagaatttctttactcatttcaatataccaatcacagaaatcatcccagatgaagttgtataattggcgacctgcttcaccgaattcaaagcgatcaaataattctgtcacacgggcgactgtttcgtttaagcgcgttaaaatccaacgatcagcgacagtcttttcaccactaaagtcaatatctgcagcagtcataccttctacattcatgataacgaaacgacttgcattccagatcttattgataaagttccaagaagcatccattttttcataactaaaacgaacatcttgaccaggtgctgaaccatttgataagaaccaacgtaacgcatctgcgccatatttttcgatgacatccattggatcaatcccgttccccaatgatttactcattttgcgtccttgctcatcacgaattaagccgtgaattaagacattttggaagggacgttcacctgtaaactctaagctttggaaaatcatgcgacttacccagaagaagatgatgtcatagccagtaactaatgtgcttgttgggaagtaacgttggtaatcttcgcttgcttcattcggccaacccatcgttgaaaatggccataaagcagaactaaaccatgtatctaagacgtcactatcttgaacccagttttcactgtcggctggctcttccatcccaacatacatctcgcccgtttctttgtgataccaagcaggaatttggtggccccaccataattgtcgcgaaataacccagtcatgtacattttccatccaacgtaaaaatgtttgattgaagcgtggtggataaaattcaacagcgtcttctgtttcttgatttttcattgctttttcagctaatggtcccatttttacaaaccattgggtcgataaacgaggttccacgacaacgcctgttcgttctgaatggcccacgctgtgattcattgtttcgatcttaattaagcgacctagttctttcaagtcagagacaatcgctttacgtgcagcaaaacgatccattscctcgtattttccagccagttcattcatcgtgccgtcttcgttcataacatttactcgaggtaagtcatgacgattaccgacttcaaagtcatttggatcatgggcaggtgtgatttttacaacccctgttccaaattccatatctacatagtcatctgcaataattggaatttctttatcgactaatggcaagacaactgtcttaccaataagttcttgataccgttcatcttctggatggaccgcaatcgccgtatctcccaacattgtttcaggacgcgttgtcgcaatttcaacaacgccagaaccatctgataatggatagctcatgtggtaaaaagctccttcaatatctttatggattacttcaatatcagacaatgctgttttcgcttttggatcccagttaatgatatattcaccacggtaaatcaaatctttctcgtaaagagagacaaacactttacgaacggcctcagatagcccttcatctaaagtaaaacgttcacggctgtaatctaaagaaagacccatttttgcccactgttcacgaatgtgagaagcatattcttctttccattcccacacttgatcaacaaatttttcacgacctaagtcgtaacgtgaaattccttgttgtgctagtttctcttctacttttgcttgcgtggcaattccggcatggtccattcctggcagccataacgtatcaaagccttgcattcttttttggcggataatcatatcttgtaatgttgtatcccaagcatgccctaagtgtagtttccctgttacattgggtggtggaataacaattgaatagggcttcgcttttttgtcgccactaggtttaaataaatcttgatctagccatttttgataacggccagcttcgatttctgtcggttgatatttcgttggtaagtttttttcttctgacattttttccccttctttcttaaaatacgcgatttggagcggtaattattttacaaatgagttttttaggctaaacactaaaatacgccctaaaatactttcgtattttagggcstagattcatcttatttacgcggtaccacctaaattgcatttgaattgaattccttcaaatgccactcattcgtgagataacgttcacgaaacgaatcgttctactaacgtactgtgttcaaaccattgactcacaagctaccttctcactggttgtgtaaaagtcttgcacctgaacgactttttctctaaaacgacgccaatgatactcctcttgttcgctgtctttgcttcattctacaatgaagcgcaagcaaagtcaatttgtaatctagagggattacactttttttgcagattctaacgcttgttgataatcgggttccgacgaaacttctgagacgatttcttcataaactaacgttccttctgggtcaatcacaaaaatagcacgtgctaaacggcccatttctggaatatacaaaccataagctgcaccaaatgagtcttcagtatcatgaagcatttccatttcgacaccctcagcggcacaccaatttgcttgttcttcaactgtgttattggaaatcgtgataatctgaacaccgtctaatttcgccgcttcttgattgaaacgtttcgtttgcagtgaacaaacacgtgtgtcgatatcaggaaccacactaattaaaaccgttttacctttataatctgccaagttgatttcttggttgtttaaatttttcaaagaaaagacgggagcttttgtgccaactttaggctgctcacctgtcaattctaatacgtgcccttttcttgtaacattcattctgaaatcctccttttccactttcaataataagtatagtagaggatttttatgaagacaattttattgctttgggctatttgctagtgaaaaagtttcattaaaataaatcagtgtttgcagttccgttgttaaatcaatatattgcacactaacgttagctggcacactgacacggtctggcgcaaaatttaaaatcgcagtcacacccgcttgtacaattttgtcgatggctttttgagcatggtgacttggtactgtagaaatggctaccgtgaccccttcttgtcgaacgaatgcttctaactcagacatatcatgaactaataatccattaatcgtggtgccaactaaagccgaatcattatcaaaagcacagacaatattcaaattctcgttgcgtctaaaattattttttaataatgccttgcctaaattgccacaaccaatcagagcaattcttttttcttcttgcgtatttaaaatattactgaatacctcaattaaatacggcacatcgtn

SEQ ID NO: 29 - DNA, 7156 bp; double-stranded, linear
atatggccttcactttagtgaagagatttaattgtctttacagataaacgcttaattttagtcgataaacaaggaattacaggtaaaaaagttgattataaatcgattccctacaaatctatttcacgcttttctgttgaaactagtggacatttcgacctagatgcagaactaaagatatggatttcaagtactgagttaccttcagtaagtcttcaatttagaaaagataaagatattgttgctattcaacaagctttagcagctgctgtattatcttgaatacacaaaaaaagacaggaaagcgaccaactttcctgtctttttaattktagataaaataaaaaaggcttctcagccttgatacgttccttattcaatcagacacatggcggcacttgcttagtgctgcttccttccggatctgacacaattcactagcccgccattgtcctagcctttcggcaaaacctagtataacgtatttttattcttttgactagtctttcttttgattttttaaaagtttctcttcttttttctttgcccgtaactttttaaagaactgaactagcaataagcgacactcttcttctaaaacgcctgcttcgacataggccacatgattgaagcgttcatcttctaataaattcatcaatgtgccagcagtgcctgctttaggatcagttgcgccataataaacttctggaattcgtgccaaaagcatcgccccactacacattggacaaggctctaaagttacaaataattgggtttcttctagacgccaattttctatcccgcgacacgcttcttggattgcatacatttctgcatgcgccgttgcttcttgccgtgcttctctcagattatgcccgcggccaataatttccccttgccgaacaattacagctccaataggcacctcagccaaaccttctgcttttttcgcttctgcaatggcttctcgcataaaaaattctttttcttcttgtgttaacgttgtttctttttttcccaattaatttccacctttcggctttttcccactaaacttctgtcttgcttcatggtacaataaatcagtgaggtgtgtctatgattattgaaaatttatctcagctttatcccaaaggctatttatcaaaaacaattggttccgaagccacctattcaattcctgttgacgaccaatttttcattgtgaataaagctttcttaagtattaaagaacagcatttgttggaagcgcttttcccaatttctgaaaacccaacaattactggtaaccatccttggttcagttacttatttcaacaggcaaaattacctgccgaagggacctttcgtatgttgcaaattcaaacgaatgtcacaaaagaattacaagctgaatggcaatttaatttaacaaagatgtttccagatacagttgattgtttcagtccaagtaataatatgtatattttagttgaagaacagtcaaaaaatacctttcaacaagaagaaattcaagggatctttttaacattagatacagactttgattgcactagtgctgtatttgttggcaatttttattcctctgaagacattctccggcgttgtttccatgaagaacaacgtattttttcagaagaacttaattcctctagtcggacgactgtttttagtttaactgatgttgccctccactattttaccaaggaagccatgagccaaaatgtacttgttgagtattatcgtcgtttattaaataaagacaccgatattcagccaatcatcagcgctttatggaaaaatcaaggcaatatcagctccactgcaaaagatttatttatgcatcgaaatactttacactatcggttggaaaagttttttgaacaaactggcttatctttaaaaaaaatggatgatttaatcttttgttatttgttattaagaaagtagtacgtccattttttactcgtatgttttttattcccaattagaaagtaggcgttccaatgaaaattaccgcatatgtcgctagtgcatttagtaaaaaccacgaaggtggcaacaaagcaggcgttgtttttatgacacagcccttaacgagaacccaaaaaatggccatcgccaaagaactaggatttgcagaaactgcttttatttcagactcaaagattgctgatttccgccttgaatattttacaccaaaagaagaagtcgacttatgtggccacgcgacaattggcgctttcaccattatgaagcacttaaataaattattgcaaacagcatatacaatcgaaacgaacagcggtttgctcgcaatcacggctaacggtgaacaactatttatggaacaaactgtcccaactttttatgatacgctcactttagaagaattgagcggctgctttgatttaaacgcagtggcaactgcttttcctatccagattgtgtcaacgggcctaaaagatattttggttcccattaaaaatgcgcaattattacaggatttacaaccaaactttgaaaaaattaagttacttagtcaaaagtatggagttattgggatgcatctttttgctttgtctgaagaaaatatcatttgtaggaattttgcacccctttatgatatcgatgaagaagccgctactggtacatcaaatggtgcgttagcttgttatctgcaccatcaccaaattttacaaaaaaccaattacacctttgcccaaggttataccttaaacgctccttcagaagtcttagtgcgtttgaacactacatcccaaaagacaattgatcaagttctagttggtggcagaggctattatgttgaaacaaaagaattatttttataaaaaaaagatggcctaggccacttttttaacttcattgcatcttcaataaatgtgaaaaagcgttcttttaaagaatctgtattgtctttaactttttcgccatattcagctaattttgaaccgccatctttcacacgatccacaacatttaaaacagaatctaattcatcatcggataaatcatcgacaatcgataataatttttggtttccatcaaatttatcgtctacaaactttttaactttataacgattggaaacatgagataccttcttaataattttttcagaagcgatgactgcaacagagacacttgcaactgcagcaatgcttaaaccgataccaatttttgttgatgctttcatttccttcagctcctctgttattttctactttaatcataacatattattactttwakgcgtawtrgaaagrcctttactagcacttagtctcgtcggttattgccaccaaataaaataaccaaacgtaaaagttgtaaaaaggtcgaaagcgccgctgctacgtaggtaagtgcagctgcaaaaagaacttttctggccattgggacttcttcttctgttaataacccaccttcagaaagaatacttaatgcacgtctagacgcattaaactccaccggtaaagtcaccaattgaaaaatcaaggctaatgaaaaagccaaaattccaatgttgattaatgtttgattccaactaaataaaacaccaagcaaaattagtggaaaggaaatggttgaaccgatgttggcaactggaacaatagctgcacgaagacgtaaaggcacatagttcgtatgatcttgtaccgcatgtccgcattcatgagccgccacgccaatagccgcgaccgatgtcgattgagcagtggcttcggataagctcaacattttgtttccagaattataattgtcggttaaatcacccgcaatttgctgaactccaacatcattaatttgttctttttgtaaaatatattgtgctgcctgcgtgcctgtaacatgtttactgcttcgtacttgatcatatttacgaaaggtactgttaacatatgcggaggccgcaccagaaatcgcaattccgataattaccaatatataggttggatcgattccaaaataaaagggcatcattgtcctctacctccatctttttttctttattgtagcatgatagtgaaaaaaagggagcgacaaacgttgtcttttgtttaaaaaaatgatgaatttttcaagaaagtgccgaaactaacaaaattgtcactcaattaacggaaaaaaatatggcaaatttcctaaaaaaaaggcatactattccttgaggtgaggaaaatgaaaacattactaaaaatattaattcccatagtcattttagccggtggtagctggggcgtttataattactattacggtggagaagcctattatacacaaatcacaacatctggtgaaaagaaagatgaaaaaacaaattctggtgaagcaatgaccatttattactatcaacaacctgcgtttaataaaaacggtgaagaaaaaaccgtggaattaaacgaatcccgtgatcaacctttgcgtatgaaagcctatctaaaattgaaagttaatccccgtaaaggcgtgatcagctggaatgaagtgacagaaaaagaagtccctgaaaaagctttagaaaaattaaaataaagaaaaaaccgttggcaagcgaccaacggttttttctttataattgattactaattttttcgatattttttagcataatggacactgtgccatctggattattaacaaattcaattaaatcgccattgcggtaaacatctaacggaacaattaattcaataccgttatccatttttaacttctgtttgccaaatttcttttcagaaatttcgcgagattctctgactggcggtgttttgtcgacaaacttcgattcattcacttcttcttggtaagctaatttagctgatacattttctttaaacacttgctcagcaatctgctcattgtcaatcgtccccgtttcctcaatgctatcatacaccgcttcttttacagaagccattagttcaaactcatcttcgttaaatttctttccaatgcgtttgactgcctttttaatttctttgatattttcttccatggaaggtgccgcttgcgtctcaatcactttttcagagaaataccagattttttctcctgaaaattcatatcttttctctagtaattcaaacgctaatgtatctaagtcaaccgtaatcccttcatctggtttttgtgattttgaagacaaaattgctcggttgataatcagtttgttataaacggattcttcttcatagtcgacgtaatgcgtgtaactttctttatagtttaatttaatcattgcgacatgtaacaccgtatctaattcatataaaatgaacaaaatatcagcactaggcgcatcttcgcttcctgaataaacatcataccaatgttgggtaacttcttggcttttctttataaaatcactaggaatcccacgtaacgtgtcaacaaaggaactattttccgccaatgttccagtctttgtttgtgcagtcgaaagttttgaaatttttgcagttaaatacgttcgaatatactcggtcgttaaatctagttccttttcagagaaaaccggcgtcccagtttctcgatcaataatgtgtaaaattgctttttttaaataaatatccatttttacgctctccttttctcaacctttttagtctaactgaaagagagaaaaaagccaatagtttctataaaaagargaagaattcgtagacaaatgtctacgaattcttctttacttcaaaaagcgattacccttcttcgctgtataacatccctgttgcttcatcaactggatcgactttattaaaaatgcctttctttctgaaaatataagttaagcccattggtacgataatggcaatcaccattgcgcctaaaaacggcaagtaatattgtggcacaatagataaaattcctggcaagccaccgacgccgatactggtcgcacgaacgcccattaaagtggcaaacattcctgccattgctgaaccaatcatgcccgcaacaaatggataaacatattttaagttgatcccaaacatcgctggttcagtcacacctaggtaacaagaaatcatcgctggaatcgaaacttgttcttctttttkgtttccmcgatgcataaagataaccgctaaaacagctgaaccttgtgcaatatttgatagagcaatcattggccataagttggttgactgaaagtcagcaatcaactgtaaatcaatcgcattactcatatgatgcaacccagtgatgactaatggtgcgtacataaagccaaagacggcgccaaataaccaattaaatgttgacgttaatcctgcatttacgatatcagaaacccaactaccaatcgtccaaccgattggtcctaaaatgacatgtgcagccaatactgttggtactaaagcaaacaatgggacaaaaatcattgaaattgcttgaggaatcacttttctaaagaaaatttcaagataggcaagcaagaagccggctaacatggctgggataacttgcgcttgataaccaatcatgttaacttgagcaaacccaaaatcccagaaaggaatttctgctgctttagtcgtcgcaactgaataagcattcagaagttgtggtgagactaatgtaatccctaggacaatccccaagatttgtgtggttcccattttcttcgtaatactccacgtaatcccaactggcaagaagtggaaaattgttcgccgattaaccataagaatgaattgactccattccaaaattgagaaacttccacgattgtttgaccatcaagaaagccaaatggaaccccttccaaaatattgcggaaccctaaaatcaatcccccgataacaagtgcaggaatcaatggtgtaaaaatctcagctaaaacagaaacaactcgttgaacaggactcaaattacttttggcagctgctttcccttcttcttttgaaaccccttctaaaccggaaattgcagaaaaatcattataaaattgtgggacttcattcccaataattacttgaaactgtccagcatttgtaaaggttccttttacagaaggaatatcttcaatcacaggtacatccgctttttttggatcttttaatacaaaacgcattcgagttgcacaatgagaaacagctgaaatattttctttgcctcctactgcttt

SEQ ID NO: 30 - DNA, 1282 bp; double-stranded, linear
attcgttgtaattccaactggaattcctaatacgaacttagaaacgtcgtatccatttcttgctttaatgtcagttgtttttggaccagtagctggagggctaattggtttgatcggtcacacgttaaaagattttaccacgtatggtagcgcttggtggagctggattatttgttcaggaattattggtattatttttggcttcgctggtcgtaaaatggatcttcaacatggtgaattcacaacaaatgacatggtgcgtttcaatattttccaagcctttggcaatatcgtcgtttggggcttaatcgcgcctagcttggatattttgatttatagtgaacccgcaagtaaagtgtttacacaaggcgtattcgcgactgtttcaaatattgtcgctgtggggattattggaacattgttgatgaaagcttatgcatcaacaagaacaaagaaaggcagtttatcaaaagattaagaaactgtcgaaataatttaaatggttaagggtctgccctagtaattactttgctaatgctcagaccctttcttttatggagaaactgaggtgaggccgaatgaaaaaaccaatcattacttttaataatttttcctttcaatatcatagccaatctgaaccaacattaaaggggattcaattaaccatctatgaaggagaaaaggttttaatcgttgggcctagtggtagtggtaaatcaacattggcgcaatgtatcaacgggttaattcccaatatttatgaaggtgagattcaaggaacagctacggttgctggtaaaaatatccaagaaacaagtctatttgatttgtcttttgatgtaggaactgttttacaagataccgatgggcagtttatcggtttaacggttgctgaggatattgcttttgctttagaaaacgatgcagttgaacaagcagaaatgaaaaaagcggttcagaaatggtccgagattgttgagctgaatcagttattgcaacaccgtccacaagatttgtcaggtggtcaaaaacaacgtgtatctatggcgggcgttctaattaaccaatcaaaaattttactttttgatgaacctttggctaatcttgacccacgagcgggacaagaaacaatgactttgattgacaccattcaacaagaaacaaaagcgactgttttaataatagracatcgcttagaggacgttctttgcgaatcagttgatcgaattattgtcatgaatgagggcacaattattctgatacaacgccagatgaattgtta

SEQ ID NO: 31 - DNA, 5840 bp; double-stranded, linear
taaggattgttactgctttgcaggcaaaaccagagtcttccattaacacaatcagtggagggattctgggctttttttataaaaaagtgaggttgcattcatcatgaggattgaaaaagttttaaataataatgtcgtgctttcaagaaatgagcaaggcgaagaaattgtttatatgggacgcggcttagyctttcaaaagaagattggagacacgatcaatccagattatgttgaaaaggaattcgtgttaaaggactccgctatggcagggcaattccagcagctgtttgaagacgtccccaccaaagaagtagaagtcgtcaaacaaatcgttgatttagcagaaacaacgctagcgattgagctttcatcaaatatttatttaactttaacggatcatattcactatgcgttacttcgagccaaagaaggaattgatattccgaatcctcttgtattcgaaacacgcaaattttatcctaaagaatttgaaatcgcaaagcaagcattagcgattattgctgaaaagctaggggttcaattttcagaaaatgaagcgggcttcattgcttttcatattgtgaatgctgaacaaggaaatggcaatatggaagttaccatggaagcaaccaagatggttcgtgatattttaacgattattagtcgctactttggacaggtgtttgatgaagattcattgaactatcaacgaattgttacacatcttcaatattttgcgcaacgttatttaaaacaagaagcgcatgatgaggaggacgaatttctttttgcattggtccaaggaaagtatcctaaggcgtttcaagcggtccaacgtattaatgagtatttattaaaaagctatgatcgaccaattgatcaagcggaaatgatttatttaaccattcatatccaaagagtggtcaatgataaaaaagcataacaaccaataatcgcggattgttactgataatgcaggcaaaacctagattgaaaaaaccgataacgattttcgcagactgcgcactgtgaagagaaggatctggctctttttcaatgtaggtttttttgatattaaaaattaatggaaatgaggtctagagatgagtaaaaatcaagaaattgcagcacgtgtgttaaaagctgttgggggcgaagscamcgttaatagkgttgktcactgtgcyacacgcttacgttttaaattaaaagrtgaaaataaagcagatacagctgcattgaatgctgacccagatgttattcaggtagttcaaagtgcaggacaatatcaagtggttattggcagtcacgttagtatgtctataaggatttgatggccaacagtggactaggtaatgattctgataatagagaaaaagaaagtggcggaaatatctttaaccgtttaattgatattatttcttctatttttacaccgtttttaggtgcaatggccggcgctggggttctaaaaggcttcttaacattggctgtaactatgggctggttagctgacacttcaggcgtatatcttgttctcttttcgattgcagatggtttatttactttcttaccaattatgttagcgtttacggctgctaaaaaattcaatactaatccctttttagcggttgctttggcgatggccttggttcatcccagcattactgctttagcaggcaaaacaattagctttgctggtcttccagtgattattgggccaagtggctatacttcttcggttttaccaattatttnggctgtttttgcacaaagttatgtagaacgtttcttcaaaaaagtaattccgagttttctacaaattatctgcgttccgttagctgttttccttattatggcacctgttaccttcttagctattggtcctatcgggacggtcatcggcgattggttgggacaaggatacaacgcaatttacgcttttagtccaattatcgcagggttattaatgggttcgttgtggcaagtcttggtaatgtttggtatgcattggggctttgtaccaattatgatgttaaacttaacacaaggtggcgatacgatggtaccgatgttattaccagccgttattgcacaaggcggggctgctttagctgtctttttcctaacaaaaaatgtgaaactaaaaggtttggctttgtcttcaagtattacgactatttttggaattactgaaccaactgtatatggcgtgactttaccattgaaaaaaccatttattgcagcttgtattggtggcggtatcggtggtgcatttgtggctatgaatcacgtgaaaaactttacgtttggcttggttagtatgttgagcttgcctggctttattcctgcagagacaaaagatactgcaccgatgattactggtgcaattggtgccggaattgcctttatcattgcgtttgtcttaacgtttgtcttacgttttgaagatcaacctaatccagaaacagcaactgaaaaaacagaaactgataagatggtggcacctgtaaaaacgaatcaagaagacaaaattattttagcaagtccacttcaaggtgaaattttaccgctagaaaaagtacaagaccctgtttttgcttcaggtgctttaggaaaaggtgttgcaattgagccgactgaaggcaaactgtatgcacccgcagatggtgaaatcaccacattatttccgacaggacatgctgttggcttgacgacaacagagggcgttgaattattaatgcatattggcatggatacggtcgaattagatggtaaaggctttgaattatcagtgaaacaaggtgattctgttaaaaaaggagatttgctagttacttttgatattgctgccattaaagaagctggttatccggtagttacaccgattgtggtaacgaatacgaatgattatttagatgttttggatatgaaccaaacagacgtgttacatggtgaagactttttagccattattaaataaaagacaattggaggaggaacaagtatgacaacaacgacaaaatttccaaaaggatttttatggggcggtgcgaccgcagccaatcaattagaaggggcttacttagccgatggtaaagggttatctgtggcagatgcgatgccgggaggaaaacaacgtttcgctattttaggagatgaagcgtttgattggacgattgmcgaaacgaaatatcgctaccctaatcatacaggaattgatcactatgatcgctttaaagaggacattgcgttgtttgctaaaatgggcttcaaatgttatcgcttttcaattgcgtggtcgcgtatttttccacaaggagatgaaacacaaccgaatgaagccggcttgaaattttatgatgcggttatcgatgaatgtttaagctataacattgaaccagtaattacgatttctcattatgaaatgccactgcatttagcgaaagaatacggcgggtggaaaaatcgtcaattagttgacttttatgaacgttttgcggaaactgttttaacacgttaccaccaaaaagttaactattggatgacattcaatgaaattaattcagcttttcatttcccagcgcttagtcaaggattggtaaaaagcaatggagccaatgattatcaaaacattttccaagcatggcataatcaatttgttgcaagtagtaaagctgtaaaaattggccatgaattaaatccagaattacaaattggatgtatgattatttatgccacaacgtatggcattgattcgaatccagtcaatcaagttgctacaatgattgaaaaccaagagtttaattattattgtacagatgttcaagttcgtggtgaatatccagcatacgcagaacgcatgtatcaaaaatatgctgtgaaagacttagttattgaagaaggagatttagaattattaaaagaatacccagtggattacattggctttagttattatatgtcgactgctgtcgatgttactggtactaccaacgatacagcaaatgggaatcttttaggcggcgttaaaaatcccttcttagaagcaagtgaatggggttggcaaattgatcccgaaggcttacgaatcgccctaaatgaattatataatcgttatcaaaaacctttatttattgtggaaaacggcttaggtgcaattgataaagtagacgaaaatttctatgtggcagacgactatcggattgattatttacgtcgtcatattgaagcaatggcagaagcagttgcagacggcgtcgatttaatgggctatacgccgtggggctgtatcgatttagtcagtgcttccacaggtgaaatgagtaaacggtatgggtttatttacgttgatttagacgatgaaggaaatggtactaaaaaccgttatgaaaaaaaatcgtttaattggtacaaacaagttattgaaactaatggacaaaacttagactagttattgtaattaaacaaaacaagataagcgtagtaggttgttgcttctgtttccgctgtttattaatttttaagcttggaccaaaaatctaaagtgatttttggcccaagctcttttttgtcaatttttcaaaatagtgcacaatacgttataatagaaacaactgagaggagcgtttctaatgattaagcaattacaacatccattttttgttattatgggtccgagtggttctggcaagaccgcaattacaagtaaggtttttccgaaaaactataaagttatctcgcatactacgaggaaaaaacgattggatgaagtggatggcgtggattactattttgaaacaaaagcaagttttcaagccttgattgaaaccaatcagttagtggagtatgatttttaccatggaaactattacggtgtcggtgtagctgccatcgttgaaacaacgaaagagcatccagcctataatgcgttaacttttccaggctttcaagcggtctttgagcgtttcggcgagtccgtcattccagttttttttgacgtttcaaaagaaaatatttatcaacgtttaaaacaacgagaatctgatcctaaaattattgaagaacgtttaaacctttatgatcaagaaattcttatcaaaaaccaattggaacaatatcctaattatcaacgaatagatgccaatggacctataaaagaggtcgctggcttgttacaagaatgcatcaaacactattattaatcaagcaactggtgagacagaatctaacatcaattttgtcttgctaggtgcttgattttttttgtaaaaaacttgcattctgaatagagagtgctataatgacatggtgtcatatgacaatgtgtcataaaagggaggaacacaaatatgcctacgaatacgttttttcatttgccagaagaaaagcaacaacgcttattagatgctgcgcaaattgaattttcgcgccattctttacaagaagcgtcaattgcaaatattgttaaattagcgggaattccgcgcggtagcttttatcaatattttgagaacaaagaagatttgtatttttattactttgcgacattaagaaaaaatagtgaacgagatttagagaaacaaattattgcggaaaatggtgatttaatcgaagccatggatgtctatttctccaaaatgattgtcgaagtgctaactggagagaatgcttctttctatcggaatttatttgtcaacatggactatcgtgcttcacgtcgggtgacgggatnaattttagccgactgggggaagagggaaaaaaaatagggaaaccagccactgtccatnaagcctagangggaggaaaaaggnccatgcctgccccatggcgga

SEQ ID NO: 32 - DNA, 6590 bp; double-stranded, linear
cgatctttttgacgacgttcaattttacgttttttcttattgctgtcttcaattgcccaattaatttttttcttgtatcctggtttaatttttttctttttctttttcactaaaccaattaacgttgggtctaattcttctcgagatttttctcgttttgttcgacgattacgatcatacgtctctacaatctcaccatttttaatttcttttggtttgaaagaaacacctaactgctcaatctgagtaatcgcttcatcatctgctggtgaatataatgttatggcagtcccattcaatccattacgtcctgtgcggccaacccgatggataaagaagtccaattcatgtggaacttctgcattgatgacatgtgaaaccccttcaatatcaatcccacgtgcggctaaatcagtagctactacatattggtagtcaagattttgaacttgacgcatcacacgttttctttcgcgtggtgtaatgtctccatgaattttggcaacttttaggccctgatcttttaagtaatcggtgatttcatcaactctttgtttagtatttgcaaaaacaatcgctaaataaggatgcccgatagtcaataattgataaattattttattgctgttttttcctttggtggaaatcaaccaattgtcaattgtttctgaaataactgcttttggtttgatatgttcaatcactggattttctaaatatttttttaaaaatggtcgtaatttttctggaatggttgcagaaaaaacgagcatttgtaatttttctggcaaacgacccgcaatttgatcgacttctgctaaaaagcccatatctaatgtcatgtctgcttcatcgacaacaaaggcaaaagccgtatgcactttcaaggcttgttcattcatcatatctaaaatacgccctggtgtaccaatcaccacatgaggttgctgatgctttaatttatttaattgacgttgtttatctgttccgccaacaaaatttgacactcgaatttctgkttgactgaaacgagccagttgtgcgcttcttgataaatttgattggctaattcacgactaggcgcagtaatcacaatttgtacttcgtcgatagttggcttaactttatccattaatggaagtaaaaaagtatgcgtctttccacttcctgtttgcgattgtccaataacacttttccctttcttaatgattgggattaatttttcttggacttctgttggttcttcaaaccctttttctgcgagtgcttcgttgataaaaggttgaaattgaaattgtttaaatgaaggcacttgcctcacctcttctcgttaaattctttatgcactttggcattataacacaaaaacaacttttactcacctgctgattcctttgttttcgcaacttctaatgtactgactgtataagtgtggctggctttttcataaaacaaacgccgttttttacgaatcaaggttaacaaaacgttgatcaaaaatagtaaatataaaattaaacagaacaaatacagaagcagtgacaccatttgcaacatcctattagaagaattcaataactcagtggcattggctagataaatactaattaaaccatacacaaaatacaaataaccgtagcgaacaaacaaggcttttaaacgaattttttcatgtcctgtttcaaccacccgaatgcgaacaacttttttccctaacgtttgaccatttgtcagtttcatcatgacgataaagaccgcaaacaccatgataaagaaccacatccgatctgaaaaaatcggataattggttgcccaatttttataagctggaatgaaatttagtccaaaaacgagcaggccttgcacaaagccaatcaccaaccaatcaattccccatgcaaagaaacgtcttaacaggctaactgtctgccctttttcataagaggtggcatcaatttcttctcttgttggcaataaaaaggtaaagagcggcgtcaaccaataaccaactatgcctccgacggtattattaattaaatcattgacatccgccaagcgatacgaacgtggataaataaaataaaggccagataactgtgttaattcanaaaataatgacaataaaaaactcgcaagaactgtttttaaaaatgaacatttgaaataataccgtaaatacacaccaaaaggtaaaactaataamacattaaacagtggttctaaaacggcatgctgttttaatgctggcaaatacgtactaggatctttgatcgaaaaaacagtttcgtttaaaatccctgaaataaaatgaaaaggccgcagttccattgttggtcctgtgtattgagccacttctgctcgagatggcaacggtaaaattaccaagaaataggcacataataaataaaaaacaaatgaatacaaaatcattgctcgtgtccaaacaaatgaaccatatttgcggtattcatagattaataatgccccagaaataaaaaatgctagaaacgggaaaataatgattgcccatttaattggttcgctatatactgccataaaaatccctccaagataaacaatttcaagtatgaatgcctcaataacactatacttgtttctaaaaaaatgtaccaacaataaattttattttgcaaatcctctcctttgcagtatcattaagaaaaaggaggacgttctcatgttacagccatattttgcgtttggagtgccgctatttttacttgtgctctacttactctttgcactgattcaccgtcaaacaacgattcattatttacggtttattttgttacttatttcaacatttctcatggtttttagtttccaagtattgcaagaatcatggaccatcaaccctgaaacgttaaaagatgccgcttattctccgcaatggttatggattcctttaggtatcgggttaatcctcacactttacaacgcttggcacggccttcgtacaatgataaaatacaagaccgataaacattagtaagagtctaggacgatggttgtgtcctagactcttactgtctcatcattcaaatgaaatttaatttttcttaacaaactctgattttaacttcattggaccaaagccatctaccttacaatcgatgttatgatcaccttccactaaacgaatgtttttcacttttgtgccttgtttaattgcgccactggcacctttaactttcaaatctttgattacagtaacactgtcaccatccgctaaaagattgccatttgaatccttaactactaagccttcttctgcaacttcttctgttggtgaccattcatgaccgcattctggacaaataaataatccgcgatcttcataggcatatgccgacccacattcagggcagtttggtaattgctctgtcattaacgttctcctttgtaaaaaataattctttttcattttaccttattttctagtgaatgaaaagtagtcctaatgatttatcaacgtccgataactactttctaattacttatttatttttgagcccactcttggcaagctgcttggatttcttggtaaatcacttcaatttcagccgcatcacgtgcattagcgccacttgccaaaggatggccgccgccatgatgttttttagcaattgtattaatgattggtcctttggaacgtaaccgaacgcgataataaccttccggctgttcaacaaagattgcccatgagagaacatcttcaatttttcctggcattgaaacaatggctgccgtttcagaatcgacaatatcataactgtttaaaatactttgtggtaaaacgacacgagcagcgccatttgcgtcgatttctaaattttgataaatataacccgctaatttagcaacctttaaaggcatttggtctaactcacgatttaagtctgcggcattaaagttaaacgtacgcaattgcgcacgacagcgagtgtatgcgccgaagtggaaggataaagaaaacgtcctgtatcccccacaatcccagcatacaataaacgagctgcattatctgtcatcgttaattctgctaaatgctgtgccaaaaatcaacaataatttcactacaactacttgcatttgtattcacccaaactaaatctccataaggttcatcattcggatgatgatcgattttaattaattgatcgcctaaagaaaaacgcgcatcactaattcgtggagcatttgcagtatctgttacaatgactaatgcacctcgatagacatcgtcagtaataacgtccatttcagctaaaaactctaagccttccactggtccgcctacttgataaatattttttycaggaaagctcgctcttaagagttctgctaacccaacctgtgagccaattgcatctggatccggcctttgatgtctatgaataataattgtttcatattgtttaattgctgccataatttcttttactacgtccattctttgtagcctcctacgttctctccatcacttggcaaacaacaattgcttttgccacaatgacattttctaaataaacttcaatatctaattttgcagagcgacggccaatttctaaaatccgtggacgaatgtccaattcactttccaactggattagccgcaaataatgtagattcacttgttcaattagtacatttcttttttgattcatcaacattgttcgttgtgtcacgttagaaataatttcacttaggacaccgaacgagatggtaccaacactgttaaccatttggggcgcaaccgaaaaacgaaaacgggttgtttctttgccattttcttcaacaggcatcacttccccggaaatttgatctgaaattgtatctgcaatttgtggttgtcgttgcaccaattgcatagctttcatcacatcttggcgagaaacaatcccaacaagcgctaaatcatcttccaccaccggcatgacttctagaccatcccaaatcatttgatgactgacactcgctacactcatcatctttttcacaacattgggatcctttgtcatgactttatccacggttaaatgttcacttttaccaatgacatctttggctgtgacaatccccactaaacgtaatttcttatttactactgggaaacgagaatgatgggtactttcagataatgcctgataatctgcaatcgtctgagttgtcaataaataattggttttttcaagcgctgtataaatatcactgacgagtaaaatgtcttttttaatcagctgatcacttaaagcacggttaatcatagtagccacagtaaatgtatcatatgtggttctcaagacaggcatacccagacgatctgctaactgcgcaatctcttcagatgtttcaaatccacctgtaattaaaacggctgccccattttctaaagcaagcttttgcacaccttggcggttaccaacaatcattaaggatccgggagtaatatatcgcgtcatcgcggtttctgtcatcgcaccaattacaaatttattaaggactttgtctagaccagagctaccgcctaacacatccccttcaataatccggaccacttcaccaaatgttaatttttcaatatgtttttttaacttccgctcaattcgtatcgtaccaacacgttgaatggtggaaacaagcccaatattttctgcatctttgatggcccgatacgctgttccttcactaacacttaaacttttggcaatgcttcgaacagagattcgatcgccaattggtaagtcttcaatatgttttaaaatttgatcatgtttcgtcgccataatttcctcctaaactaggatcgtctctcctgggtttaatactttcccgccaactacttgctctacgaatattgctggattttgttggataacaggaaaggtattgtaatgaattggaatggttatttcgggatttaagtaagcgattgcttctagcgcatcctctggtcccatcgtataattatcgccaattggtaagaacgctacatcaatggatttgtcttttgcaaaaaggcgcatatctgaaaacaacgccgtatcaccagcgtgataaatttttttatcttctgcttctaaaataatcccacttgcttcgcccatgtaggtcattacgccgtctatttcataaccggaactatgcaaagctggcacaaatttaaccgaaccaaaaggaaagacataacgcccacctagattcattccatgcgcttttacaccttgcgactgcgcatacatagccacttcagctatcgcaataatcgttgccttgttggcttgagcaattgctagcatatcgccaatatgatcgctgtgtccgtgggtgattaagatgtaatcagggtgtaaatctgcaagtgaaacgtccgctaaagggttgccattaataaaaggatcaaataaaaggttcgtgccgtcgtttagacgaatttcaatacatgaatgtccatgtcctatcagttccatttgtattcctcctacggtattttctacacaatcttatgataattaatcgkcaaattcatyctaaaagtagkacagttagtacagttaccttccttaatg

SEQ ID NO: 33 - DNA, 7657 bp; double-stranded, linear
ataaagaggtaaatgaaggagaaatgcgatgaaaaaaagaaaggcaagatatttgaagttggtatgtattggaattttagggatttatgcgggcgccagttactacaattcggaaccattaatcgctcaagaagagaccgaaacgagggacgaaagtcgacagctatcgctggaagaaaaaagagcggaccaagccaatcaagaccaaggaacccttacttcttcaacgctgaacgaaacaataataagttcgtctgaacaacaagaaagttcaacacaaaatgacagcagtgaccatcaggaaaataatgtggaaccattagaatctgaaaatagtttaccgccacaagaaaagacaattgctagtactaaaccaaccgaatcgttacaaaatgagcaaccagtatctgaagagcgtaaagcgctcactgagaagtcacctcataatcaggaaccacaaaattctacattaactgaaaagaccaaagagccgttggtacattcagaggtagacaatagtcaagaaaaggaaaagcaagcaggaattcaacaacaagccgaggcaaattttgttgtccaagagaatgcttctacttctgagtttattagaaaaatcggtgaagaagcacgagttattggtcagcgacatgatctatacgcttctgtaatgatagctcaagctattttagagagtggctcgggcaatagtgcgttagcggcggcgccaaattataatttgtttggcattaaaggagcttaccatggtcaaagtgtcagctttcccacacaagaagatgatggtaaagggaagatgaccaccattcatgccgattttcgtcagtacccatcctataaagagtcattaacagactatagtaaattaatcatcaatgggctggcgggtaatccaacgttttatcacggcgttttgaaagcaaacacgacgaattatcagcaggcaacaaaatttttaacaggtcgttatgcaacggatacatattacgataaaaaattaaacgcgttgattgaaacctatcaattaactgaatacgatcaagaaaagaagaaaccagtagtgactaatttggcagaagaaaagaaaccttcgtttgataaggaagcagtcaaagaacagctaaaaaaagaagcagtcgtctatgaagtaagcaaaggagattctctcgccaccattagtcagacgtttggtgtgtcagcaacagccatcttaaaacaaaattcaaagactcaagaaatgttttatattggccaaaagatcacgattcctcaacatacagcggcgacttctctagaaccgaaagaacaagcgttacttcaatcactaataatcagtaaatcggtgactaatgctttgaagacagcagagcaatcaaatggtaaagcgaatgactcaaaaacagcgtctactgagtattatgaagtaaaaagaggagagacactcgcaaagattgctaaaaaaacgggctattccttaaccgccctcaagcaggcaaatgacttaacgtattctgtattaaccgaagacaaacgatagcacttcctaagctaaaggactaatgctgatttaacttatcggtcgatggagtcaatatattattagggtaagagaagaggagaagttcatccatggatgaacttctcctcttctcttactatgtttttcataaataccttaataaatagtaaaattagcaagagaattgtgtctttacacaaaatagataggttttcttgccgaagtttgataaaatgattagttgaaaggatgcgtgaaaattgaaagaattatttcgtaaataccgagaagtactggcttatttattttttggtggtgcaacgacggtcgtcaacttagttgtgttttttgtttgtcaaaacgtgttagggctggattacaagataagtaacgcaattagttggtttttatctgttctatttgcctttttcacgaataaatattgggtattcgcaagtaagcatgaaagcatagctggtttttttaaagaaatgggcttattttattggtaccgaattttatcttttgtggctgatatgggtttaatgattctcctaattgatggcattcatttttcatcgttttgggcgaaaatgattacacaagttgtagtagtgattttaaattatttcttcagtaaattttncatttttaaagaaaaagaggtctaagcagattttaggctaaaaaaaatttttttgttataatataaacaagtttttaatacaaagaatagaggtagaaaacgatggactatacatatgcagatgatagtttgacattgcatacagatatgtatcaaatcaatatgatgcaaacatactgggaattagggagagcagatttacatgctgtttttgaatgttactttagagagatgccctttaatcatggctacgcaatttttgcaggtttagaacgtttagtcaattatctcgaaaatttaacgttcacagaatctgatattgcatatctccgagaagttgaagaatatccagaagatttcttgacgtatttagcaaattttgaatttaaatgtactgtacgctctgctttagaaggggatttggtttttaataacgaaccgttaattcaaattgaaggtcctttggcacaatgtcaattggtagaaactgccttgctaaatatggtgaatttccaaacattaattgcgacaaaagcggctcgaattaaatccgtgataggcgatgatcctttattggaatttggaacacgccgggcacaagaattagatgctgccatttggggcacaagagccgcctatattggtggggcggacgcgacaagtaatgttcgtgctggtaaaatttttggtattccggttagtgggactcacgcccattcattggttcagtcgtatggaaatgattatgaagcattcatggcgtatgccaaaacacatcgggattgtgttttccttgttgatacgtatgatactttgaaagcgggagtgccaagcgcaattcgagtagctcgagaaatgggggataaaattaatttcctaggtgtgcggattgatagtggcgatatggcttatatttctaaacgagttcgtgaacaactggacgaagcaggctttactgaagcaaaaatttatgcatcgaatgatttagatgaaaatacgattttgaatctaaaaatgcaaaaatcaaaaattgatgtatggggcgtgggtaccaagctgattaccgcctatgatcaaccggctttaggagcggtgtttaaattagtttcaattgaaggtgaagatggtcaaatgaaagataccattaaactatctagcaatgctgaaaaagtgacaacaccaggaaaaaaacaagtctggcgcattacacgtaaatctgataaaaagtcagaaggggactatgtgacactttggaacgaagatcctcgccaagaagaagaaatttatatgttccatcccgttcatacctttattaataagtatgtccgtgattttgaagcacggccagtactccaagatattttcgttgaaggaaaacgtgtgtacgaattaccaactttagatgaaattaaacaatatgcaaaagaaaatttagattcactttgggaagaatacaagcgggacttgaatccgcagaaatatccagtggacctttcaacagattgttggaaccacaaaatgaatttattggaaaaagtgcgtaaagacgttaaacatttaacggaaacggtgaataaggaggcctagaaatgacaacacttcaagaaaaaatcattcaagagttaggtgtgttaccgacaattgatccaaaagaagaagttcgtaaaagtattgattttctgaaagcttatttaactaaacatccttttttaaaaacctttgtcttgggaattagtggcggacaagattcaacattagctgggcgcttagcacaattagcgatgactgaaatgcgcgaagaaacaggagatatgtcgtatcaatttattgcgattcgccttccttacggtgagcaagcagatgaagctgatgcacaagccgcgctagcctttatccagccagatgtttctttacgagtggatattaaaccagcagtggatgcaatggttggttcgctagaaaacgctggcgttcaaattagcgattttaataaagggaacatgaaagcacgtcaacgtatgattacacaatatgcagtagctggcgaaaatgctggcgcagtaattggcacagaccacgcagccgaaaatgtgacagctttcttcaccaaatatggcgatggcggagcggatattttaccgttatttcgtttaaataagcgccaaggaaaagctttgctgaaagaacttggggcaccagaagccttgtatctaaaaataccaacagctgatctagaagatgacaaaccgttagttgcagatgaagttgccttakgtgtcacgtatgatgccattgatgactatttggaaggcaaaaaagtctcggaaacagatcaacaaacaattgaaaactggtataaaaaaggacaacacaaacggcatttacccattacaatttttgatgatttttggaaataaaaacacagaccatcggcgaatgaacgatggtctgtgtttttttacataactactttttagaaagtaaacgttgctacagcaactatcccatgataatgaaagtcgttttcatttaggcgttttcactttctttttcaaaacagaaaaggtacgctcaataatgtaaagtgaatgatgggagagaaaaagagatgaagcatgtaacaaaattggggattacaattataacaggagttttggcattattatttgaatttattttacatcagccgaattgggcgtatggcattattttaataacaggttctgtaatggcgttaatgatgttctgggaaatgattcaaaccttacgtgaaggaaaatatggtgtcgatattttagcgattaccgctatcgttgcaaccttagctgtgggagaatactgggccagtttgatgattttaattatgttgactggtggtgattcattagaagactatgccgctggaaaagctaaccaagagctgaagtcattattggataactcgccacaaaaagctcatcgcttgaatggcgaaaatttagaagatgtttctgttgaggaaatcaatgttggcgatgaattagtagtaaaaccaggggaactagttccagttgatggcttggtaaaaaccgggacatcaacagtcgatgaatcttcattaacaggagaatcaaaaccaattgaaaaaaatcctggggatgaattaatgtcgggttccgtgaatggtgacggctctttgaaaatggttgctgaaaaaactgtagcagacagtcaatatcaaacaattgtgaacttagtgaaagaatctgcggcgcgtccagctcattttgtacgtttagcagatcgctatgcggtaccttttacactagttgcctacctaattgcaggtgttgcttggtttgtttcaaaaagtccgacacgttttgcggaagtcttagttgttgcttcgccgtgtcctttaattctatctgccccaattgctttagtggcagggatgggtcgttcaagtcgtcatggggtcgttattaaatcgggaacgatggtcgaaaaattagcttctgcaaaaacgattgcgtttgataaaacaggcacgattacgcaaggacaactttctgttgatcaagtccaaccaatcaatgctggaataactgctgctgaattagtgggattggcagcaagcgtggaacaagaatcaagtcatattttagctagatcaattgttgcttatgccagaaagcaagatgtcccattaaaaaatattacagatctagcggaagtttctggtgctggcgtgaaggcatttgtggatggtgctgagatacgggtaggtaaaaagaattttgtgacacaagagtctcaagaaactgaaaaaattgataaaacgactattcatatttcacgtaatggcacatatttaggccgaattacttttacagacactgtacgcccagaagcaaaagagactatggaaaaattacaccaattacatcttcaacgaattttaatgctgacgggggatcaagaatccgttgcagaaacgattgctgcagaagtaggaattaccgaagtacatggggaatgtttaccacaagataaattaactattctaaaagaattgcctaaagaaaatcatccagtcatcatggtaggagatggtgtaaatgatgcaccttcgcttgctgctgcagacgtaggtattgctatgggtgctcatggagctactgcggctagtgaaactgctgacgttgttattttaaaagatgacttaagtaaagtcagccaagcggtcgaaattgcccaagataccatgaaaattgccaaacaatctgtattaatcggaatttttatctgcgttttactaatgttaattgctagtaccgggatcattccggcgctaatcggggctatgctacaagaagtcgtggacactgtgtcaatcttatctgctttgcgtgctcgtcgaattggccagtaaggtggaacaattaattgcctgaatgtccagcttagtggtaaawtaaaggtacgtttttaatattaataagttacaggggagagattgtgcaatgaaaggaaaccaaatagatgggcaaccagtcacggaagaacaactattaaaagaaggctaccgtaaatatactggggaaggaattgatatcttttataataaagatatttgtgaacatattggtaattgtgttcgtggaaatccagaagtctttgaagttggtcggaaaccatggattattccagataacggaagtgttgaaaatgacatgattgtggtagattcatgtccaagtggtgctctaaaatatattcggaaagcagggaacgaatatgcaaattaaagaagaaaacaatcgttttgctctatataacgatgaaaaccaagaaattggtgaaatgacttggtcagatgctggcgaaagcatgatgattattgatcatacgtttgttgatccaacttatcgtggacaaaaattagctgaaaaacttgttttagccggtgttgaaaaagcgagaaaagagcataaaaaaattattccgctatgtccatttgccaaaaaagaatttgatactaaacctgaatacggagacgtattgagaaaataaagaagaaactacaacagccgcaagtagaaatttgattcctacttgcggctgttgctattagagacaaataaggaaagacatcaaatttcactggtgtttacagataaaatatgctacattaaagtagatgaatttcgcatatttgtataaaaaggagaattaacgcatgtataatctaatcttaacgttggtcatcattttatctgttttaatcgtcattactgttatgangcaaccaagcaaacaaaacagtgcagcaagtgccttcactggcggtgcagataaattatttgggaagcaaaaagcgcgcggttttgaagctgttatgcaacgctcaacagcagttcttggcgcaatttggatgattttattatttgttttggcgttcttatcttcaaaataagtacgtaatcttttaaaat

SEQ ID NO: 34 - DNA, 7434 bp; double-stranded, linear
tgtcaatgaaattttcttgacagccctttcttatttcctgtttttctttcgttttttttataattgtttttctgttgaagatagcttagcgcttatttaattaaataacaaaatttttgtgtgaaataacatagataatttaaaactaagacataattttactatttgcgcccaactctttatttactgaatacgtgttttctgaacatttcgtactactgtcttccttgtaaaaaaagctgagacaaactgacgaatcggtttgtcccagctttgcgtccgagtacatattgcttaaaatcaaatgattgaattaattagacttagatagctgttgttgctccgcggtaaacaataccacgacgaggatcaacagtaatcacttcgtcattattaattaatgakgtkgcatctgcagcacctacgataactggaatatttkgcgcaatcgctacaacagctgcatgagaagttaaaccaccttcttcaacaactaatgctgatgctttttcaattgctggcatgtattctttatctgttgtttttgtaactaaaatagctccttcagtcgctttagcaactgcttcttcagcagttgctgccacaacggcttttgcaataattgcttcttcgccgacaccttgaccttgaactaatttagaaccgatcatttgaattttcattaagtttgttgtccctttttcgccaactggaacaccagcagtgataatgattaaatcaccttctgaagcataaccttcttcttgtgatacttttgaagctaaattaaacatttcatctgtgcttgatggkttgtcagcaactgttgcgtaaacaccccatgataatgacaagctacgtgctttttgttctgagaacgtaattgcaacgatatgtgcttntggacggtatttagagatcatacgtgctgtatggcctgattctgttgccgcaacgattgtttggatacccaagttacgtgctgtatggccaacagattgtccgattgcttcagtcatatctgttttgctatataatttcaatgcgaatgaatcttggttaactaatgtttcttctgtacgaactgcaatacgagccattgtttgaacagcttctaatgggtaatcccctgctgcagtttcgcctgataacattactgcatctgttccatcgtagattgcgtttgctacgtcatttgcttccgcacgtgttggacgtgggttacgttgcattgaatctaacatttgtgttgcagtgataactggtttacctaaagcattacattttttaattaaagctttttggacaactggaacatcttctgttggaatttcaacacccatgtcaccacgagcaaccattaaaccatcagaaacttttaagatttcatcgatattatcgataccttcttggttttcgattttaggaatgatttggatgtgtgttgcgttttcttcttctaaaattttagtgatttctaaaacgtcagaagcacgacgaacgaagctagctgcgataaagtcaattccttgaccaattccgaaacggatatcgttagcatctttttcagtgatccctggtaagtttacagaaacgcctggtacgttaacgccttttttgtttttcaagacgcctcgtttttaacaactgttacgatttcgtttgcatcacggtcgatatcagttacttctaaatcgattaaaccatcatctaaaagaatgtgtgaactacgtttacatcattgattaattctggataagtgattgagaatttttcatttgttcctaaaacttctgtcatagaaatacgtactgagtcaccaattttcattgtgattgcgccattttccatgtcatttgtgcggatttcaggaccttttgtatctagtaagatcgctacgcgtttccctgtaatttttacagcttcacgaatgtttttaatacgagcaccatgctcttcgtagtcaccatgtgaaaagttcaaacggcaaacattcatacctgcattaattaagtttactagcatatcaacggattcactagctggtccaatcgtacatacgattttcgtttttttcattactaaaacgctcctattccaaatttgtttatacaaagctaataagattagctaatatacaagattaaaaagaaatttcatgatttaactcataaagagataaatctggtttatgtttattgttttctaacgtgtcaataatatcagctgcaactacttggttatctaacataccgatacataaaccgcctttgccttcttttagaagttcaacagcatatgacccaaatttacttgctaatacacggtcacgagcacttggcgagcccccacgaaccacgtgtcctaaaattgatacacgcgtatggaaatcaccgtattcagaaagtttatcagcaaattcatttccgcccattacgccttctgctaaaatgattaagcaatgttttttcccgcggtcgcggccttcttgaatacgtttggcaacgtttttcatatcaaaatcatgttcaggaataatgatttcatctgctccgcctgccacgcctgaccacaatgcgatatcaccagcgttacgtcccattacttcgataacgaatgtacgaacatgagaagtcgctgtatcacgaattcggtcaattgattccaaaacagtgttaatcgctgtatcaaaaccgattgtgaaatctgttccaggaatatcattatcaatcgttccaggaattccaacagcggggaaaccacgttttgtcaaagccattgcgccatgataagaaccgtctccaccaataacaactaagccttcaataccgaattttttcaattgttcgattccttttaattgcccttcttcagtagcaaattcaggataacgagcagaatacaagaatgttccaccacgttgaatcttatcgccaacgtcagcaacatctaaacgacggatgtcgcctgcgactaaaccggcaaatccatagttaataccgtaaacttcgattccatcaaaaatacttttgcgtacgactgcacgaattgcagcgttcattccaggggcatctcccccgctggttaaaataccaatgcgtttcattcgctatttcacctcatataatatactttcaactgccaaaagaaaccttttcgcaaaaattgatatacaaaaatattacgtcattcattttaccattaaagaaccaaaatgtcttgagttaagaagaaaaaaatgaaaaaagttgaaaacaactagtattttttaccgtaaatcatttgaaaatgacgttttgctcgcctaaaacgtaagctaattgttgctgactagcgcttgtatgagcgacccaattttcttcatttaatactattttcttacctgttttttcaaaatagacaatcactggaatgtgtccagcgtgacgactgagtacctctttcattttctgaaaaacgtccgtttgttcgacatcttttgtaattctgataaaacacgtttcgtcactaattgatgtttctacttgttgcgctttttctattcgttgaaccaatatttgcaattcttgattgtacgtactgcgttccacttttccttccacataataaacttgccctttctcgacactctgtcttaactggcgaaaaacggttgggaacaacgttagtgaaatacttcctgttgtatcatccccatcaacaaaggccatttgttctccctttttggtccgaatcgtccgaatgtttttgacataaaycaataatttcgtgggctgattttcaacaagttcatgaacaagttgcgtttgcttggctaagcgtgtttttttgaactcttctgtcggatgtcctgataaatagacccctaaatattgttcttcttgttctagtcgctcttctagcggataatcggcaatttcttcttccttgggcttcaacgtttctaacaaatccatactaccaccgctgagaagaatactttggatattactctctaaacctaccgctaattgacggcgattaggcgcaatttcgtcaaatgcaccgatggcaatcaatggttcgatattttcaactttcaaccacttacggtcaattcgcaaaagaaactcatcgaacgttttgtacggtccattttctcggcgttcatttaaaatattttgaatgaagtctcggcggattccttttaaagaactaaaaccaaataaaatttgctgttgctgatttaggtaaaagctgtagtgactttggttaattgacggctgcaaaatcgtctgcttgttttttctagcttcgccaatatattctttaatttttgttggattatgacgaacagaatgcaacaatgcgacataaaaagcactcggataatgaaccttcaagtaagccatttgaaaaccaataaaggaataggcaaatgcatgcgagcggttaaagccataattagcaaagcgctctatataatcgtacacttggttagctgtttcttggggatagccttgttgtaacgcaccattaacaaaatgatttcgttcttcatctagcacatcttttttctttttactaatggcccgacgtaaaatgtcagcttgccctaaagagaagcctgccattttcgcagcaacttgcataatctgctcttggtaaacaataattccgtacgtattttccaaaatgggggcgagactaggctctggataactaatttgttccaagccttttttccggcggatgaaaacatcaatattttgcatcggaccaggacgatacaaggcattgacagcagcaatatcttcaatgctagttggccctaattttcttaatacattccgaattccagcagattcaaactggaaaacaccacttgtttccccttttctaaataaagccagcgttgtttcgtcatctaatggaatctgatttaaacgaatggttcgattatagacgcgtttaacagctgtgagggtatcatcawkgatggataaatttcttaagcccaagaaatccattttcagaagaccaattttttcaacatcattcatagtaaattgggtcaataaaatttcattcgatcctggttgtaacggaaccaaattcaaaagattttcatcactaattaccacacctgctgcgtgcgtagaaacatggcgaggcaatccttctagctgaacagctgttttatagagcaattgattatttggtgaaaaattgaccaattcttgcatccgttttgactcttggtatgcttcttctaacgtaattttcagcttgttggggacagctgccgaccaacgattcgcttcactctgggacaacccgaaaacacgtgcaacgtcccgtaaaaccattttcgcagccatcgtaccaaacgtggcaattyscgccatgtgataatgaccatatttttgactgacataagctaaaacttcctcccgccgattatcaggaatatctaaatcaatatcgggcatcgtgtagcgttccggattcaaaaaacgttcaaagagcaaatcatatttgattggatctacatctgtaattgatagcacataggacactaaagagcctgcagctgaacctcggccagcgcctgtaacaatttgattgttatgacagaagtccatcacatcccaaacgattaaaaagtaatcatcaaagcccatattgtgaatgatggttaactctttttctaatcgtttttggtaaacttcatttagatgaggcactctttctggtaatttttctaaacacaatgtgcgtaaataagaaccagccgtttgattatcaggcacaggaaaatgcggtaataatttttgatgtaaaggaatgtcaactcggcaattttcagctagctgaatcgtattctggaccacttctgcaccagctatttgaagcatttgttccatcgtcgtctctgcttcacgcaagtaattcagaccttctatttccggtgtttggcttgtaatattcaattgattattttctttgatgctctcaagaacagttacggcaaagccttcttcccttgttaaatgacgtacctcttgcaaagccacgccaggtaattgttctctttggtaaaaagaaaagagcgctggattacgttgttgattcattgaaaaagaatgttcaacaaataacgactggggatcaaaatatgaagcaagttgttggaaagcgtgaaccgcttgttgttcatcttcaaaaaatgtttgggcgacttctcctttagctgacaaagtcacggcaaataaatcacttaataaggattgatgttccgctaagtaaaagggaccctctgtcgtcattttgctactagatagttgcattaattgctgatacccttttaaatttttagcaaataaaagcaactcggaatgcccttctttttctgctggggtatattctaatcttaaaccgataattggttgaattcccgcttcttggcatgcttcataaaattcaaccgccccatgcaagacattgatatcggtaatcgctaatgtttgataacctaacgctttcgcttgttttacataggaacgaatcctaaccgtactagataaaagcgaataggaagtaacggtatgcaattgtggaaatgacattggacagctcctttttgaatccttgctattttttcctcttctcctattttcctatcgcggattctttacttttaaagaaaatatgctaaactaagagctagaaaagaggtgctcatatgcgttatcttgttgtatttttctggaccttcgcattaggccaagtcgttggatatatcggcggtgcattatctggtggttcatacgactttaaaatgacaacgattctatcgttggcaacagccgttattattttattaattgcacactttgcagtaccgaaagaaaccaaacctgttaaataagaaaaaaccagttactaaagttattgtaactggtttttttatcttttcaactgtttagagctttttatttaaaacttttcggaaattaaagaaggacagcccaatgtttcctaaaacgaaacaagcggttaccagaaaaacagaagaatagccaaaaccatgggcaactgtcgaccctaccatcggtcctaaaacttgaccgaaattactacacatctgattgtaactataaactctacttacgccctctgttggcgttattttactaattaacgtattaattgatggcattaaagcacctgttgaaaaacctaaaaggaatcgtaaaacacctaactgaaaaggtgtttgcacaaacgccatgggaatgtaacaaataaaagaaagaattaatccgcctaataaaactttttggttcccaatgcggtccccaatttttcccaaagttggagaagaaataattnntgaaacgccggcaatcgaaacaatcaaaccactaacaaataatacattctctgtatcgc

SEQ ID NO: 35 - DNA, 2732 bp; double-stranded, linear
tcggaacaagcttttaagtgaaattgagattttatatagtgaagaatttgctattgctcaatgggctgtagaatatttaacacaaaccttagagattccatttagttatgatgaagcggggtatattgcgattcatatccatagtgctcgcagcgggcgtactgataatagtaaaagtatccgtgaagttacaatcgtttctgaaattattcatttaatcgagcaggaattggctattgatattcatgatgataaaaatagtctcagttattcacgtttggtgaatcatttacgtttgtttattcatcgcttccaacaaaatcaatacgctgttttagatgaagaaattttggaagtcgtaaagaaaaagtatgctgaaagctatgaaatctcaaaaaaagtacaagtattattaatgagaaattttcattatcaagtaccaaatgaagaacttggttatttatcgattcacattgaacgattaagaatgaccaaataataaaaattaaatagtttatgtgaggagttacgtataatgaaagcgtatatgcaaagaatgggacgttcgttaatgttaccagttgctgtattaccggcggcttctttattagtcggtattgctaactggatcgtgggaacaatcggtgctagtccagccacaacttttctaatgaatggtggtttggctatcttaaacaacttagcattattatttgcggttggtttagcgttaggaatgtcaaaagataaagatggatcggcagcattagctggtttagtcgcttatttagtgccaaaaactgttttagcgcctgcttctatccaagccattaaaggcttcaaggatattgctgaagtaaacccagccttcaacagcatggacaacaatgtctttgtcgggattgtcgctggtttagttgccgcggcaatgtataatcgtttctctggtgtgaaattgccaatggctttatcattctttagtggaaaacgtttagttcctattatgtcagctatttcgatgttagcaatctcagctgtcttattcttcttctggccagttgtttataacggattagttgcatttggtaaaggaatctctagcttaggtttcgtaggagctggcttgtatggtttctttaaccgactattaattccaacaggattacaccatgccttgaattctgttttctggtttgatgttgctggtatcaatgatattgggaactttttagctggtcaacaagcgttagatactggtaaagcaattgtaggacaaacagggatgtaccaagctggtttcttcccagtaatgatgttcggtttaccagcaggtgcttttgctatttatcaatgtgcacgtcctgagaagaaaaaagttacagcttcattaatgttagctgctggttttgcggctttctttacaggcgttactgaacctttagaattctcatttatgttcgttgcttggcctttatatgttttacatgcggtctttacaggtatttctttagcattcgctgcgtttatgcattggacagctggctttgcctttagtgcaggttttgtagacttcttcttaagtttgaaaaacccagtcgcgaatcatccaatgatgttggtggttcaaggacttgtctttgcagcaatttactacttcggtttccgttttgcaatcactaagtttaacttaatgacaccaggacgtgaagaaggcgatggcgaagaaacgccagatgttgcagaaggtgacaacaaatttgcttctctagctcgtcgtatttatgatggtttaggcgctgatgctaatgtaacttctattgataactgtacaactcgtttacgcttaacagtgaaagatacaggcaaagtggatcaagcaaaaattaaagcaactggggttcctggtgtgaaagtcattgatgacaccaatatccaagtgatcgttggtacggaagtacaatttgttgctgacgaaatgcaacgattatataaccaccaagcgccagcaacaccagtcaaagaaacacctgtttctcaatcagttgttgaagaaaaagcaccagtttcaacgaaagaaactgaattatattctgtagcgaatgggaaagttattcctatttctgaagtaccagatgatgttttctcagcaaaaatgatgggtgacggttttgctgtcgtaccaacagacggcgaagtttcaacacccgttgctggtaaaattactagcattttcccaacaaaacatgcgttaggtatccaaacagattcaggcattgaagtattattacacatgggtctagatactgttgagttacaaggtggaccatttacattacatgttgaagaaggccaagttgtaaaacaaggcgataaaattgcaaccattgatttagcggcattagaacaagctggcaaaaaatcagatttaattgttgttttcacaaatcaagatattgttgctcaatacgatttacaaaaagcaggtcaaacgacttcaatgaatgatgtaatcggaaatgttaccgtaaaataaaagtaaaaaagggctagccgtaaggcagccctttttttgatgaaattcgataaaattacttgttattctattctaggtgaaaacgttcaatcttgcgaagttacggtttgttcacaaaaaagttacttttattaaataaaactaaagaagtaacaaaaacttcgcntttttcagttatttcaagtaacatagaacgtat

SEQ ID NO: 36 - DNA, 1150 bp; double-stranded, linear
ccaatggctggatggaacagaacaagacgtggtatcacgattacatccgtgcgacaactgcacagtggaaggctaccgtgtaatatcatcgatactccaggacacgtgacttcacaantgagtacacgttctctacgcgtattagatggtgcggtaacagttcttgactctcaatcaggtgtagaacctcaaacagaaactgtttggcgtcaagcgactgaatataaagttcctcgtattgtattctgtaacaaaatggataaaatcggtgcggacttcttctattcagtagaatcattacatgatcgtttacaagcaaacgctcatccaattcaaattccaatcggagctgaagaagacttcactggaatcattgacttgattaaaatgaaagctgaaatctacacaaatgatttgggaacagatattcaagaaactgatattcctgaagattatttagaaaaagcgcaagaatggcgcgaaaaattagttgaagctgttgctgaaactgacgaagacttaatgatgaaatatcttgaaggtgaagaaatcactgaagaagaattagtcgctggtatccgtcaagcaacaatcaacgttgagttcttccctgtattagctggttcagcattcaagaataaaggggttcaattaatgttggacgctgttcttgattacttaccatctccattagatatcgatgctatcaaagggatcgatactaaaacagacgaagaaacaactcgtccagctgatgacgaagcacctttcgcttcattagcatttaaagttatgactgacccattcgtaggtcgtttaactttcttccgtgtttattctggtgtccttgaaagtggttcatacgtattgaacgcttcaaaaggcaaaaaagaacgtatcggtcgtatcctacaaatgcacgccaacactcgtcaagaaattgacaaagtgtactctggtgatatcgctgctgctgttggtctaaaagacacaacaactggtgatacattatgtgcattagatgcaccagttattcttgaatctattgaattccctgacccagttatccaagtcgctgttgaacctaaatcaaaagctgaccaagataaaatgggcgtggctctacaaaaacttgctgaagaagatccat

SEQ ID NO: 37 - DNA, 6729 bp; double-stranded, linear
gagcctaataaagaagtaaaagccttcttagactatatggtcaccgatgatgttcaaaaaacaattgtcaaagacttaggttatttagccatcacagacatgcaagtagaacgtgatgtaaatggaaaagtaactgaaaaataaacaaaaaaactcagccaataaacaggattggctgagtttttttaggcttctttttttgttaaaggcaaggtgrttgtaaaagtggtccctaagcctaagtgactatcaatggcgattttaccgcctaataattctgtgtaattttggacaatagctagacctagaccggtgccaccagaatgacgganacgtgctttatcgacacgatagaaccgttcaaagatccgttcttggtctttttgactaatgccaatgccagtatcttgaacagataaacgtaattgctgattttctatagcataagaaatagtaatctgaccattttcttgggaatactgaatggcattttcaattagattcttcacgattggataaaacaattcgtatttggtgaaaaactggctctctggcagaccatgaacgactgttttcagctgttttgctgccaattgttgctgataagaaccgagaatttctgtaataaatttttctaaagtaatttcttgttctgcataaggaattgtcgcgctgccccgagaaagttctaaaatttcttgaattaattgttgcagacgctgggcatctttttgcatgatgtgcaaaaattgattaaggacttccggatcttctttggcaccgtctatgagtgtctcggtaaagcccaaaagagaagtgacaggcgtttttaattcatgagacacgtttgatacaaaatctttttgcattttttctagttggcgaacgcgcgttaaatcataggcaattcctaacacttgataatcattggcgctttgatcatccaagtaacgaagagaaagatctaatcgtaaaggtgttggtccttgtgtcacagtgatttcttgatgtaaactgtttttttcagcgacgacttgatggattaaatgaatcaaatcggcgtcttgaatcacttcgagataattgctttgcatatttttagcagagagtcctaacatttcctgcattttagggttcaacagacgaagccgtccttgcgtatcaatgataaagacaccaatcatcaactcatctaaaagttcgtgaaattgctcatccgcagacgtatacgctttatacgtttgacttacttgttgactcagtaggttaatagtttcgtaaagttcattccattcagaagattgctggataatggatcgattttcatctggatgtttaagcattcgtttcagaatcggtaagacagtcactagcggttgatttttttgccgtaacaataaaaagataaacaaggtaattagtaggaacaagatgccaaatgtaaagataatatagcgacgaaaagattgaatatttttagaaaatagcgcggtttgttccgaaatccgaataatgccaacgatttctcctgattttaaaacaggcgtggcaacgtacagaagttctttatttaacgttttactctttcgtaaagctgaaccataggtagctcctgatagaaccgcagcgatttcaggtcgttttttgtgcgactctagcggttcattttggctgctgtcaaaaaagacggtaccatttttttgcaacaaagttacccgttcttctgcatcatctaacgcatgggtgacaaggagttgttgttggtttgtcagttgccctttttcgaaaacggaagggggcaactggtctgttaaaagggtattttttcttcttaaataggtttcttgctgagcaaccatttctttttgaaagaaaaaattggtcgctgcaatactcccgacaaataataaaagcatgactgccgcaactaaaaaatattcaatccgcagtctctttttcatcgttttggctcctgaaaacggtagccaaagccacggacagttactaagtaaacgggccgtttgggatcgggctcgattttatcacgtaaatgactaatgtggacatcgacgatgcgactttgtccagcgaagtcatattgccaaattcgttccaacaaggtttcccgattaatgacccgatctttgcgtttcatgaagtaaacgagtaattcaaattctttcggtgttagctcaatgggctgattgcgcacaaagacttcataattttgttcatccacacgaatctcgccaatcacaagcggagctttaggtgtgtcctcttgaagcgtttcggtcgtggtaggttttaaacgacggaaaatagctttcatgcgtgctaggacttctctgggactaaaaggttttgttaaataatcatctgccccaatttctaagccgatgattttatctacttgttcatctttggcagttaaaatcaaaataggcgtgtcaattttttctcgacgaagtgctttggtaatttctaagccatccataccaggaagcattacatctaaaattataaaatcatattgattagacaaagctaattcgaagccgtttttaccatcttcggaagtagtcacctgatagccttctttttccaaattaaaggttaacaaagttaaaatcgatggttcatcatcgacgacaagaacttttttcatttacataactccttcaagaaatttctgaaaataagtgtatatttcactattgttagtttaacatatttttagaggaagaacgtactttaaagtaagcgagaatgctacttttgagaaaagtcaactcatggtataatagagaaatgaaatgaggagaagcgaatgattggtattagtagttgcttaggtgggatttgttgccgttacgatggaaaatctcaagaacaagaagcgttaaaacaacttgtaactaatggaaaagcaataatgatttgtcccgaagttttaggggagttgcctattccacgtccgccagcagaaatcattggcggggatggctttgatgtttgggcgaatactgcttatgtatatacggataacggggaagatgtgactgagacatttaaagcaggggcacaacgcgcgtatcaaaaattaaaagccctacaaattacaaccttgattttgaaagaaaaaagtcccagctgtggcagccagctgatttatgatggacaattttctggcattaaaaaagctggagttggagtcgcaactgcttattttattcaacaaggaatgaccgtttattctgaagaaacatggcaacttgcggacatttctttttaaaaggtaaaaacttagtaaaaaaagattgactattccctatgaaatcggtaacctataagggattgaagatgggagcacggctcatggaaatggmaaaaacaaaccgcatgaatgcgttatttgaattttattcgacattattaacggaaaagcagatgaattatatggagctttactatgctgatgacttttctttaggagaaattgcggaagaatatgaggttagtcgccaagcggtttatgataacattaaacgaaccgaaaaaattttagaagaatacgaaaaaaagttacatctttattcaaactatgttgtacggaaagaatttcttgaacaactacagcagtatgttcaagaaacttatcccaaagatagtgaaatcaaaaaatatattgaacaaattcaagaaatagaggaatgaaactatggcttttgagagtttaacaaaccgcctacagcaggcaatgagtaaaatccgtcgtaagggaaaagtttccgaagccgacgtaaaagaaatgatgcgagaaatccgtttggctttattagaagccgacgttaatttacaagtggtcaaagatttcacaaaacgtgtcagagaacgggcagtaggagtcgaagtattagaaagcttatcaccagcccaacaaattgtaaaaattgttgatgaagaattaacgaaaacgttaggttcagaaacggttgaactgaataaatctccaaaaatcccgacagtgattatgatgacagggttacaaggggctggtaaaacaacttttactggtaaattagcaaaacacttaatgaaaactgaaaacgctcgtccgcttttaatcgctggtgacgtttatcgtccagcagcgattgatcagttgaaggttttaggtcaacaattagaagttcccgtttttgatatgggaacagatgctaatccagtggaaattgttcgtcaagggttagcattagcaaaagaaaagaraaatgattatgtcttaattgatacggccggccgtttacacattgacgaagctttaatggacgaattgaaacaaattaaagagttggctgatcccaatgaaattctgttagttgttgatgcgatgacggggcaagatgctgtcaacgttgcagatagttttaatgaacagcttggaattactggggttgttattaccaaaatggatggcgatactcgtgggggggctgcgctgtcaattcgggcagtaacgggtgctccgattaaatttgtcggttctggtgaaaaattaaccgatttagaaattttccatcccgatcgtatgtcgagtcgtatcctaggtatgggggacatgttgacgctaattgaaaaagcgcaacaagattacgatgagaaaaaagcagaagaacttgctcaaaaaatgaaagaaaacagttttgactttaacgatttcattgagcaattggatcaagttatgggcatgggaccgattgaagacttattaaaaatgatccctggaatgagtaacatgcctggtattgaaaatgtcaaagtcgatccaaaagatgtggcacggaaacgggcgatggtcttatcaatgacccctgcagaacgtgaaaatcctgatctattaaatcctagtcgccgccgcagaattgcagctggttcaggaaatagtgtggttgaagtcaatcgtatgattaaacaatttaaagaatccaaaaaaatgatgcaacaaatgtccaaaggggatatgaacattcctggtatggatcaaatgttaggtggcggcgttaaaggcaagctaggtaaaatggccatgaatcgtatgatgaagaaaaacaaaaagaagaaaaagaaaaaaagataaacaggctttagttaattattggaagaaacagaaagtgcgtcatcagtctcttcgactgatggcgcactttctgtttaagcgtagttttggataattgcgtttaacgcttcggcaaaaccagcgccgtgttgttcataatatgacgtaaatcgttcatcgccaacatacataaggcctaaccctttgtgtgcttctggcgaatagcttgaccaagagtacattaaccaatctttgtgtaattggaaaatttcttgcgcaagttggctagtcaacttgggtgatttttgatacatggctaacttagaaaataaatctttttccacgttctgcattgcttgcatgtctttttccgtcaagtttaaatattttttgttggcttgttcaatcgtttcgttgccatatttttcccgaatctctttaccatatttttcttcgttttcttgaactttttgttgtttgaatgcttcgaatttttgctgatctgacatgtttatctctcctttgtaatggtgtaaggtttgttgaacagaggctaaaagacgatcaatttcattgcgcttttccaatagtttttgttgatgctcgtataaagcctgttcaacattaaagtcaggttgctccaaaatttctttaatttcatctagtttcagatccaattcacggtaaaaaagaatttgttgcaaacgattcacctcggcttgcccgtaaattcgataaccagaagaattaattctggctggttgaagaagaccaatttcatcataatatcgtaacgtccgtgcactgacgccagatagtgaagccatttttttaattgtatattccatcattcattcctcctgacaaaatctatcataaacctttacgtaacgagagggtcaagcaaaaaaataaaaaaagtgagacaacctgtaaaaagttgcctcactttttctcgattgattcaattaggcagttaagcgattaaagaaatccacgtaagcatctacaattgattgtaagaagccaacagtgccatcaataattttaccatcttcaccaattaagttcgtaataccgccaatataggcttcaggttgttgtaaagttggaacatttaagaagactaatgattgtcttaaatgatggttcgcaccaaatccgctaatkgcacctggtgaaacactcaccacaagtcctggtttttayccccaaacgctttcgccatacggacgtgaaccgacatcccaatgcattttttaaaacagctggtactgaacggttatattctggtgttacaaacattacgccatctacttgtttaacttcttcacggaatgttgtccaagcttcggtgggggttccttcatcatccmaatcttgattgtataattctaaatcacctatgttaatgaaaacaggttcgaaatcagctggaaataagtccgccattgtttttgctaccaatttgttaaatgaatcttttcttaaactccctacaaaaataccaatttttttgtcatgtaaatccctccatttttcttttacttactttatgatagtactttttcaaaaaaagcgcaaacgttttatccttgtacattgttgaa

SEQ ID NO: 38 - DNA, 707 bp; double-stranded, linear
aactgttcacttgttccattaaccagcaatgtacctaacgctgtttccacttcatattgatagcttttccctaaaaatgttcggacagcgacagtacctgcgacagtattagtagcagcttctgaaacaatctcaatgtcctctggacgaatcgttgccaccgtcgttgtaacatttggttcaggattagtcgttttcactatttgatttgtttgtgtccgataatgaccggcttccattttttcgacagagaaaaagttttcaaaaccgataaattctgcaacaaacttagtacgaggcaaacgataaatcgtttctggtgaatcatattgttcaatcacgccattattcataatggccactttatctgaaatagaaaaacattcttcttggtcatgtgtgacaaaaactgtcgtaatgcctaattgttgttgaatccgtttgatttcaatccgcattgccactcgcaattttgcatctaaattactcaacggttcatctagtagtaatagtttaggttcgataatcagagcacgtgctagcgcaacccgctgtctttgaccaccagataattgttttggataacggtcgcccaagctttctaaaccacatacttttagcatttccgtgactttttggtccatggtttgtttgttttctttgcgtaatttcagcccaaaagcgacattttctgcaatcgttaaatg

SEQ ID NO: 39 - DNA, 4985 bp; double-stranded, linear
nctcggtacttnccccatgggtggatgtgcccggttccattcnaggtgatttagccaaacgttccttatgcgtaagcctctgaagtcagccacctttacgaacgaaaaagagagcgcagcaacgattgcttatttaagggaattgattgaaaaagttggtttcamccctaaatattatactgccattaattcaagctatgatttaccttacgatttttatcgtccaaataaagaccgtcatcgtacacaaattgaattgatgcaaaaagatggctcattagtggaattggcaacggtcagtcccctagttgcagcacttgctggtcagagtcaaggagatgaacgtttctatttccctaaagaaatgcttgaccaaggaaataaaaaacattacgatttatttgatgagacgtatcgtgagttttcaagttacattcataatggtgcgttagttttaaaaaaataggttttctaggaggattctatgtcaattaagttagttgctattgatatcgacggaacattgctaaattcacaacacaagatttaccccacgggtcaaagaagcgctccaaaaagcaaatgagcaaggtgttcgtattgttttatgtacaggccgtcctttgccargcgtgaaagaacaattggatgaattagccttatatggtgaaaatgatttcgtgattacctacaacggttcgcttgtccaagcaaccaaagataatacgattatttcacgctataccttgagttatgaggatttttagaaattgaaatgtattctcgtaaagtcggcgctcacttgcatacaattgatgattccgctatttacactgccaatcgcaatattggtaaatatacgattcacgaagcatctttagtgaacatgcctttaaaatatcgtacggtggatgaaatgacaccagagatgaacattattaaaatgatgatgattgatgagccggaagttttagatcctgccattgcaaaattaccattacattttaccgaaaaatatacgactgttaaaagtacgcctttttactatgaaatcatgaataaaaatgctagcaaaggcaatgctctagcaaaattggcagaccatttaggcttaaataaagacgaagtgatggccattggtgacaatgaaaatgacttatccatgattgattacgctgggattggtgttgcgatgggcaatgcgacagaaaatgttaaaacaattgccgatgtgcataccactagtaatgacgaagatggtgtcgctcaaattattgaaaaaatggttttaatttaaacattcttttcaataacaataaccctcaatctaatcaacatagattgagggttattcgttattttatgatgctgccgctagccatttttcaacggcccaacggtggcttcctctttttaataaacggactgcttcttctggtgcaacccagtgtaaagtattggtcctttctaagggttcgctaagttgccgccaagtattcgctacataaaaatatccaggattataataggcagtttggcgatggttcgaataaaaatattcatcagcttcccctaaataacagccaatttctacactaattcctaattcttctagcacttctcggtggatcgcttcttctttcgtttcggtgccttcaatttcgcctcctggtaaaaaataagctccatttggcgcttgtaccagaaccattgtgttattttctggctttgaaacaataatgtatgcagcatatcttgtttgataggtcaatgtctcttctctttttccaaacgttggcgttttcattggcgcacctcttctcttttcatctattttacctgagaaattcctttagaacaagtcagaaaccaagcgttttctctacatttcacgtttatctatgctactattaacgttggaaatataattaagtttgaaagggagtttttaactatgaaaatggctcatacatgtgtgcgtgtaaaagatttagaggcatcattagatttctatcaaaaagccttcaattttgaagaaagtcgccgtcgtgattttccagaaaataaatttactttggtttatttaactttaccaggagacgactacgaactagaactaacttataattatgatcatgaagcatacgatttaggaaacggttatggtcatatcgccatcagtacagatgatttagaaggattacacgaaaaacatcaagcggctggctttactgtcactgacttaaaaggcttacctggaactgcaccatcttattactttgttgtcgacccagatggttataaaatcgaagtcattcgtgaacgttaaaaagtttcacttgttcacttactgagctttttgtgtttgagagctgtccgagacaaaacttgtctcgacttcttctcaaacacttttttcaaaaaaagtgctacaatagaacgtatgaatttattgaggatgtgatgttattatgacaaaaaaaattattggaatcgctggcaatcaacttttgcaggcagctgaagtgtttcacggtaaccaagtgacgtacaccccacaaggttttgtcagcgctgttcaagccgcagtggcgttcctctcgttttgccaattggccccaaagaattagccgctacgtatatacaacaaattgataaactacttttagcaggcggtcaagatgttgcccctgaattttacggacaagaaccccatataaaattagaagaaacgaatcgtgatcgtgacgagtttgagttagccctaattgaagaagccttaaaacaaaacaaacctatttttgcggtttgccgtggaatgcaattagtcaatgttgctttaggtggcacattatatcaagatttatcgatgtatcctcaatggtcagttaagcacggacaacaacccactcaaccaatctttgcgacgcatcgtattgatgttgaaccagacagtcaattatcaaacatatatggtacaactggtcaagtcaactcgtaccatcaccaagcactacatactttaggaaaagatttacgcgttactgcttggtcctctgatggccttgcagaagcagtggaatcaacaaatgaacagcagcctttattagctgttcaatggcatcctgaactaatgtacgcacgtgatgccaaatcccaagcactctttaactactttgttcaaaaattatagtaaaaacggmgggacgtctttcgcccctccgtttttacttgctatcatacttaaaaatcaaaattatctggatctgcaccaaaacgatgatccttatttaactgattaattgcggttatttcttctggtgttaattcaaaatcaaagacagcaaaattttcctgaattcttttttcgtgaacagatttgggaatcacgataatatcattttgtaagtgccaacgaataatcacttgggccgctgatttaccatatttttcaccaattttcactagtactggttcagataataaattaccttgtcctagaggagaccaagcctccacggcaatcttattttcggctaaatattttcgtagcggttcttgtgttaacgtaggatgtaattcaatttgatccaccattggcacaacatttgcttctgttaataaatcttccaaatgatgttgatgaaaattggaaacgccaattgctttggcacgaccacttgcgtaaatttcttctaatgctttccatgattctttatatttaccagcaacaggccagtgaattaaatataaatcaacatagtctaaccctaatttttctaagcttttatcaaacgctttaatcgcattttcatagccttgatcttcattccataatttcgtcgtcacgaaaatttcttcgcggggaatacccgattgacgaatgccttcgcccacccctacttcgtttttataaacggctgctgtatcaatcaagcgataacccacttctaaagcccattttactgaatttgttgcttctgagccatcttctacacgccaaacacctaaacctaggcgtggcatttcattgccgtttgctaatttttttgttttatccaaagtcatgtgtttcttcagtcccttcattttcattacttttagtatactacgcattcttctttcacgaaacaatcacgacttgtcaggtcattttctttatttttaataaataacgacgccaataagtcagcactccgattagtgccacaactacaattgttcgaaccgtaacgcttccaatccacagtttaactgcaagtaaccagatacaaaagagataaacacaggaccaattaaaggaaactttcaatgtacatgattccgcaatttcgattatctgactactaaaaaaacgactccctaatcgtaaagcgactggattatggaagatgaatgttcgtcgcttgtcagccgtcaagcgagtagcacatcgctcatcaataaaaattgttacaggtaatttagaaagtaaatcattttttgcccattcaattgaaactttcacgcagcactcacaacctttaacaaaattataaaatatattatttatttacaaaattataacattcctaaaaaaacatgttaagtcttaaaaaaaaactttctattttcttcccctttcgccgagagatttagtatactaaaagaagaaattttagagaaagttggatttttatgttgatacttggtttagccagtactgaaacagtcgattcttctgctcctgatttagcagaagcgaccgtaaaaaaagtgagcgcgctacaacgcttttggaacaatattaattgggatgccattgtcgctaccttaattgaaaaaagtttatcaattttatttttaatttttctattttttattattcagcgaatcgggaagtatttaattgatcgcacctatgcaaattatagtaaaaagcaacattttagtgaaagccgtttaaaaacgttacacactttaatcattaatgcatttcaatatac

SEQ ID NO: 40 - DNA, 1346 bp; double-stranded, linear
cgtctgtccttatctcgcacagctatttggaaagcgattaatgaattgaaaaaagatggctatcaaattactagcgtgcaaaacaaagggtatcgccttgaaaaatcagatgtcctttctgcagaaggcattcagttggcattatggccacaaacaccgcctttaacaattaccgtcctagaaacatctgaatctaccatgaccgatgctaagcgggcgattttagaccagacgcccgacaatactttgattgttgctgacatgcaagaaatgcctcggggcaggttcggccggccgtttttcgctacgccaggtaaagggatttacatgagcatggtgcttcaaccgaaccaaaattttgaagaaatcgctcaatatactgtgattatggccgtagcggtcgctcgagcaatggatgctctggcaggcgttcacacagaaattaaatgggtcaacgatctttatttaaatggcaaaaaagtttgcgggattttgtctgwagccatgagcaatgtggaaacagggcagatttctaatgttatcatcggcatggggattaatttttcaattacagaaaccgaattccctgaggacattcggcagaaagtgacttcccttttcccagatggtgaaccgacggcgacgcgaaatgaattagtcgccaacatttggaatcatttttaccaaattttagacgaacgttcaacgaaagactttttagaagaataccggcaacgctcctttgtgattggcaaagacgtcgcttttacccaaaacgggcaagacttccgcggcgttgcgacaaccattaatggaaatggggaattgattgtccagttgcctgatggcacggccaaaacattgtcttctggagaaattagtttggaccagattggtgaatggcgtcgaggataagtggggaagtttagaaaaaagcaagaaagcacctgtctaaatttaaacagatgctttcttgctctttaaaaatcaacttctttttgtgctaacatttcgcacaattctttggggaaattcgtatagggattttcattgattttcatttcttctaaaggagacaaccagtttttattcgtattctgaaaagcaatagctactttttcttcaagatacttacatacttctgcgcctttaaaatttcgataactgtcttttaaatgcagaactttctctaatctcccatataaattttctctagtcatgtatcgattgacttcctcaaagtgaagtagtaaccagagttcaaagcattcatttgaaaaaattgtcttgatttcaggacgatgtcgttgtgcacatctnaccgcgttttcaatcgattcngtggt

SEQ ID NO: 41 - DNA, 1959 bp; double-stranded, linear
ccaaaatatkgatgcaatggttttgkttycctgacaatagntgaycgatcgtcacaaattcgtatccttcattttttaacatagtgatcaatcctgatacagctttgactgattcatgatggatatcgtggattaagatgattgcgccattaaagacattctgtttgacaacattattgattgcttcaggatttcttgttttccaatctagcgaatcaatattccattgaataattggcatgccaattgtttcagcactttttttatcaatagcgccataaggaggacggatattgcgaggcaagacgcccgtagccttaaaaattgctttattagctttattcatttcactttgtaattcatctgtcgaaagtgtattcaactgtggatgagaatacgagtgacatgctacctcatgaccctcgtcgtggacttgttttgcaacatctgggttttgatccaccatctgtcctaacatgaaaaaagtagccttcacgttgtttgtttttagtatattcaacaaatcaagtgttgagctattattgggtccatcatcaaaagtaagagcgacatactttttattttcatctaatgcaggtaacgcatcttttatactttcttgcgaaaccagatctgtatcaataaaaggcgcaatgtctctgtattttagaataactttagtagttccagttgtgttctttggtaggtcgatggtcaattcatcaggtgtataagtcattttactctcgtaagaaattctatccatcgttaatacagcatcaattatttttttaggctctttggcgtgatcaagaatggattgctgaatcacctgttgaatacctaagagacttccttcatccggaatcaaatccttatttgtgatttctttaccagttttttcggaaacataaatggctttctcagaaatactgtctggctttttaaaattttccttactgcgatcccagataaaactatctgcttcaattctatactgaccaattttagaagatattgctgttgcttttattctggcaactgtaagcacttctttttcacgatgcttcttttgttgcttttgagcaagctcgtctaagagctggtttgcatttttaaaaggaacagtactttcataaactggacggtaaataaggcacttattttctccgtcatttatagtatctattttcgttgaaattccactttggtcttgctcttcttggattgaagccatgagattttttacagcagtttcatatttggcttgagcttctacttcttgctgttttaatgtataaacaatatagccgccagtagcgacaattactagaataagtgcggtaaacaatgcgaatatatacttgctataattagattttttcttcggtatttttggttgtttgttttcgtttccggttttgggctttacagcttcattcaattgatttgcattttcacagatatcaggttcttgtttgtgacgttgactacgacgtgcatagatatttttatcagacatatgactttatccttccttttatcatcataaagtaaaatgaaacagcgcaattgtaataaaaaataatttatagataatttttacaagaaagttttctctattattctttttcttttggcgtagtaattatcgctaattcctcaccattttagatattgtggctacttaatgttaaactcaattttgatatcattagaatcactagttttgattttagtttttggaattgtacccttcgataggttaatcactatggttgcagtctttgaatcaccaataatggtctaggattaaaaatataaactattatccaatcttgttctatttgattaaatatactactttaatacctttaatttgtgatcaattccaacttcaccaaactcatttacaattataataatttcttccctgggatggggtgagacttgcaaggc

SEQ ID NO: 42 - DNA, 3625 bp; double-stranded, linear
tttttatttggagggatttattgtgttaaaaccattaggcgatcgcgtcgtaattagagtcgcgaaagaagaagaaaaaactgttggaggaattgttcttgcatccgttgcaaaagaaaaaccacaaacaggtgaagttatcgcagtaggtgaaggtcgtgtgcttgaaaatggcacaaaagttccgatggaagtaaaaattggtgacacagtaatgtttgaaaaatattcaggaacagaagtgaaatacgaggcgtagaatacttaattgtatcagccaaagacattattgccactgttgaataataaacaacttttacagaataatataatagaakaaaaaaattatgaggtgaagaaatcatggcaaaagagnttaaatttgcagaagatgcacgtgcagcaatgctacgcggagtagatgtattagcagatacagtgaaagtgacattaggccctaaaggtcgtaacgttgttttagaaaaatcatttggttcaccattgattactaacgatggagtaacaattgctaaggaaattgaattggaagatcattttgaaaacatgggcgcaaaattagtttcagaagttgcttctaaaacgaatgatattgctggtgacggaacaacaacagcgactgttttgacacaagccattgttcgtgaaggcttaaaaaacgtaactgctggagccaacccattaggtattcgtcgtgggattgaattagcaacaaaaacagcagtagaagaattacacaatatttcatctgtagttgattcaaaagaagcgattgcacaagtcgctgctgtttcatcaggttctgaaaaagtcggccaattaattgccgatgcaatggaaaaagttggtaacgacggcgtaattaccattgaagaatcaaaagggattgaaacagaattagatgtggttgaaggaatgcaattcgaccgcggttatttatctcaatacatggttactgacaacgataaaatggaagctgttttagaaaatccatatatcttaattaccgacaaaaaaatctcaaatattcaagatatcttacctttattagaacaaattctacaacaaagccgtccactattgattattgcggatgatgttgatggggaagctctaccaacattagtattgaacaaaatccgtggtacatttaatgttgtcgcagtaaaagcgccaggatttggtgaccgccgcaaagcgatgcttgaagatattgctattttaacaggtggtacagtaatcactgacgacttagggttagagttaaaagacacaactattgaaaacttaggaaatgctagcaaagtagttgtcgacaaagataacacaacaattgtcgaaggtgctggttcaaaagaagccattgatgcccgcgttcatttaattaaaaaccaaatcggcgaaacaacgtctgattttgatcgtgaaaaattacaagaacgtttagctaaattagctggtggggttgctgtcgttaaagtcggtgctgcaactgaaacagaattaaaagaattaaaattacgaattgaagatgcattaaacgcaacacgtgccgctgtagaagaaggcatggtttctggtggtggtaccgcactggtcaatgtaattggtaaagtcgctgcgctagaagctgaaggcgatgtggcaacagggatcaagattgtcgttcgtgcattagaagaaccaatccgtcaaatcgctgaaaatgctggttatgaaggatcagtgattgttgacaaactaaaaaatgttgacttaggtatcggattcaatgcagctaacggtgaatgggtaaacatggttgaagccggtattgttgacccaacaaaagtaactcgttctgccttacaaaatgcagcttctgtgtcagctttattattaacaactgaagcagttgttgcagacaaaccagaaccagctgcaccagctcctatgatggatccatcaatgggcatgggcggtatgatgtaaaaataaaaaagtattctaaaagcttacgattgaaaaatcgtaagcttttttttacataaagnataaataatctaaataatatctttgcttatggtgttttctcaaatatttactcaattaacaaaaaagatgataatttaaaggcttcgttttagctagacagccttgtttttattcgataaaatttagtaataacaatcattttttgaaaactagtagttggtaatttttatttattaatagaatataaataaaaattattatattttgaaggggaatattaggaagattgaggtggaaaaatggaaaaatatacaattggtgtcgttcctttgacaattgaaacaaaagaatactgtcaaaattggtttgttagtaatcaagtagaatgtcagatcatccaaggaacaaatatacttcttcatttgcaccatattgatggattagtgattgaagttactgaccaccagtaagtaaatacttgttgtgagttattaatgacgattcgcaagcagtcagatttaccgatttggttattttctcggacagaagtaattagtaaagtcaatcgaattatttatttacaattaggtgcagatggcgtttttgattattcttatgatcgtcaagaatgcatgttaagcatgagtaatttattgcaacgtgtaaaaagacgtttttatcctaaattagctattgcaaacgaggaacaaacagttactaagaatctttctgagagattgtatttaattgcgccaaatttgagtgtttgcttgggaagtggagaagaaattcttttaacaaaattggaatttttcacaatagagtatttatacaaacacgcaggacaaacaattacatatgaagaactctacaaaaatgtctggaaagatactgcgaatgaacgaaaatatcgtgtcgctaatgtgattttccatttgcgcaaaaaaattgaacaagatgtgaacaaaccacaatatatcaaaacaattcgttcaaaaggctatatgttaacggtgtaaaaggtacgaaggaggagaaaaagatgtggcaatttttgactaaaaacaatgaagatgaggagtatgagaagatgccagattttgaaaatgaacaatcgatgaaagcacaaccaacggtaacagaagaagcaatctttgatgacgaggtcgtttatgcaaaagagcaatccgcaaaagtaaaacaggtccagcaacaagtgccgactgaactgtcagaagagtcattttcttttgttgaaaaactagaagaagaaaatcaactatatcagcaatccattaaaaagctaacggagcaattattaatgcaaaccaatgaagtggaagcattacaaaaacaagtagtcgaaaaagatgttcaacttaaacatgttaaagaaacattaagtgataaagaaacaactatcacttctttacagaaacaattgtctgaagaaaagatgcaacagagacagaccagtgaagagratttagacacagccgttacgctttctcaaaaagaaattggcgagtgttattagaagccaaacgtcaagcaaaagaaacattagtcagccaaccaccagttgcacattcatgagaatggacacgttgcactttacacgctgagcagtggn

SEQ ID NO: 43 - DNA, 3758 bp; double-stranded, linear
ccnccccccttttttttccggtcccnaatncctccggccnttattttaggtttccatttggtaaaaatagtataggrgswaagcatcagttatgtattattagtgamagaaggttgccgtgaagtaaawataaamaggagagccaaaggatgttaamaaatgtagaagtgttctggcaaaactttttagataaacatgaattagatatgttgatgcccgatgtgtggatgtttggtgatggctcttctgagatgggtaatcgtttgggtcaattggttgtttctggtcgtaagacagcgacatgctcttctttagatatttataagatggaagaagaacaactccctaaagctggtcaatacgacataattttagatggtcagtctcaaccgctggctattattcgaacaaccaaagttgaaattatgcccatgaacaaggtctcagaatcttttgcgcaagcggaaggtgaaggagatttgacgttggattattggtatgaagagcatgcgcggttctttaaagaagaactggccccctatcagttacaattttatcccgatatgctgttagtttgccaaagttttgaagtagtggatctttatacagaaaaagaatagacagagaagcggtgactgacacgattgaaacgagcagtcgccgctttttttttactgattttttgaaaaagttgcgtatgtttatatagacagggtgatagaaaagagatgtgtattttaagtgtcgaggaaaagatggtacaataacctaaggagaatactaacaaggagtgaatgttatgaaagaagaattttcatatgaaattttagaagaagtcgctgtgttatctgagaatgctcgtggctggcgtaaagaattgaatttaattagttggaatggtcgtccaccaaaatttgatttgcgtgagtgggcccctgatcacgaaaaaatgggtaaaggcatcaccttaactaacgaagaatttgctgaattamgcaaaacaattamatccatgtaaaaggagcaccctgtcaatgaaaagtatgactggatttggaaaaaagaccattcaaaatgaaaattatcaattggatatcgaagtcaaaagtgtcaaccagcggtttttagatattcaattgcgtatgcccaaggaactgaatgcctatgaactggtgattcggcaagtaatcaaacgcacgttaaaacgtgggcgtgtggaagtctatgtaaatctccaaaaaatcggcaacaatcaaaaagaagtgcgcgtgcagtgggacttaattgatcaattattaacttcggtagatcaacatttaaaggaaaaatatccggaagcaacgtttgatgcaggggacacggtcaaccatttattaaagcaaaatgattttgtcgaaatagtggaagcagaaattgttgatcagacatttgaaccatttcttgttcaagcatttgaagcagccatcgctagtcttgaccaaagccgtgtgcaagaaggaacgcaaattaaacaagtcctgcttgactatgtagcagtgttgacccaatcaattcaagaactgcaagcgtttgtgggcgtttttgaacaagaataccgtcaacgttttgaagcgaaattaaacgaatggttaggtagccaagtggatgaaacacgcttattaacagaaatggccattttattggaaaaaggcgatattcatgaagaattggatcgtttggatatccatattgataagttgcatcagttgcttgacgaaacagaaccagtgggccgagaactagatttcttaattcaagaaatgaaccgtgaagtcaatacgattggttcgaaatcaagtccaattgaaataaaaaatagtgtcgttcaaatgaaaacaaccttagaaaagattcgtgaacaaattcaaaatgtcgaatagagaaaatggtttcgtgtttttccagaaaacgctataatatagaagtaacgaataaatgacagaggtgaaagcaatgactaaattttatgatgtaacctttcaagaattaagtggtcgttctgtggtaaaaacagaagtcgcttcagacagagaaccatttgacgtctggcaagatgcttgtgcaagctattctgaaacagaattaaatatccaaattaacgaagacacgtttgttactttgaatcgtcactttgttgttcgcattgacgtgaaagaagttgacggtcctgtcgacaaacaagttcgtcgtcgcgatgaattgatgaacgtggtcaatacgctttctaatatgggcttataaaaaataccaccaagcatttcacgcttggtggtattttttttaattagaataaaagaaacaagccaacggcgcataggaaagaaagaactgcggcacttaaaaagattgtccgcatggatgcagttttactgctttctttgccgtgttttttctgacgttctaaacgtttttgaagctgacgggtaattactgagaaaatcagcccgaaaaggactaaaacacttgtggcaatcgatttgggaataaaatgattcggttctgcaacggtggtatccccagaatgttcgtttgattcttccgcagcttccgctgttgtttgttttggcttaacttcttggtaagccactttgggtgcttgaaccgtactatttaacaatgtcaagggcgtgtcgacttgcacttgccctgctactaatttaaaagtaggctgactgcctttgggaacgacaccgtataaatcgttagccaaagtaacttttttgtgatcaatggtttgtggtcctttgtctaaaagttttttgcgttcgtatgtcgtataggcatagtccagcaaagcattcccagccacatgccgttcgtattcaccatcttggttttgccaattaccaacgcctaaaatgacttcaattaaacggaaatctccttgtttgacagtcgcaatatagttaaagccgcctgttggactagagcctgtttttaaaccatccacgccttggtagccatacttagctcctggtaaagaataattgtacgcttcaaacgtttcctcgtaaggcgtgccgaccattgttttcaccactggtttattggtgatttctaaaatttctggataatttttcagaaaatgataggttagtgaagctaaatctctagctgtagagacgttatcgccatttgggtcaattccttgcatttgatacaggccgttaaaggcacttgcttgcgctccactgcagttgtaataggtagtatttgtcatccctagttcagccgctttttgattcattaaatgaacaaagtcagtaggctggttccctgaaattaagtttgccaacatgagagtcgccacattagaagaggggacagcaatcatttttaacagttcacggactggataagcaacacctaacgtaattttgttattactaatggcatatattttagaaatatcgacatctttttgcgtagcagtcacagtcgtatccattgtaaattttccttgctccattgcttcaaaggccaagtacatggtcatcactttggcaatactggcaggattccacgctaaatctggttgctgcgaccagagaatttctccagaatcagcatcaacaacgatggctgctttgggaatgccatccgctttcaaagtcgtccccatttttttagcaatcgcggtaatatcttcttctgcgtgagtcacagtaggttgggcaaaaaaggccccacaactgacaactaagcctagcagaaacaat

SEQ ID NO: 44 - DNA, 1359 bp; double-stranded, linear
tcttctaatcctgatgcattagctggcgtggatgcacaacgtgtagcagctttccaagcggctaatgggaaagcattggtcaatctacgaaaagcaacgcaagccaacaaagtaagttggactgttgtagctgctgctagtgaaggctgggcagctaaagtctttccagaattagcaacaagtgaagaacaagttgatgcactttggaatgaaattttcaaaacaacacgaatttatgaagaaaacccagtcattgcttgggatatccatgataaaaaattacaagaaaaagcggctgaattaaacgaacaacaatttactgctttacactacacagctcctgggacagatttaacgattggtttgcctaaaaaccatttatgggaaggcgctggtagttataacgctcgtggggaagaattcatggctaatatgccaacagaagaagttttcaccgccccagatagtcgccgcgttgatggttatgtttctagtacaaaaccactaagttatgctggcacaatcatttcgggaatgaaatttacatttaaagatggaaaagttgttgacttctcagctgaacaaggcgaagaagcattgaaaaatctcttagctattgatgaaggtgccaaacacttaggagaagttgctttagtaccagacccttcaccaatttcacaatctggtttgattttttataatacattgtttgatgaaaatgcctctaatcatttagcctttggttcggcctatgccttcaacttacaaggtggcacggagatgagcgaagaagaattagctgaagctggtttaaatcgtagccaaacacatgtggactttatggtaggatctgacaaaatgaatattgacggcattaaggaagacgggacgattgttccagtttttagaaatggcgattgggcatagtcctaccaaatgttgaaaccaaagtttttagctccaagaaataagaagaaactgcttttattcagtaggttcttttaaaatttagaaagtgaggcctaagttgcagcgacttaggcctcactttcttatgctaaaaaatcaattgcattcgaaggacctttaacgttataatcaaattgaaaacggattcttttgcacgatataagtttacttttaaataaaagaatttttttcaaaaaagtagaattggagaattaacatgggattatttgatggattattaggaaatgcaacacaaaataataatgaaacagctgaaaaagaattacgggatgttttaatccctaacgraaaagtagatatggccttcactttagtaagagatttaattgtctttacagataaacgcttaattttrgtcgataaccagga

SEQ ID NO: 45 - DNA, 15614 bp; double-stranded, linear
attaanatanaccaggttttagatagtatttattcaagtttacctcnaaggtattaatctgaaaccckgttattttattagagagttcyttttcaaatatatgtaaatrgctaacaacrgggttctgtttgttgttggactattttttttgatccccamccgttcttgaaaaaaaacaaaaaaataaacagtgytcgcttgattaatcgaacgtttgttcgtataatgattttgcaagtgaggtgatgtttgtgaaatttgattatgaaaaagaacctagtcgcgatattctttgtattgattgcaaaagtttttacgctagtgtagaatgcgcagaacgtgggttagatcctttgaaaacgatgttggtagtgatgagtaatgccgaaaatgcggggggattagttttatcagcatcgccaatggcaaaaaaagttttaggtgtttcaaatgttacgcgtaaaaatcaagtgcccgctcatcctgatttatatgtggttccgccacgaatgaatttgtacatgaaaaaaaatcaagaaatcaataatttatataaaaagtttgtcgcagatgaagatcactctgtgtttagtgtagatgaatcatttcttgatgtaactgcttctttaagttattttcattgtgaaactgcctataaaatggctcggattatccaaagagtcgtttataatcatgtgggtatttatgtgaccgttgggataggggacaatccgttactggctaaattggcgttggacaatggcgccaaacattcgccagattttattgcagaatggcggtatgatcgtgtaccagatactgtctggcagttgccttctttgacagatttttgtgggattggtcgcagaatggctaaacgactgaatcgtttaggaattgattctgtatatgagttagcgcaacgaatccgcatcttttacaagaaacatttggcatgatggggcttcaattgtatgctcattcatgggggattgatcgtacctttttagggaaaaaagcaccacataaagctgaaaaatcatttgggaatagtcagattttaccgagagattatgcgcgaagagatcagattgaactagtcttaaaggaactgacagaacaagtggctgctcgtttaagaaaagcgcattgtcaaacggaatgtatcacagtctacgttggttattccaaaggtcaaattgaccgtgaaggacgaactggttggcgaaaacaacaaacgattcctgcaacaaacaatacaaaagttttgatcacctatgtattagccctttttagagaacattatctagcgggaaccgatgtccggcaattagggctttcatatgggaaattagtttggaatgaatctttacaattagatttattttcggaaccagaagagcaaattagtgaaatggagttaaactatctgattgataaaatccgacaaaaatttggctttcaagctttaattcacacctcttctttgttggaaggcgcgacggcaattcatcgttcaggattagtcggtggacatgctggaggaaatgtcggtttaggaggataacatcatgaaacgaacaaaaaaagamtttacaccttataatgagtaccatgatcggccctttgaactgaaatgggcgaccgcttttgcattgggggagttacaagaaggaatcgaagcttctgacgaatattctaagagagcgtttgaacgcttaccgcaacagacaacagaagaaattgaagaatacttagagcagtctttaaaaaataaccaagttttagaaatccaattgaatacattggatgattttggccgtgttcaaccgccaattgttggtgtttttgaagggatgagttcaatggagtatgtaaaagttggacatacacatattttatttgaagagattcggcatattaaaagtcatgagtttacaaagtggtcgagccttgattaaaaaactattgttatacgtgcgttttgtgaaaacatatgagataatgttcataggtaatagaaataaaaattatggaggtggctaggatgggacatcatttaaaaggacaccatggcaaaaaaacaaacgcaaatggcggctttttaacaaagttattggcaggtggcgccttagtgggcgtaggaaaaaagttatacgacaatcgtgaaaaaattaaagagctgttaagtgacgacaaagaaaaaggcaacgacactgaaaacaaataaaggactggattgacggaatggtaaaagatgcagcgtatattattgaagagattaccacgattttagaaggaacctattttgtgataaccaagaaagcgaataagcgccgcatgtgtttacatgtttcagataccgcgaaagaatttttacgttgtcgactggagtatgaaacattcttagagcaacagtttgattatgccacaatgtttttagaaacatgtacggaagatgtttctgttgaaattcaaacgggactacttgaagaaacaaattatcaagcattaaccgtggaaaaattacaacagatagccactaaaatgtaacacagctgttgtgttagttttgattcttaatttggttaaggaggcggataaaatgtcagtatatcaacatattttggttgctcttgatggctcagatcaatctgaaaaagcttttcatgaagctgtcaggattgccaaagaggaacaagccactctttatttagctacaattattaatgatgctgaatttacgacgagtccattttcttttgaagaattgtatgatttagaaaaacacaagtcagaagagatgctcactggaaaggcaaaacaagcgagtgaaattggtgtaaaaacagtcaaaaaaattgttgagcttgggagcccaaaacgttatcttgccaacacgatttctgaaaattatgccatagatttaattgtgctaggtgccacgggaagaggtgctattcaacgaaccttgattggttctactacagattatgtggttaaccatgctttgtgcaatgtcttagtcgttcgctaattgtgagtaaataatcaaggaaacaatgttttatcgggacgtttttttaaattaaacgagaggtgagtttatgaaaacaaaaatcggaaaaacagttatcttgtcagcatttttattcacaagtttccttttactgagtggttgtacctcggctggcgaagagatggaaaaaacaattgatcgacagaaagaaaaagtcgataaaacggtcgataagcagaaacataaaaatgaaaattccatggaaagttacgacgaaaaagttgaccgttctttagatagtcaagaagacaaaatcgatactactgagtaacgggaaagctttcaactatcggctagtaaataaataatatacaaaagggagcatccactgcaattatttctcacagcggatcctctcttttgtggttaaaaagaaaaagttaactgctccccaacagttaacttttaatcatgttgcacatagttaaaacactctatatatcatttatatcatttgaaacgggtagtgtaaaaagaaatctcttgaaaagagtctccatttatagggaagatttcccataaaaaagagaaacgtataatcacagagagttagagaaagcaaagggaaataagtatgttaaaataagaagcaagaaagaatacaagtatgcagaaaataacaactaattaggtgaaaacaatggaaatacattttgaaaaagtaacaagcgataatcgtaaagcagtggaaaacctacaagttttcgctgaacaacaagccttcattgaatcaatggcagaaaatctaaaagaatcagaccaatttccagaatgggaatcggcaggtatttatgacggcaatcaattaatcggctatgccatgtatggacgttggcaagatgggcgcgtttggctagaccgctttttaattgatcaacggttccaaggacaaggttatgggaaagcagcctgtcgacttttaatgttaaagctaatagaaaaataccaaacaaacaagctatacttgagtgtttatgatacgaacagctcagcaattcggttgtatcagcaactcggttttgtatttaatggtgaattagatacgaatggtgagcgggtaatggaatggacacatcagaataagtagatagaacaggtgagacaaaagccatagcgcattttgtttcatctttttcttttaattggcttcatttgtttacttttagtaagtaaaatggtaaatttagttcaatctgttttgaaaaaagagttactggagggtaaggatgaaaatagaatttttccatgatgttatttgtagtttttgttttccaatgtctgaccgcatgcatgagattcaacaagaatttcctgaaattgaattgattcatcggtcgtttgcgttaggatggtcagcaaacgattttgaaacaatgtttggctcacgagcagcagtaaaagaagaagttttgacgcattgggtgcatgccaatcaaaacgattcaaagcatcgttttaatattgaagggatgaggaagcaacgatttgattttccaacatcaaagaatgtattattagcagcaaaagcagctggatacattggcaaccaagacacctattggttactgtttgataagttacaagaaggtttatttgtgagaagtttaaatattgaagagccagaagtaattgagaagctagtaaaagagacaacgattgattttgctttatggaaagaagctgttgcttccgaggctgtttggacggcggttcaagaagattttgcgctagcttctgcttatggtttacaaggagttcccgcactaatcattaatcaaaaatatctaattaatggtgcagtaccgaaacagcaaatcagccaaactattcaaaaaattctcgcagaagaaaaacaacagcaaccgttagtttcattaactccttcttctgaagagtcagcttcgtgtgagtttaaggaaggcacatggacgtgtcattaagcagcttaaaataacgttattctttgacaaaacgaaagacttctgtaatagttaatgcgggggtgataatatgtttaacgcatatagagaatactggaataatattacaacaatgaatgcgtcacaacacgagcacaatattggtggccacaattaattaattatttggtgttagggatttattcagcaattacgggcgtttacagatatattgaagtaacacccaatgatggaacaatcattaaagaatggaatactgtgaccattatatttttcttgctgactgctttaatttggttggcaaactttactgttcgagcaagaagattgcatgatcgcgaccacagtaactggtggattttattctatttacttccttttatcggtactttagtgatcttcattacattaattttgccaagtaaaagtcacacaagatggccagtgaatcaatcagaaatttaatttgctggtttcgtttagctgattatcttaagagtgaaaataggacataagtcatttcgacttatgtcctattttcttttttatttcagaaaaataaaaatatcttctgtatgatggcacctcacattacgcggttcttgataaaggggctatctttttggtagatagggaaaaccattaagacgttaaaagtttaataaatcgagcaattctcttttgttagaaaataagatagcatcattaattaaaatacttggaacactggtttcaataattggttgattggtaataatcaagtcaaattcttcgagtcgatggtcacctaattgttcttccgtaattgctaacgtatttgaacgaatccgatgcaaagctaaaatatcgtggacatagtttccaatatattgactatgattcaggcccatgtcgctaataatcaaaatcttttttgagtcgaaactctggttaatttctggaaaagtattaagcaaccaaaaaatataagaagatgaatagtttaatagatttgtttctaaaagagcggaaaagaaatgcaattctgcttttaatcgtgcatataagtgaagctgagtaaaatgaatttgtcgagtgaaaaaggtggccctttgtgtcaattcggaggtgtcaaaaggcactaattgagaaaacaaataaagacaggttaacaagtgaacagcgaagtcgacgacttcttctgttaattgttcaatctgtgaaaaagcattaaattttaaattttcacgtattctttgactgatgacttcttggtcttcggagtagtattgctgaaaagcgcctctttgaaaatatcggagaacttcccgataggtttcacggctgagtccagtgaaatgacgactgagtaaaagataatcttccattttgattggactctttttatctgtttttttctggaaacgttgttgaaatccttgatgctctcttaataaatcaacaataaaatacataataaagaaatcgtgttcataactgttatccatactaataatatttaattggcattgattacgacgcattaattgtttgatttcctgcttatctaattgataaggcaattcataatgaccataatacattaaaaagaaaaaggttgtaaaaatacgtaaaggcaattcttctgtttggctagttaattgatagccttgatcaacgataacgcgaagagagtaagtttccaagacctggttacactgcttcaattttcgagcaaaagaagagcgactaatattgatggtatcgcaataatattcgatggttttgccaggattttggataaactcatggagcaattgggtggtcgttgacgtttttgccatatccgtcagcacgtttaaatataaggacacattaaagttttctaaacgatagcctaatttatgcgatgttttaatggttaaactttcgccccaacgctgtttaatctcctcaatataacgaataaaagtagactcagaactaccaatatattttgcaagttcttttttagtcatccatttatcagaaatggataagacacgaatgatttcttccattttccgataatttttttctaaaaacctaatcatattgtttcctcccaagtcctttactttaatgaaacaatcatcgaaacaataacgcaatttcagaaatgaaaccgcttggtatgaaagctggtgtgatttaatgagttccttctctgtataataattatcagattagaataatgaaattttacgtgctaggcaattctaatttaactgktaawtcmtaaaaggaaaggagagaacagacattaaattactaaagamatttggggttttcggcgtagtctttttacttgtctcatcctatttcataccgctcattggctaygcagaaacagccaaagaagttgaaattacatccgctcaaatgataacagatgagaatgataaaacgaatattaatatcgagttaaatcttctcaaccaaacagagcagccattacaacgagaaattcaattgaaaaatgcacagttcatggatactgctgtaattgaaaaagacggatattcttaccaagtgactaatggtacgctttatctgactttggacgcacaagtaaaaaagccggtacagctttcgttagctgttgagcaaagttcgcttcaaacagctcagccacctaagttattgtatgaaaacaacgaatatgatgtttcagttacttctgaaaaaataacagtagaggattctgctaaagaatcaactgaaccagaaaaaataactgtaccagaaaatacgaaagaaactaacaaaaatgattcggctccagaaaaaacagaacagccgaccgcaacagaagaggtaaccaatccatttgcagaagcaagaatggcgccagctactttgagagcgaatctggcactgcctttaattgcaccacaatacacgacggataattctgggacttatccgacagctaattggcagcccacaggcaatcaaaatgtgttaaaccatcaagggaataaagacggtagtgcacaatgggacggccaaacgagttggaatggggaccctactaatcgcacaaattcttatattgagtatggcggtacaggagaccaagccgattatgccatccgaaaatatgctagagaaacaacaacaccagggctttttgatgtatatcttaatgtgcgtgggaatgttcagaaagaaatcacgccattggatttggtcttagtcgttgactggtccggtagtatgaatgaaaacaatcggattggtgaagttcaaaaaggagtgaaccgttttgttgatacattggcagatagcggtattaccaataacatcaacatgggctatgttggctactcaagtgacggttataataacaacgccattcaaatggggccgtttgatacagtcaaaaatccaattaaaaatattacgccaagtagcactagaggaggaactttcactcaaaaagcattaagagatgctggtgatatgttagcaacgccaaatggacataagaaagtcattgtacttttaacggatggcgtcccaaccttctcttataaagtgagtcgagttcaaacagaggcggatggtcgcttttacgggacacaatttacgaatcgacaagatcaaccaggtagcacttcttatatctctggtagctataatgcgccagatcaaaacaatatcaataaacggattaacagtacgtttatcgccacgataggtgaggcaatggtcttaaaacaacgtgggattgaaatacatggattgggcattcaattgcaaagcgatccacgagctaatttatctaaacaacaagttgaagataaaatgcgtgagatggtgtcagccgatgaaaatggagacctttattatgaatccgcggattatgcaccagacatttctgattatttagcgaaaaaagccgttcagatttcaggaacggttgtaaacggaaaagtagttgatccaattgctgaaccttttaaatacgagccaaatacattatcaatgaaaagtgtgggtcctgttcaggttcaaacattaccagaagtgtcgctaacaggcgctacaattaatagtaatgagatttatttgggtaaagggcaagaaattcaaattcattatcaagtacgtattcaaacagagtcagaaaacttcaaacctgatttttggtatcaaatgaatggtcggacaacgtttcagccattagccacggcccctgaaaaagttgattttggggttccttcgggaaaagcacctggcgtgaagttaaacgtgaaaaaaatctgggaagagtatgatcaagacccgacaagtcggccagataatgtgatttatgaaattagtagaaagcaagtaactgacacagccaactggcaaactgggtatattaaattatcaaaaccagaaaatgataccagcaatagttgggagcgcaaaaatgtaacccaactttccaaaaccgcggatgaaagctatcaagaagttcttgggcttccccaatacaacaatcaaggacaagctttcaattatcaaacaacccgtgaattagcagttcctggttacagtcaagaaaaaatcgacgatactacttggaaaaacacgaagcagttcaagccattagatttaaaagtaatcaaaaattcttcctcaggtgagaaaaacttagtgggagccgtctttgaattgagtggtaaaaatgttcaaacaacattagtggacaataaagatggtagctattccttgccaaaagatgtgcgcctacaaaaaggggaacgctatacattaactgaagtaaaagcacctgcaggacatgagttaggcaagaaaacgacttggcaaattgaggtgagtgagcaaggcaaagtaagcatcgatggacaagaagtgaccaccacaaatcaagttattccattggaaattgaaaataaattttcttctttgccaatcagaattagaaaatacaccatgcaaaatggcaaacaagtgaacttagcagaggcgacttttgcgttgcaaagaaaaaatgctgcaaggaagttaccaaactgtggcaactcaaaaaacagatactacaggattgagctattttaaaattagtgaacctggtgagtatcgaatggtggaacaatcaggaccattaggctacgacactcttgctggaaattatgaatttactgttgataaatatgggaaaattcactatgcaggcaaaaatattgaagaaaatgcgccagaatggacactgacacatcaaaataatttgaaaccttttgacttaacagttaataaaaaagccgataatcagacgccacttaaaggagcgaaattccgtttaacaggaccagatacggatattgaattaccaaaagatggcaaagaaacggatacttttgtttttgaaaacttaaaaccagggaaatatgttctaacagaaacctttacgccagaaggatatcaggggttaaaagaaccaatcgaattaataattcgtgaagatggttcagtcacgatagatggggaaaaagtagcagatgttttaatttctggagagaagaataatcaaattactttagacgttacgaaccaagcaaaggttcctttacctgaaactggtggcataggacgcttgtggttttacttgatagcgattagtacattcgtgatagcgggtgtttatctctttattagacgaccagaagggagtgtgtaatcaatgaaaaacgcacgttggttaagtatttgcgtcatgctactcgctcttttcgggttttcacagcaagcattagcagaggcatcgcaagcaagcgttcaagttacgttgcacaaattattgttccctgatggtcaattaccagaacagcagcaaaacacaggggaagagggaacgctgcttcaaaattatcggggcttaaatgacgtcacttatcaagtctatgatgtgacggatccgttttatcagcttcgttctgaaggaaaaacggtccaagaggcacagcgtcaattagcagaaaccggtgcaacaaatagaaaaccgatcgcagaagataaaacacagacaataaatggagaagatggagtggtttctttttcattagctagcaaagattcgcagcaacgagataaagcctatttatttgttgaagcggaagcaccagaagtggtaaaggaaaaagctagcaacctagtagtgattttgcctgttcaagatccacaagggcaatcgttaacgcatattcatttatatccaaaaaatgaagaaaatgcctatgacttaccaccacttgaaaaaacggtactcgataagcaacaaggctttaatcaaggagagcacattaactatcagttaacgactcagattccagcgaatattttaggatatcaggaattccgtttgtcagataaggcggatacaacgttgacacttttaccagaatcaattgaggtaaaagtggctggaaaaacagttactacaggttacacactgacgacgcaaaagcatggatttacgcttgatttttcaattaaagacttacaaaactttgcaaatcaaacaatgactgtgtcgtatcaaatgcgtttagaaaagaccgctgaacctgacactgcgattaacaacgaaggacaattagtcacggacaaacataccttgactaaaagagccacagttcgtacaggcggcaagtcttttgtcaaagttgatagtgaaaatgcgaaaatcaccttgccagaggctgtttttatcgtcaaaaatcaagcgggggaatacctcaatgaaacagcaaacgggtatcgttggcaaaaagaaaaagcattagctaaaaaattcacgtctaatcaagccggtgaattttcagttaaaggnnttaaaagatggccagtacttcttggaagaaatctctgcaccaaaaggttatcttctgaatcaaacagaaattccttttacggtgggaaaaaattcttatgcaacgaacggacaacgaacagcaccgttacatgtaatcaataaaaaagtaaaagagtcaggcttcttaccaaaaacaaatgaagaacgttctatttggttgacgattgcaggcctgctaatcattgggatggtagtcatttggctattttatcaaaaacaaaaaagaggagagagaaaatgaagcaattaaaaaaagtttggtacaccgttagtaccttgttactaattttgccacttttcacaagtgtattagggacaacaactgcatttgcagaagaaaatggggagagcgcacagctcgtgattcacaaaaagaaaatgacggatttaccagatccgcttattcaaaatagcgggaaagaaatgagcgagtttgataaatatcaaggactggcagatgtgacgtttagtatttataacgtgacgaacgaattttacgagcaacgagcggcaggcgcaagcgttgatgcagctaaacaagctgtccaaagtttaactcctgggaaacctgttgctcaaggaaccaccgatgcaaatgggaatgtcactgttcagttacctaaaaaacaaaatggtaaagatgcagtgtataccattaaagaagaaccaaaagagggtgtagttgctgctacgaatatggtggtggcgttcccagtttacgaaatgatcaagcaaacagatggttcctataaatatggaacagaagaattagcggttgttcatatttatcctaaaaatgtggtagccaatgatggtagtttacatgtgaaaaaagtaggaactgctgaaaatgaaggattaaatggcgcagaatttgttatttctaaaagcgaaggctcaccaggcacagtaaaatatatccaaggagtcaaagatggattatatacatggacaacggataaagaacaagcaaaacgctttattactgggaaaagttatgaaattggcgaaaatgatttcacagaagcagagaatggaacgggagaattaacagttaaaaatcttgaggttggttcgtatattttagaagaagtaaaagctccaaataatgcagaattaattgaaaatcaaacaaaaacaccatttacaattgaagcaaacaatcaaacacctgttgaaaaaacagtcaaaaatgatacctctaaagttgataaaacaacaccaagcttagatggtaaagatgtggcaattggcgaaaaaattaaatatcaaatttctgtaaatattccattggggattgcagacaaagaaggcgacgctaataaatacgtcaaattcaatttagttgataaacatgatgcagccttaacttttgataacgtgacttctggagagtatgcttatgcgttatatgatggggatacagtgattgctcctgaaaattatcaagtgactgaacaagcaaatggcttcactgtcgccgttaatccagcgtatattcctacgctaacaccaggcggcacactaaaattcgtttactttatgcatttaaatgaaaaagcagatcctacgaaaggctttaaaaatgaggcgaatgttgataacggtcataccgacgaccaaacaccaccaactgttgaagttgtgacaggtgggaaacgtttcattaaagtcgatggcgatgtgacagcgacacaagccttggcgggagcttcctttgtcgtccgtgatcaaaacagcgacacagcaaattatttgaaaatcgatgaaacaacgaaagcagcaacttgggtgaaaacaaaagctgaagcaactacttttacaacaacggctgatggattagttgatatcacagggcttaaatacggtacctattatttagaagaaactgtagctcctgatgattatgtcttgttaacaaatcggattgaatttgtggtcaatgaacaatcatatggcacaacagaaaacctagtttcaccagaaaaagtaccaaacaaacacaaaggtaccttaccttcaacaggtggcaaaggaatctacgtttacttaggaagtggcgcagtcttgctacttattgcaggagtctactttgctagacgtagaaaagaaaatgcttaatttctagcatcaccgaagaaatttttagaaaaacaaagagcctgggccaatcactgtcccaggctctcatgctttatttttaaggaggaagcaatgaagtcaaaaaagaaacgtcgtatcattgatggttttatgattcttttactgattattggaataggtgcatttgcgtatccttttgttagcgatgcattaaataactatctggatcaacaaattatcgctcattatcaagcaaaagcaagccaagaaaacaccaaagaaatggctgaacttcaagaaaaaatggaaaagaaaaaccaagaattagcgaaaaaaggcagcaatcctggattagatcctttttctgaaacgcaaaaaacaacgaaaaaaccagacaaatcctattttgaaagtcatacgattggtgttttaaccattccaaaaataaatgtccgtttaccaatttttgataaaacgaatgcattgctattggaaaaaggaagctccttgttagaaggaacctcctatcctacaggtggtacgaatacacatgcggtcatttcaggccatcgtggtctccctcaagccaaattatttacagatttgccagaattaaaaaaaggcgatgaattttatatcgaagtcaatgggaagacgcttgcttatcaagtagatcaaataaaaaccgttgaaccaactgatacaaaagatttacacattgagtctggccaagatctcgtcactttattaacttgcacaccgtatatgataaacagtcatcggttattagttcgaggacatcgtatcccatatcaaccagaaaaagcagcagcggggatgaaaaaagtggcacaacaacaaaatttactattatggacattacttttaattgcctgtgcgttaattattagcggcttcattatctggtacaagcgacggaaaaagacgaccagaaaaccaaagtagtatgacgaaaaggctaaacatactaaaaaaaagagtaaaaaaatagcttttcaatttttaatcctccttatcgtgcataattgaaccagagaaacagaagtattaacgaaataactaaaagagcaagccctgaataaaaagcgacaaagggccaatcaatcgactgtttaaattcctgccaagtttggatttttctgttttttttcgcgctatcctcaagcgtgagtaaataattcaatagtaagaggagtagcaacaccgtgaaatcatttgtggtaaaaagcacatgtaaaaatagaatgacaaagacaacacgggataacactcgattccgcaaaattaaaaataacttagcacgcataataaaccaccatttcttatcagagataatgaatctgtttttgtctactctttagttatatcataaaattcttaataatgaaaaaatgactcgagaaaataattgaaaaaagttttttttcctgaatcattattttcgtaaataaagaataaacgtgttactcttggcttatcaaatttggaaggagtgttaaaaatgaaatatctggatattattgctttaattttattgattgtcggaggtttaaactggttatta

SEQ ID NO: 46 - DNA, 3169 bp; double-stranded, linear
ttcacaaaaaaatgaaaacacaaatttaacttggaggatgttgagtagtgagcaacgggaaaaagattttnattagtcatagttcaaaggatcaagaatatgtggatgcgtttatccaattattgaaaaagtttgggtttcgaacacaggatattttttatagttccactattgaaacaggtgtacagccaggagaattaatttttgacacgattaaaagggagctaaccaatcaacctgtcatgctgtattttttatctgatcattattatcagagtattccatgtttaaacgaaatgggtgcttcttggatgctatcagataaacactatccaattgcgttaaataatttttctatgaaagatatgaaaggtgttattagtagtgagcgtttggcgattgcgtttaatgataagacaagtactaatgaaataaactgcttattaaaaaagttatctcatgacacagatgtacaagctgagccagattttgaactaaacgttgagaaaaatattcagccattccaaaataaactgacacaactgattcggcaagcaagttatttaaaacctgatgaaaagggatattttgaaacgrttcttagcactcatcgtcctgtgtatggcacagcaaaaggggtctatgactgttttaaattacctagcttaattgagcctaaaagtttaggtttagacacgctatcagaggatgaaagccattggctattcttttttcttacgtggggaacttttcaagaaggcgaaaaagtgcggtttaaattgaaaaaggataaggcgtataacaatcgggaattcagtgatattggtaaatgtaaaaatatttacgtctcttatttagagaaggtagagtaattggaggaggtaataaatgaaaatgaattggcgtcagttggttggtacatatcgtatttctgataatggtaaacaatatcaaaatgactggttaaataagcaagttgatttagccacagaacttcgtaaatcttttgatagtgactatcgtagagtaattaaaagtgatgcatttagacgcttwncaagakawaacaccaagttttycctttwgrancgtaatgattttggtaagaacacgtttaacacatagcttagaagtggcaatgcatagcagggatatacttagattagttatttcacagttgaacgaacgaaacattgaggttatggaattatcagaatgctatcggttgttagaaacagctgcattaatccatgatatcggcaatcccccttttggacattttggggaagaagccattcgtatttggtttgaaaaaaatggtcctttgtatgcttgttggtctgatttttcggagcaacaacaaaatgattttcttaactttgaaggaaacgctcaaaccatccgacttttaacaaaactgcatcatgataatgggacttctaaagcaggaatgaaactaacagccacgacattagatacagttatcaaatatacggcatcttcagatcaattaaataagcaacagcttttgtctaaaaaagttggctatttttactcggaaaaacaagtgtttaacgccattaaatttgcgacaggaacacmaaataagcgacacccattagtctttttgttagaagcttcagatgatatcgcctatactttttcagatatcgaagatgcctataattatggtttatacagctatcaagatttaaagcagtttgttgatgcgcaaacaggaacaaaaaaatttttaatgttagaaaaagataaaacagaagaagctaccttacaagaatttttgagaaagacacaaagagctgtttgtcaaagcgtagcgaaaaattttgctaatcattatgacttaattatgagaggtatctatcataatgaaattatcattgaagattgtgatgaagtgaaatgctttcaggcattaaaaaacttttctagagtctatgtttttcaaacaaaaacaattttggatcaagaggtattgggcttcaatatcatcaatcgtttactagatgaatttgttccagtcgtactgaaatatgaaaaagtttccatgaataagtatgaggagcgaatctttaataatatttcggaaagcgcgaaagcgttgtatagaagagaagcaaagaacgctacagaagcagaaaaagactattatcgtttgaaaatggcggtggactttgtatgtaatatgacggatggatatgccaaaaaagtttatgatacattattcacttaaaatttgagaaaaagcttctcagcggttgccgccgctgaagaaaactagttcattgcacaggctgatcgtttcagtaaaaattttaaagatgctagtaatttcactgaaaatcgggtacactaaaattagctagtgtaactagcaaaaaaggcaactggaatagataggttgtgctgtctatgaagggctttgtttgtcaggtggtgctgacatgcaaagtgccttttttctttttctcaacattttaaggacaaaaaacgattgcaacatgtcacaatcgctaacctcggagaaaaaggaatttttctccaatggccatttcgataacctgttgtgtgtttcgaaacattcagaacggtggtgcgttctttcagtgcctaattatccaattcgtttcttgttcctctatttacagtatactgaatgaaagcctattctgcaatgatagaatcaggttcctgtgattaaataacataaaaaatgggctccttatataaagaaaaataacaaaagaaattttgaatattgacgttttttttaggtacgttatgataagcgagaggtgattttatgttaaaaacgcaaattgttgattatttacgcaatcaaacagctttttttgaaccatctttagtcagtgaaattttcacagcaagcaatattgcaacgacattttctatcaaacgaaatacagctagtcactatttaaatcagttaaacgaagaaggaattctagttaagatcaatacacgaccggtttacttttttcataaagaagcgtttcagcaacaaaactatcttttaaaaaggaactgtttatccaagtttccaagaaatgatcgatgaacagcctgtttttggatcgccaaagngganttttnttcagtcgggtcatngggtatcgcgggtagttta

SEQ ID NO: 47 - DNA, 17087 bp; double-stranded, linear
gtctatacaagttcacaaggaggcgccaaacatgaccattttagaattaacattcgcaacgaaccaactaacgacgactttttttaaccataaattggaaccgcttcaccaaaaaacattcccttttgaagccttgactatcgaagaaacggttcctgaactgtgccaattgattttggcagaggcggcaccgattctgggggggattgtggctgatttcccagcggacttcttttcgccagaggaaacgttggcgctggttccgcaagcggtgattcaagcattcgcggaacagttgaacacgccacttttaacggcagccgaacaagcggcggcaccgaatctgctagaagcatttgaagaaaaacggcagtatctggcttggcatttggactattatggctacgtgcctgggaaaaatgaatatgcggtggagtccctgttaactgtcggcaatggctttttaggcttgcgcggcacgacacctgagatgacgatttctgatgatcattatccagcgacctacattgcggggctttataatacagcggcttcggaagttgcgggtcaagtagtggaaaatgaagatttcgtcaatgctcctgacaaccaacacatcgctttaaaaattggcgatgccactgactggttaacgatttctccagacacgctacaacaattacatcgtcaattgaacttgaaaacggggttgtttgtcgcagaaatgattttgaaagatgcggacaatcagcaaattaaattaacgacgaaaaaaatcgccaatatggcacagccgaatgactatcatctgcaatatacgtttgagccgttaaacttttcagccccgattactttgaaaaccgtcacggatggcagtgtctacaactataacgtggcgcggtatcgcaacttaacagcgaaacattttcaggtgacagcattaagcgcgcaggaaaacaaaaccgtgattgaggtttgtaccaatcaatccaacttaagcgtccgagaaacgtctttgataaccggtgatttttttgaaaaagaagccattacgattcaagaagaagcggagaaaatcgcccaagtggtgaccgtgatggcgcaccaaggaacgcgctatacgctagaaaaacaagtctttgtacaagccagccacgccgaacaaagttggcaggtaccgtttacgccgaaggactcttttgcggccgccgctcaggaaagcgcccgcgcttggcaaactctttggcaacaagccaacattaccgtgacaggcgatttgatgtctcaaaaacttttacggattcacagttatcacttgctggcttcggcttcgccttttagtaaccaagcgcaagcattggacgtctcgattaccgcccgaggcttgcatggtgaagcgtatcgtggacatattttctgggatgaaatttttattttacctttttatattcaacattatcctgacacagcgaaacaattgttgctgtaccgctaccaccgattagagaaggcgaaggaaaatgcggcggccagccagtatcgtggcgcaatgtatccgtggcaatcagggcgtgatgggcgtgaaaccacgcaaaaacttcacttaaatccgttgaatggacattggggcgaagatcatagtattttgcaacggcatgtttccttggcgattgcttacaatgcttggttgtattggcatagtacacaggatcatgaatttatgaaacaatatggcggcgaaatgttgttagaaatcgctcaattttggaacagcgctgcgacgttagatgacgcaacaggacggttctttattgataaagtgatgggacctgatgagtttcacgagggctatccagaccaagcggaaagcggcttgaaaaacaacgcctatacgaatttgatggtggtttggctattcgaagaattaaccaacattttggcacttttctctgaggaagaacaggcacaactttttgccaaaacgcagaccacttcggctgatttagcccgcatgcagcaaattcaaaattcactggaaattgaagttaattctgacggtattattgcgcaatatgaagggtatttcggcttaaaagagattgactggacagcgatgaaagagaaatacggcaatatttaccgcatggatcgaattttaaaagccgaaggagaatcccccgatgattacaaagtggcgaaacaagccgacacgttaatgttgttctacaacttagacaaaactcgggtggatcaaattttagaagatttagggtatcaattgcctgcggattatttggaaaaaaatcttttgtattatctaaaacggacgtctcatggttcgactttgtcacgaattgttcatgcccaattggcagaaatggcgcaattccatgagctatcttggcaactttatcaagaagcgttgtattccgattatcgtgacattcaaggtggcacgaccgctgaagggattcatacaggggtcatggctgcgacgatccacgttactttagcgacgtatgcaggcgttgacacgcgccagaacgagttatcaatttgtccaaacttacctgaacattggcaagcgctggccttccagtttattcatcaaggcgtgacgtatcaattttcattaacacaaaccagtgtcacgattacagcagatagagacacacaattattggttcagggcgcgttgattccgttaaccgccgaacgaccaaaagaagtacattatcaataaaggagcgaaccacaatgacgattggatttatttttgatttggatggtgtcattactgacaccgccaaatttcattatcaagcttggaaagcgttggccgattcgctaggtatccccattgacgaaaccttcaacgaaacattaaaaggcattagtcggatggattccttggaccgtattttagtccatggccaccgcgaaaatgcgtttactccagcagaaaaagaagccttagctcagcaaaaaaatgancactacgttcaattattagaacaattaacaacagaagatgttttacctggtgtcgtgccattgctacagcaagcccaagcacgtcacattccctgcgccgtggcttcggcttcaaaaaacgcgcccctgattttggaaaaattaggcgtgcgcgcgtacttcgccacaattgtcgatcccgactcgttaagtaaaggcaaacctgatcctgaaatctttttagccgccgctgacagtattggcgtgctaccgcaaaacgccattggctttgaagatgcacaatcaggcattgacggcttgaaagccgcgggcatctatgccgtcggcttgtcggccagccaacccttaatcggagccgacatgcaagtttctgaaatgactgaactaagcgttgatgcactgctcaatcgctaaagaatgacaagaacctttagcagcaggcacctcttttcatctacattgtatctatgctagaatgtagatgaaaagagagagatgcgtcaacatacctctctagtgtagagccgtttgagacggtgaccaatttagttataaaaaataaccgtaccggtcaaagtagacggttattttttattgtcattacactccattattggattaaaaaggattgagttgaacgtggttctgtggtagacttttattagaaacaagtagatgtttcttgatgatcaggcatcataataactcaatactgaaatcggaagtaatagccgatagttggcgagcaacagaaaaactcgatatagaattggacgtagagccaatagttggtgagcaacagaaaaacctgaattatatttgaagtttaaagaaggcaagctaagcttggcttctttatttataggagaaactaatgattgagaaaaaagattttgacacaattagaaaggcgttcttaatttatgacaccaacttcaataatcatatgttcacttatacatatcaacatcggaaaacaaagaaattgttagaaatgaacgttcaatttgaagctgggaattttatgcatttatgcggagttgactattatcaaatagataaacaagggagctgtaaatttcgttttaaggctactcaattttacagagctttaaaaaataataaagtttcactgcgcgggattaaacctaaagatgatggaaccacaggccaaaaattacaagtaattcctctattagaaatgcttatttctccaggtgtacgaatatgcgatggaggaaaattttataatttacagtatgaaaaagcaattcgttcaggcaaaatgattgtggcgttaacatgtaaagagaataacaaaaagtacgttccacaatctttattatcgttaataaatcagccacgaaagagccaatcgaaatctttaactgaatcccatgaagtaattaagataagtaagtctgagctgaatagcacctcagtaattgaagtttacgataaattttaacaaaaaagcgggctaaacagactataggcaaagagaaaaagcccagaggtttttctcctctttaacagcttttaggatttcacggattaacgctaaatttattcgtacttttcgggaaaatgcgctataatgaaaatgaaaagagagatatgcttcaacatacctctctgatgtagagccgtttaagacggtgactttttgaattatttaaaaataaccgtactcggtcaaagttgacggttattttttattgtcatttttaacagctttttagtttccaaggaccaatactttactattagcaacgaagttcacggtcctttgtgcttgtctccacgttcatttcttttgcttattgtttaaatcctactaacggaaaaatgaaatcaacgaattttatccccgcataaaaacatagggcaaacatcaaaatcttaattaagattttgacaattggtcgttcagttatctttttcatttgtatactcctttccaatatttttaaagctccaacctttttaatctttttgacatctatattttatctaattataataaaactcacaatagaggaagcatcattttttcatttcctttttattccttgattagtagttcaatttgtaaacatatcattctgacaaaatagaaaaggaggttgttatagtatcgaaacaaaattatctacaaagaaaaaaacacttctttatctcctgttcacttttttgacagccctacccagcatagaagcattaaccggaatgagcttaatagctataaaaaataacgaaaaagccttgattatctttgatagtgtactatctttaattattattatcgtgctgtcagttttctataaaaaaatagtaaagaaaaaaaagcaagctatctttaaaagtctattactagctattggcatgttcttattttctattattctaaatttacttttctcacgcattcctactccagaaaatcaacattatattaatgaagtccgaaatgtagcacctgttttaatggcccttcatactagactcttttcacctataatagaagaactcctgactcgtggcatttttatgaacttattttttataaaaaacacctctcgaagtgtcttatgtaaaatatttttttctggtctttttttttggtcttagccatggactattaccatcaatttccatgcttttttattgtggaatgggctgggttttagcctctacctattatttctgtaataacaatctcacgtatcctcttgctattcatttgctattaaataatttataatacacaaaaaacccgcccacatcagaaaaatgatgtgggcgggttttataattatttatttttkgtttcaaataacggactaactggtttgttttcgtggatacgtttaatcgcatctccgattaattcaccaacgctgacttcgtcaattttaacaattttacgatcatcagataggtaaatagagtctgttacaactaagcgttcaattgctgaatcttcaatacgttgtaaggctggtcctgataaaacgggatgtgtacaagaagcgtaaacgtcttttgctccggcttctttcaatgcgtttgcagcaagagaaattgtccccgctgtgtcaatcatgtcatcaattaagacacatgttttgccttccacatgaccaatgatattcattacttctgctacgttcgcttttggacgacgtttgtcaatgatcgcaattggtgcttttaagaattctgccaatttacgcgcacgcgttacaccaccatggtcaggggaaacaacaacgacgtcatcgccttgaatgccgtgttcgatgaagtaatcggcaattaatggtgcacccatcaaatgatccactggaatatcaaagaatccttgaatttggaccgcatgtaagtccaatgtcaacattcttgttgcaccagctttttcaatcatgtttgcaacaagtttagcagtgattggttcccgggcacgtgctttacggtcttgacgtgcatacccataataaggcataaccacgttaattgttttagcactcgcacgttttaacgcatcaatcatgattaatagttccattaagttatcgttaacagggctacttgttgattgaatgacgtaaacatgtgcaccacgaatactttcttcaatattcacttgaatttcgccatcactaaattgtgttacagagcactttcctagctccacacccacagcatccgcaattttttctgctaagggacgattagagttcaaagaaaagattttcaatcttggatcaaaataatgtttcgacattagaacctccactttctatttcagccaattcgttaaaactgaacaatacttnccttctaaaataatagtagtcctagccmaataaatcaagagattttctgtatttcatacmaagatattcmtcaaaagtcgctttcttctaactattttatcgtatttgtctaaaaaatgaggattatttgaataaagaaaggtactcgccatagccttctttttctaaatctgccactggcacaaatctcaaagctgccgcattaatgcaataacgtaagccaccttcttggagtgggccatcagtgaaaacatgccctaaatgtgaatccgcttcttgactgcgaacttctactcggtgcatgccgtgactaaaatcagctttttctttgacgccacgtttttcaattggtttggtaaaggatggccagccgcaaccagcatcgtatttgtccagggagctaaacaacggttcgccactaacaatgtctacatagattccgtcttggtaaaagtcatcatattctcctgaaaaagggcgttctgttgcgttttcttgtgtgacggcatattgaagatccgtcaaggtttgttttaattcttcttctgttggttttgtcattctgtccactccttttcttctgttcaatttattgggttcaatgataccacgtttgccaaacaggcacctaatagtttgcatagtaaaagacagtcctttctctttttgacgaatgaaaaggactgtcttttattagttgaattcttttaacagtcgagctactttggcaattggtaagcccataatggcgtaataatcgccagcgattgcttcaattagtaatgctccttgtccttggataccataagcgcctgctttgtcggcatattctgcggtgtctaagtaagcatggatttccgtgtctgtcagtggataaaacgtcacggttgaatgaactgtcgcggagcgctctttttccccttgtttcaacgtcacacttgtatacacgtcatgtgttttgccacttaggaggcgcaacatgcgataaccgtcttcccgagaagtgggtttgccgaggatctctcccgccaatgccacaattgtatcgcagccaatgactagtgcttcgggggattgctctgctatagccgctgctttttgggcagccatttgcgccacatattctgctggtaagccgtctttgccaacagtttcatcgatgtcggctggtgcaatcgtaaaagttggaaccacacgctttaataactcctgacggcgaggagattgggatgctaaaataatttgcataaattgatgacgcctcgtttctttttaatgggggtcttgaatgcgtttaaacattcgttccatatctgaattcgtaaaatgaatcagcaccggacgtccatgcggacaattaaacggattttcgcacaaggctaaatcttttaatagcacgcgtgcttgttgctcattgaggtaatgattggctttgatggatcgcttacagctcatcataatggcagttgcttcacggaattttttcacgctgaccgagccagttgttagcaacatgtcaatcatctcgcgaacaatgctttcctcttcgcctgcaggataccaagttgggtgcgcccgcacaatgaaactattttgtccaaagtcttccaaatggatgccaacttccgcaagggtttctttctgctctttaattttcaaggcatcgctatttggataatcaataacgattggtaccaatagttcttgtaaatcatcactgacttcgccaattttttcacggaagtactcgtatttaattcgttcttgggcagcgtgttggtcgataataaacaggccatctttgctttgtgcgaataaataagttccgtgcatttgaccgaagtattctagctcaggaaaacgctctgtcggtcgttcttcttccaacttgttcagggcttgtttcagttctctttgactcgcagcgctattggcatcgaattctgggtgaagtttcatttcttcttggaaaacctcgtcagcagcctctgatgaacgcagagaaggttctgaatcaggcacttcagttattttcgtttcttcggctattacctgttgctcattactagctgtttcccaatgatttgcggaatcagcagctgccgaagaggtttcgtaagctgacgtttcttccgctacactcgttgattctggcactggcggcgcaaatggatcgtccattgggtccactgctctttctgtctggttgacagcttcaggggcgcttgaggctggtgtttcgtctgtcgcatgttccgcatagaagcggcctgttgcgggattatagcttaagctgcccggtcgttgttttaccgcaggttgttcagtcgataaaggaatttccatttgttcggctttaggttctggcggtagtttctttttaaaacgcaaattgtctgccgcattgggaatcaactgttcttggctcaacacttcttgaatcgcctgttcaattaatgccattaaatctttttctttacttaaacgaacttcttgcttagtaggatggacattgacatcgactaacagcggatccatttcaatttctaacacagcaattggaaaacgccccaccattagtttcgaaccatagccggctacaattgctttatttaacgcgaaatttttaatatagcgaccattgataatcgttgataaatagttgcggctggcccgtgtgacttctggcaatgagacataccctgtcaaagtaaaatcaaggtcttttccttcaattttcaacattttctttgcggtgctaatgccataaatccccgcaatcgtttgttttaaatcaccattgcctgttgtactcatcattttgtggccatcatgaactaagcgaaaagcaactttagggtggcttaacgccagacgattgacaatgtcaccgatattggccaattccgtttggatcgttttgacgtatttcaaacgagcgggcgtattataaaataaattagaaacggtcatttttgtgcctttacggagggctgctggtcggttttcttcgaccttgcccccttttagaatcacatagctgccttcttcttcctcagctgtggcagtttcgacaatcatttcagaaactgaggcaatacttggtaangcttcgcctcggaaccccaagctgcgaattcggaacaaatcatctcttgtatgaattttgcttgtggcatggcgcttgaaggcattcagtacatcttctttggcaattccttcaccattatcaataatttgaatggtttttaagccagcttcttcaataaaaatatcaatttgagtgcttcctgcatccagtgcattttccaccaattctttgacgacagaagcgggacgttcaacaacttcaccagcagcaatctggttggctagttgttcggatagttcttgaattttccccatttcacgacctcctaaccggttcggttcctaattagatacgtttttgcaattgatgaagcatgtttaacgcatctagtggtgtcatttctaatagattcattttcttcaatgtgtcaatgacacttaattcttctgttgaaacttctttaaataatgaaagttgctcggtttcttcatgtacttctgaaacttcttcatgatgaactgaaattggaatcgttgtttcttccgcttctaaagcggataaaatggtggctgctcgttctaaaagcgggcttggtaaaccagcgattttagcaacatgtatcccatagctcttatcagcaggtccttccatcattttatgaagaaagaccacttcgccatctttttcgacagcgcccacgtgaatattcttcaagccttttaaggtttcatctagaacagttagttcatgataatgtgtagagaatagcgttttggcttgtacttcacgatggatatattcaatgatggcttgcgctagcgccattccatcataggttgccgtgccgcgtcctaattcatcaaataaaattaggctgttaggcgtggcgtgccgcagtgcttggttggcttccatcatttctaccataaaggtactttgccctgcaattagatcatcagaggccccaatccgtgtaaaaatttgatcgaaaattggcatttcagcactttccgctggtacaaaacagccaatttgcgccatgaccaccgtcaaagccaattgacgcatgtaggtacttttccctgacatgtttggtccagtaatcaagagaatatctgtttctgggttcatgcggatactgtttggaatgtattcttgatgccctaaaactttttccacgactgggtgtcgtccttcgacaatcgccaaatttttcgtgttacttcttaacgttggtcgaacgtattgataccgttcactaattgttgcaaaagattgtaaaacatcaaccgcactaatggttttagccagtgtttgcaaccgatcaatgttcgttttcacttgttctctcacggccaagaacaattgatattctagttcaactgatttttcttcggcttctaagattaaacgttctaattcttttagctctggcgtaataaagcgctccgcattagctaatgtttgcttacgctcgtattttccttcttctaaattcgctaaatttgacttagtgatttcaatgaaataaccaaagacccgattgtagccaatcttcaagtttttaatccctgtttcttggcgttctttcgcttctaactccgctaaccattgcttaccattgcgcatggcatcacggtattcatctaattggtcgttatagccgtctttaataacctttccttcagtaatttgtaaaggggcttcttcattaatcgccgtcgcaatcaatgccactaaatcttcaacagggtttaagtcgactaacaaatcatcccattccccttgattgatcccgacaattaactgtcgaatcgttggtacttgttctaaagaggtccgtaattgaattaaatcacgcccattcacactgccgaatgccacgcgtcctgctaaccgctctaaatcataaacgttcgtcaatgctgcttgcaaatccaagcgttcaaaataggcatttaataaggattgcaccatttcttgacgcgccttaatttgacgttcctgaatcagcggacgatccaaccattgttttaataaacggccgcccatagctgttttcgtttcatctaatagccacaatagagtcccttttttctgtcctgttcgaatcgactgactcaattctaaattgaatttagaataatgatccattttcaagaaatgatctggctgatattccacagctttctgaatatgggacaagctccgcttttgggtaacggataaataagataataatttgcctgtaatttcaatttctaatggattaatcagttcattggttaaaaaactaaactcggcattttcttccaccgtttcttgtgtcgaaaagatgatatttaaacgtaaacttaagttctcttttaacgattcagggatccctgaacctaggaccatttcttttgtttgcaacgcagaagcttcgttcaaaacgccctcttcatcagccaagactgctgtttttaattcgcctgtactcaaatctacataggcaaaaccgaactgattaccatctgttagcacagcggttaagtaattattgtctttggcttccaagcctttactattcatcaccgttcctggcgttaccaactggaccacttctcgtttgaccatgcccttggtagtctttggatcttccacttgctcacaaatcgctactttatagccttgctcaatcaacgtatcaatatagccttgcgcggcatgataaggaacgccacacataggaatcggatcatccgcattgcggttacgactggttaacgtcaattctaagatttgcgctgcattgatagcatcttcataaaataattcataaaaatcacctaagcgataaaataaaaacgcatccttgtattgggccttaatggataaatattgttccatcatgggtgtattttttgtcttttgtggcatttaattcccttccttctctagctcttcgttcacgcggtattgaatgagcgccgtgacatgttggactaagtcattggcttcgatcagttgttcgcggtaggctacaacgagtgggtgctcatcaaattcttttgttttcgcatcggctcgttgaatggcttctttttcagcagttggtttgccatagtgagcaaattgaaccgcatctttttgcgcagctttaatttcttccactaattctgtcagctttttgtttttctttaccttttcttcaatcgcttggtagcgctgaatgacttcatcttgtccaattaaatgtaacaatttttctaattctttattactttgtgcatctaaattcaacggctccatttttttcaccttcatctttcaccggcactttttctataagagcagaaaaagttaacctcttaattatccgagattaacttttcttctattattcttgaaacgggcgatcttcgctaatctgaatcggctcaatcattttcgcttggcccgtttggtcatcaatctctaaaatacaggcagataaaattgtccgccctgtttcgactacctcaaagcgcttcggcaatgctgtcataaacttctcaataatcggttcacgcttcattcctaaaatcccatcataaggaccggtcataccgacatcacttaagaaggctgtccctttcggtaaaatccgagcgtcatttgtttgaacatgcgtatgtgttccaacaacggctgaaacttggccatctaaaaaccagctcatggcttgtttttcactcgtcgtttcgccatgaaaatccacaaaaatgagcggtgtccgtttgcgagcgatagctactaactcggcggctttcttgaaaggatcttccaatggcaccataaatgtgcgggcctgtaaattaatcaccgctagttccaattgattgactttcacaaaaaccattccttgaccaggcacatcttctggaaagttcgctggacgaaccattttcttcgcatcatcaatgaattcaaagatatccttgttgtcccacgtatggttacccatcgtaacaacatcgacaccatcttgcaaaaatttcttataaatcttgccagtaattccccgaccagatgccgcattttcaccattggcaatggtcacttgtggacgatattttttctttaatttagggacatacgttgctaaggcttctcttcctaaagaaccgacaacatctcctataaataatatacgcaaaaaggttcctcttctctttttaacatctcttgtttattatagttgttttcgctttgaaaagaaagttttggttttaaaagattaaaaaaagtgtctcaacgaacaatccttgcaattgttcgttgagacactacacgcgatacttattcgctttttattttatttcgcatagtctacggcacgtgtttcacggataaccgttactttgatatgtcctggataatccaagtcatcttcaattttcttccgaatgtctcgaactaaacgaacagattctaaatcagaaatttcttctggtttcaccatgacacgaacttcacgtcctgcttgaacagcaaaacttgaatcaacgccttcaaaactattagaaatattttctaagttttctaagcggcgaatgtagttttctaacgattcctacgtgcacctggacgggctgcagataacgcatctgcggctgccactaaaacagaaataactgaggttgcttccacatcaccatgatgcgaggcaatggcattaataactactgaattttctttatatttcgcagctaattctgcgcgaatctcaacgtgagaaccttcaatttcatgatccaatgctttcccaatatcatgtagtaaacctgcacgtttggctaattgaacatcttcgcctaattcggcggctaaaacgccagctagttttgctacttcgattgaatggttcaagacattttgaccataacttgttctgaaacgtaaacggcctaaaattttaattaaatcaggatgtaacgtatgagcacctacttcaaaggctgcttgttctccgtattcacgaatccgttcatccatttctttacgtgatttttctaccatttcttcgatacgagcgggatgaatccgaccatcttggattaatttttccaaggtcattcgagcgatttctcgtctgattggatcaaatccggataacacaaccgcttctggcgtatcatcaatgattaagtcaatccctgttaatgtttccaatgtacgaatattacgtccttcacgaccaataatgcgacctttcatctcatcatttggtaaagtgaccacggaaacagttgtttcagaaacagaatcggcggcgcaacgttgaattgctagggaaagcaagttcttcgctttgcgatcagattcttctttggcacgttgttctgactccttgaccatcaaggttagttcatgattcaactcttcttctgttgacttcataataatcgattttgcttcttcttttgaaagggaagcaattcgttctaattcttgatgttgctgattaattaagttttctacttctttttctcgctcatcaattaattgctgtctagcaccaagtttctcttctttttcttccagtgagccttcacgtttttcmagrgagtcatctttacgatccaacgtttgttcccgttgaattaaacgattttcttgagatttaagttctaatctgctttctttcaactcactttcaatttctgaacgatacttctggttctcttccttagcttctagcaatgcttcttttttcagtgtttctgattctttccgagcgttctcgagaatactcgacgctgaaatttttgcaccatttattgctttatcgtgacgtgactttgcaataacaaatcctaaaccaagaccgacaatcaaaccgacgatagcgaggagaatatttaaaaccatatttccacctccatactatctttttgttaattcatatcttgtagttttttgataaactaaaatcaattatcaatatgcctacttgcatatttgtgcatacacacaattttattctaatgtttgtcgtgaaaggtgtcaacttaaaaaagccctttcttttggaaagggcrgcaaatattagacaacgtcacatttttaggtttccgccgtcacgaattgtttaaattttagaacaaacgccgcatagtctgctgtttgactaagctgcttgatgtggatgggttcggacatggacaacagtctatttaacaatttagttctaaacaaaaaaagacaacacctgtcctgttcagtaagtgttgtctttcttcttaacgagtcgtattcactcgttatctattcatctaagggtaattcttcttgaccttctgcttcttctgtaatggttgaaccgtcaccgatgccgtatgcatcacggaccaatttagacacttctgccatcatttcaggatgatccgccatgtattgtttggcattttcacggccttggccaattcgttcttctttgtagccataccaagcaccacttttactgataaggtctttttccacagccatatctagtaattcgccttcttgggaaataccttggccatacatgatatcaacttctgccactttaaatggtggcgccactttgtttttaacgactttaatttttgtgcggttaccgacgatgtctgttccttgttttaactgttctgcacgacggacttctagacgaaccgttgcgtagaatttcaatgcacgtccaccaggagttgtttcaggatttccgaacatcacgccaactttttcacgaatttggttaatgaaaatagcaattgtttttgtcttattaattgagcctgataatttacgtagtgcttgagacattagtcgagcttgtaagccgacatggctcgctcccatctcaccatcaatctctgcacgaggaactaacgcagcaaccgagtcgatgacaacgatgtcaatcgcaccacttgaaactaaggcatcggcaatctctaagccttgctcgcccgtatctggttgagataaaagtaattcatcgatgttaacgcctagtttctccgcatattgaggatccaatgcatgctcagcatcgataaaagcggctgttccaccatttcgttgcacttctgcaattgcgtgtaaagaaacagttgttttacctgaactctcaggaccatatacttcaataattc

SEQ ID NO: 48 - DNA, 11764 bp; double-stranded, linear
aaatgaatatttattctgctttattntcaatactttgttttcatagttgctttagctgttccttttttgaataagattaaaatgaataaataacaagcaaaatataagatttttttgtttaactctttttgtttcaataggaagtgcttagtgttttttcagaattgaaaaatgaatacgacaaaaaatttatctatataatagaaggaaaaataaaaatagtgaatgataaaaaaaattcaaagaaaacacccgttctttttaggcctgagtttttgaaaaaaacattctcatgtctagtatctttaacattttgttactttttgactgaaacgaatgtaaaaaaaccgacatttaagggctaatcaagggttagaaaacggtttctcgaaaataaaatcctgtttttttaactttttttcgcaaaatataaacaggataatatcaagcttccagcagctttttattacaaaatgtaacaaaaccgacattctagtaataaattgtcacgagatattcactacggccggccattcgatgataaagtatgtgaagtcgtttcgataaagcgaagcagacgtggttgttgccgagtgctaagagcaacaatcaaatatttttaattacaaaggagaaacatacatgaaatcaatcaaaacgattttacttggaacaactttggccgcagtttaggattattcttaggaacagacgcaaacgcagaaagcttatatacagttaaagcaggagatactttatcaacaatttctcatcaatttgcaggagacaatagcttaattcaaaaaattgcttctgataacaaattgccaaaccttgatttaatttttgaaggagaacaattagttattcgttcagaaaaagaagttgctaatactccagcaccagctgtagaagttgcaccagttcaacaagtagttgaacaacctgttgcacaaccagtacaacaagaagtacaacaacctgttgctcaagaagtagcgcaaccagcagcacctgctgcaagcagtgatgcaaaagagtggatcgcacaacgtgaatctagtggttcttacgatgcaacaaacggtcagtatatcggtcgttaccaattatctgcctcttatttaaatggtgactattcacctgccaaccaagaacgcgtggcagatcagtacgtagcaggtcgctatggttcatgggatgcagctaaatcattctggttagcaaatggttggtactaaaattaaataaacgartaatctaattacttattaaaaaccataaacaaaaaaacagtaacctgtaaagattactgttttttttgtcgatttgttaaggtacaacgcccaacgctcgtcaattggtggtctgcgttataaatttttgcttcccaaacttgaagggtctttcccgagtgatcgggcgtcgcaatcacggtaaggctaccatcatggacactacgaagatgatttacttgtaagtctatgccgacagcaaaagtgttttcaggaacgttttcgttcgcacctaaactacaggcagtttcaattaagacgccgtttaagcccccgtggacaaggccatagggttgtttatgcacgtcttttaccgttaaagtaagctgacatttctcagcagaaacctgttgaatcgtgatgcctaaatactctaaaagatgaatagtaatcagtcctttctaataaaagagagaataaaaggtttttattattatacaggaatgaagaaaattkgaaatagccakgttttttcttaaaattcaagcgamtttttcyctaaaggccgattctgkgkatawtrgaaaagatgrgattaatgaaggaggtttcctaatgagaaactggacaacaattaaagaatatgatgaaattttatttgagcaagcaggcaaagtagcaaaaattactatcaaccgcccgcatgttcacaacgcattcacaccaaaaacagtcatggaaatgattgatgcattcaacattagtcgtgataaagaagatgtcggggttattattttaacaggcgcaggtgaccaagcattctgttctggtggcgatcaaaaagttcgaggtaatggtggttacgttggcgaagacaacattccacgtttaaatgtgttagatttacaacggttaatccgtgtcattcccaaaccagtcatcgcaatggtgaaaggctggtccattggtggcggcaatgttttacaattagtttgtgatttaacaattgcggcggaaaatgctaagtttgggcaaacaggaccaaatgtcggtagctttgatggtggatacggctcaggttacttagcgcgtgttatcggccataaaaaagcaaaagaagtttggtttatgtgtaaacagtattctgctcaagaagctttagatatgggctggattaatacagttgttccattggaacaagtagaagatgtgacaatggagtgggcagaagaaatgttaaccaaaagcccgattgctttacggatgattaaagcctctttaaatgccgatacagatggcttggctggtgtgcaacaattagctggtgatgcgacacttctttactatacaatggctgaagcacaagaaggccgagatgcatttaaagaaaaacggacaccagatttcgatcaattccctaaattcccataaaccaatgacttggttaaataaacaagtacaaaaacgtcccgatcatcctgctttttattttcaggatgaatcttggacgtttttagaagtgcaacaagaagtcagccattgggtagccacatatcaacaggtgcttgcaccagaagaaaaacgtgtggctttattcagtaagaacagcaaagagttgtatttttcaattctagccttatgggaattggggaaagagttattatttttaaatacgcatttgacacttgctgaactgacttttcagttaaaagatgcgcaagttaaaacgattattggtgcgcctgaaacgcaggctttgttagaagaaatttcttttgtcgacgttcagccaatgattaaaaaacagcatagtctttcacatcaggagtttcaacagccaagtgacttagagtcggtggcttctattatgtatacatctggaactacaggacagcctaaaggggtcttgcaacggtttaaaaatcatttggccagtgctagaggcactcaagaaaatatggggattactgctgaagattgttggttgtgtgcagtcccattatttcacattagcggattgtcgattgttgttcgacaactcgtcttaggttgtagtattcgcctttacgataaatttgatgaacagcaagtgacacaagatttacaagaaggccgtggaaccgtcatttcagtggttgcgacaatgttacaacaattattgtctgtctatcctgaagctggctacagcgccagctttaaaggaatgctattaggcggcggaccgattgctccggataaattagcgcagtgtgaggaaaaagggattccagtcattcaatcttacgggatgacggaaacgtgttcgcaagttgttgccttgaaatttgaagatgcggcactgaaaatcggctctgctggacaaccgttaaaagatatgcaaatcaaaattgttgatgaactaggacaagaacagccagaaaagcaagtcggggaaattttacttaagggaccaaacgttgtttcaggttaccttaaccagcgtcaacctgaaaaatggacagcagatggttggtttaaaacaggcgacatgggctatttagatgcacaaagttacctgtatttggttagtcgtttaagtgaactcattatctctggtggtgaaaatatttaccccactgaggttgaacaggtgttacaggcgataacaggaattaaagcagcggcagttgtaggagaaccagatgcgcaatggggagccgtcccagttgcatatgtgattagtgaccaagaaatcaccttagcgcaaattcaagaccagtgttcacgaaaactggcaaaatataaacgaccgaaacgcatttatttttgtcattctttcccgcaaacagcaagtggaaagattgccaaacatcgtttcatgacagaagaaagagaggcgtttttaatcagatgaaattgcctgatgaattacgacaagcctatcagaagaatgcccgtcagttcagttgggtttttccattagaaacagaacaaacagccttggcaatttttgccgctggtgaaaaggcataccaaggagaacgttttttttggcaaacgccgaaaaaagattttgctttggttggcttcggatatgaaactatcttaaaaggcgcagaaacagaaacgcatcaattgaacaactttttaaaaaaagaggcggcaactcgttttcaaaatatgtctatttctggtacgggggcccttctgtttggcggtttgccttttgatacagaacaaacgcctactgaggcctggggagagttaggggaaggttggttttatctaccaagtattctatttactttttcaggttcacgtatttatggaacgctgaacttttcaggttctagtgaacaagaagtcgaggaacgttggtcgactttggtggctcagtttgatcgcttgttagctacctgtgaggagttgccagctgtagcggaaacaaagattgacaaggaagaagttgccgtgactgaatggctacaagctgtcaacgaaacagtagcagtcttaagagaagatggccctttaaaaaaagtggttttggctcgacaacttgctgtgagcagtcctgaaaaaattcgaagtaaccaagtgctcgttaatttaatggcacaacaacaaaatacgtatttgtttgctttagaagccaaagacacaagtttcattggtgcaacaccagaacgacttctgttgggtactaaagaaacgtttgcgaccgcttgtattgcaggaaccattaaaacgggtcaaacaccagaagaaacgaaaactttaggagcacaacttttacaagaccgcaaaaataccggagaacaccaaattgtggtggaacgtttagcgaaagagttggcgaagatgacgacttctgaaaacagtattcaagcacccattattttggaaaatcgagatgtacaacatctttatgtgccaatctcgggtcaacgtaaaccgggaatttcatttttggaaagtgtgatgcagctacacccaacgccagctttaggtggtgagcccaaagagttggcagtcgaatggattcgacaatatgagccagggagtcgtgggttatatggtgcgccaatcggttggatttcagggaatgatgatagtggcgagttcgctgtggccttgcgttcaggtgtctttgctggtcagcaaggcgttctttatgcaggttgtggtattgttgcggattcccaagcagagctagaaagagaagaaacgaaaataaaatttcaaccgatgttacgaggaattggaggtcaggtttaatgaatcatcaagaaacaatgaccgattatttaatggcctttattgaaggcttaaaaaatagtggggttgaacaagcagtcattagtccagggtcccggtccacaccactggctttattacttcatcgggaaaccgcaatccaaacttttgtcgatgtcgatgaacgttccgctgctttttttgctttaggattaagtaaagcgagtcaaaaaccagtggtcttactttgtacctctggaacagcagctgcaaactattatccagcaatttgtgaagccaatattagccatgtgcctttagtcgttttaacaacagatcggccgcatgagttacgtcaagttggtgctcctcaagccatggaccaattacaaatgtatcaaaatcacgtgaaattatttgttgaaatggctttgccagaagcaacagaagagatgttgaattacgcctattggcaaggcgctaaaggagcagcattcgcgcaacaaacgcctgcagcacctgttcatttgaattttcctttgcgggaaccattattacctgacttagagagaaaaacaaagagttctcaacaaacggctttattcgctggtcaatcaatcctttctacagaacaagtgcaacagttagcggatcaatggtaccagaaaaacggcgtcttggttgtcggtggcagtcatacagaggaagaagcgacgttatttattcaattagccgaagctttgcaatggccgttactagcggatcctttagcaaacattgtgacacatgggcaaaatagtgaagttgttattgcacacagtgatctgtttctaaatgtggcgaccttgccacaagaaccagaagtggtagtgcgttttggttcgctgccaatttctaaaaacatcatgttatggttgaaacgcttagcaacgacagagactgctttttattttgtggacgaaaatgggcaatggcaagagcaattgaaaaaatcacaaacagttattcaggcaaaggaaaccacgtttgtagaacaactactaacggttgtcaaaccaacagaagcgacttggttagcacaatggctcctgctggaaaaaacggtctctgaagttcttctagaaacgctgaacgcgacagaattaaatgaaacaacagccagcttagctgttcaccaaacaatgaaagaaaatggtcagttatttgtatctaatagtatggctatccgctacttagatcgatttatggatagtcgcccttatcggatgtttggaaatcgcggcatcaacgggattgatgggattgtttcaactgctttaggaatgagtgccatagcaccgacacagcaaaacgttctactgattggtgatttagcgctatatcatgatatgaatggtttatttttggctaaacgttatcagttgccgttaacaattgttttattaaataacaatggtggcgggattttctcttttctatctcaacgaactttacgtgaggacgatttcgagcctttatttggaacaccgcttgatttagatttttcgttagttgctgaactttacggtgcttcgtaccaagaagtcaaaacaatcgcggagctcaagcaaattttacaagcagcggctgaagaaccacaatttcaagtgatagaagtcaaaggaaatcgccaagagaatgttcatttgtacgaatcaattttagctgaaattggtagacgagtagaaagacaggggatttcatggaacggttaattcgggggatgcagtaccattatcaatggttaacaccttttgatgcaaagcgaacgacagtagtctgtttacacggtttcacaggaacgttagccacgtttgcagccgtttttcccagtcaaacaccttataacgttttaggaattgacttacctgggcatggcgcgactgctagtttggtagcgccagagcgttataccatgaaacaggtttgccatgatattgctgaactaaccgaatcgctaaatttgccttgcttttgtttattaggctattcaatgggcgctcgaacagctttaggttttgcattacattatccacaaaaggtacagcatcttttattggaaagtggatcaccaggtttggccactgccgcagaacgtcaggctcgtatctgtcaagatcatcgtttggcggaacgtcttttagaggaaccgctggtggattttattgatttttggcaagaattaccgttatttcaaacgcaaaaagccttgtctgtggcacagcaaatggccattcgtcaggaacgtttgagccaatcggcctttggattggttagtagtttgtggtatatgggcacaggagcgcaagagagttactgggaacgtctagcagaattgcagccgattcctaccgatttattggtaggcggcgaagatcaaaaatttattggaattgcgaaaaaaatgcaggcacgtcaaccgttgttgaggctgacaatttttcctgaagcaggacattgtatccatttagaacaaccaacgattttctatgaaaaggtgacagcgttattggaaggagccatctgaatgaacattcaatcaattgaaacctatcaggttcgtttgcctttaaaaacgccgtttgtcacgagctatggtcgcctggaagaaaaagcgtttgatctatttgtaataacggatgagcaaggaaatcaagggtttggcgaattagtggcttttgagcaacctgattatgtgcaagaaacgttggtaaccgaacgcttcatcatccaacagcatttaattccgttacttttaacagaagcgattgaacagccgcaagaggtttcaacaatttttgaagaagttaaagggcattggatgggaaaagctgcgttagaaactgccatctgggatttatatgccaaacggcaacagaagagtttaactgaattttttggaccaacgcggaggaaaattcctgtagggattagtttagggattcaagaagacttacctcaattacttaaacaagttcagttagctgtagaaaaagggtatcaacgagtgaagctgaaaattcgtcccggttatgatgtggaacctgttgctttgattcgtcagcattttcctaacttgcctttaatggtcgatgcaaattcagcgtatacattggcagatttgcctcaattgcaacgtttagatcactatcaattagcgatgattgaacagccttttgctgcagatgattttttagaccacgcacaattacaaagagaactgaagacaagaatttgtttggatgaaaatattcgtagtctcaaagactgccaagtggcgttagcattgggcagttgccgtagtatcaatttgaagattcctcgtgtaggtgggattcacgaggcgttgaagattgccgcattttgccaagaaaatgatttattggtttggttaggtggtatgtttgagtctggtgttggtcgcgcattgaatttgcaatttgcgtcacagcctaccttttcctttccaggtgatatttcagcaacggaacgctatttttatgaagatatcatcacggaaccttttattttagagcaagggacaatgaccgtgcctcagggacttggtattggtgttacactttcccagacgaatttgctaaaatacagtcagtatcaaaaaatcatgtaatgataacaaaattgcgcctatgactatgcagagaagcataatctaggcgcaattttttatttttctaattgactcgctgcggcttcatccaagagaaccgttaaatttggatggagttgaagaatagaggcaggatacgtttctgtgacaggtccttggagcacttgtttgaccatctgagctttttgttcaccatttacaattaggacaagatgcttaactttcatgatgctggctggccccatcgtaacaaaggtcatgcctggctgcatcatttcaggaacaaaccaaggctctgaaccagtgacggtcacttggtaggtttcatttttaaaatgagtggtagtgggcatgttcccgcaaaaatgaccatctgctcctaagccaattaacatcaaatctaagccgcctgcgtcagcaatccgttgttcttgttgttgaaagttttcaacagttaatggatggatgttttgctcggatatttccgcaggtgtcaaatacagcgtccgcaaatctgtcagagtaatgccttccttttgatgaggaacggggatttcatcaaagttataataatgaacattatcaaagtcagatgaatttttcacaatcgaggctaatttttggtaaacaagtgctggtgttttgccagcggtaattgataaattcactcgtttatcttggctcatcgtgcttagaagtaacatttttgcccattcgctcatcgtgtcgaaatcttgtttaattaaaattttcatacttgctcactccattctttgaataagctaagtataatttgtgggaaccatcccatgtcaagctcttcacaaaaaggatttaattaacggtaggcaaaagaaagaggagcagccgtcaaaacggcgactgcccctctttttaaaacttaagataacctacaacgagttaactttttagctttctgttccacttgctccaacgctggtctaaacgttcttttgaccaacactgtttaacaaagaattttattttattgttctttcaaccatttttctagttgtaaacgttgcactttcatagtagctgtgtgagggatttcatcaaaagccataatgataggttcgtttaaatgtggtaaatcggctacttgtgtccaccaagcgtcccaatccatttcttccccagggacaaccgctaaaattggctgaggttcattttctttgccacggacaataatcacttcttctaagaaatctaatgcatccaataaatgatcttcaatagctaaattactgtcgatgttttcaattagatctacttggcgatctttcaagaataagtggccgcgttcatctaacattccgtaatcgccgctgtcccaccattcgccatagacattttctgcaaagcgggcatcttctttgtaatatgttaaggcccgtccttttgataagaattggatatggccgtccgtcatcgcaggtaaaacttgtcctttttcatcggtaattcgagcttgtgttaaatcctctaaaccaacgcccatgtcacgagcatctgaatcttttagggattctaaagtatgcgctcgtaagatcattggcccgcattcactttgtccataaacttgtaggaaaattggttcattggcagcagatgcttttaagaaagccaccattgtagcgttgttaattgcatcaaaagtagaatgataataatggacactagcgaaagcttcaggtttttctttggccaaacgaacccattgaacgaagttattggggtgtgtttctacagcgattggttgataggtgctgaacatttcagcgactttttcgctcgaagcatttgctaaaggcatcatagggaagcccatggccattaaagaagacacgccaatgttaaaacgagaatgaactggcgaaatatgaaagccaactaatttcttttcagcaatttttgtaaaaatggttttttgccattttgtacgccaacccatagagtgattggaatgacagataagtttaggaatacctgttgttccagaggtgtgggtcatgtaggcaatttcgtctttagtcagttcgtcttgaggaacttccgtggcatcagcttctaaaagagaagcaaccgaaagttttttattggcagagctattacgaacagcttgaactttttcagcagtcacatcatcaaataaaatataaggatcttctaaacgatcaacgaatacttcaattgtttcaaaaggtaaatggtatgaaaccattacaggaacggctgctagatatgaggctgcaacagctagtaaatacgtgtcgaatttaggacttttataaataataattttgtcgcctttttttacacctaaagtggctaattgatatgcccgtttcaaaatttcttgatggctttcaccataagttgtttctaagccaagtgcaggaaaagcaggcaaagattcatcaaaaataattggaacagttggtgttttttctgcggcttcttgatagtttgtatagaggtttaatggttgataatcaagtaagtgtgtcaagggaaagtctcctttgtaanatagtttgtgtacgaatgtacaagttcactttatcctatcatagaatgggtctttttctacgtcanaaat

SEQ ID NO: 49 - DNA, 11307 bp; double-stranded, linear
tccaatataaagacacaacagacaaacgatgaggagtgtgaawtaatatgttaacaattattattgggtttatcttttggacaatgacactaatgttaggttatctaattggtgaaagagaaggccgtaaacatgagtaatttaacaaaacgtaaaaaagatttatttgaaatgaaaagcgttgtatttaaagatatttcaaagcaacaaagcgaaaaagcacaaaaaagaaaacgactcttacaactaatgaatcaatatcccgattgggcaagtcaaaaaaataaacttattatgcaggaaattcaagaattaggacaagcaatcggtaattggtcgatggatcaatcaagacccatccaatccatcaaggccgcatcgtttacaaaaagcgagtatctctatttaatttggctcggttattcagatgaagcgattcgtcacggcttagacatgtcgaaagagtgttattttatttatcgattaacacttttaaatgaataaaagtaaaggagattaaccaatgcgtacgtcaacatttaattatatcaaagatattttagcagacttttataaaacagaagagtatatccgtcaacgggaagaagaattacggcacccttatcaagaagcagatttaaatgctggtattagaggacaaggacttcactctgtagtgaccgaacgaatggcgattacgatagctatggatcgtcgtctgtggaacttagagagaaatcgagacattatcaaaaattgtttagccgaagcggatgaacaaacgcgcgtgattattgaagaactatatatgaaaaaacggccctctttaacattaattggacttgcccagcaattatttattagtaaaagccaagcctataaattaagaaatcatttctttgaagcggtggcggatgaactagggatgtaaacatggaaaaagcgtggaattttttcaggtgtcaacatggtaaattaatagtgtcgaaagagatagataaacgtgaggcaaccaaaaaaatgaagacacggaattctatgattttgactgctttcttgtgtcagctatgaaggagcagaaaatgccggctactttcaagatccttcattttgactagaagagagccaatttgttaaccaatcctgaattttttgaatggaaaggtggcgctaaaaatgaatgaagcggaacaagagttatatgaagcccttgttgcaatctgccagacgtcaggatttttgttgctagaggaactgccgacagatttaccagatcagccatttgtttacttaggtgatagtaaagaattacctaagccaactaaatcagctattttgggagagattgaattaataatgcatgtttatggtgcgttatctgaacgacaacaaatttctacaattaaaggaacgattttacggcaggcaaccagtaacttaaaacgaacggctcattttaattggggtatcaaacatcaagaagtcaaagcacaaatggtaaaagataccaaacaaatgaaaaaaacaatttggcatgctgtactaccattacacatgcaattttactaggaggaattatcaatgggagaagttatgcaaggaaaagaccgtattttattagttcgtcgcttggatgaagcagcgacaaagaaagcaatgaaacccttatttcaaattgaacatgaatgggaattctcacgtgaatcgagcggtacgcaaacaaaagatggcgtcgcgaatgctgtttctggtttagaagttacgttatcgttaagcggtttagcctctcgagatgatgaaaatttatacatgaaagacgcagcgaagatggcatcttaatggaattttgggatgttgatttaaaaggtgaaaaaaatgcggaaggtaaatatccagcaatttatgcccaaggttatgtaaattcatggagtttaccagccaatgtagaagaattagtagaaatcgaaacagaagcctctattaatggcaagccacaagatggctttgcaacagtagaagcagatattattgcagaagcacaatatgcgttccaagataccgttccagataaagcaccacaacctggcgaataatcaaaaagtgttgaattttaggaggataaaaaatgaatttagagattaacggaaaaacaattgaagtgaaatttacgattggcgcgattcgcgaattagataaacgttaccaaattgaaaatggcgctgccaaattcggcatgggcatcagttcagcaatgatttatttacgccaatacaatccagtaatcttagttgacatcatggaagctttacaaagtgggcaattaaaaataggtaagtcggaaattgaagcatggttaatgacccaagatgtcaaaaaactttcagatgatttgcttaaagaaatgggaaagcaacctcttacaaaaccaatgatcgatcagttcagcaaagaagcgaagaaagcagaagcgcaassgaccaactaattaaaacgagcgatgacgtgtatcacgacatcgctctttctgcttttcgctacttaggctgtcgttcatttgaagaagtggatcagatgaccatgtctgaatttgaattacgaatgattgcttttaatttagcagaagtagatgaagagcggaaaaggcacgagcttgcctacttaaatgttaaagcgcaagcgacaaacaaaaaaggaaaacccgtttttgaaagctttaaaagtttttatgattatgaaaaacgagttgctgaagttctggcagctaaccagccacaacgaacaaaattaaatgagcggaaaaaaacgcaacttgccactgtggcagagcgtctacgccgctatcgagaagggaggagagtagatggagaatgacaaagaaaaaacgccgttatcggaggcaaagaaaagccttgcaggcgtccaacaagcattaaaaagtatgagcggtgagtatgccttattaagtggatatttagggaaaattagtgcgggtgtcaatcagtcagccacggtcatgaacacatttaaaaccgtcatgcaacaatctggagaaacagtgaaaaaaacaggagacgaaacagcaaaggcagcagatcaaatgaacacagcgttaacagattctgctgaacaagccggtgaagcagctaaaaaagcggggaaagaaacctctgatggctttactaatgcacaaaataatatgctgagctttgggacggccatgactagtgccgtttccttacctatgctgaacgttttaaaaacagctatgggcgtcggtgctggggtcagtggcgaatttcaaggaatgcaaggactgattatggccagtgcaggagggatttctgattcattgcaaggcgagttgcaaggggcattgactcagatgaatcaatcatttgaagcggcggcacaagtgattcaaagcgtgatggctccaggaatggaaattttggttcaagtggttattacagtcgtcaaaggcattacagctttggttaatttatttatcaaattaccaaaacccgtccaagtttttattgttgccattatgggcattttagccgccattgggcccatgttgattatggtaacgatggctcagctaaaatttcaacagtttagtgctggtttggctcttgtacaaggaaacattgggaagttaggtggtggcttatcaaaactaagtgctagttttagtgccttaggtggaggaccattaattttaattgtagcagccgttttagcagcggtagcagcgtttatttatttctataaaaccaatgaaacatttagaaatagtatcaatagcttagctagtgccattcmaggagctgtttcagcggcgtttggcaaattggtaggattgctacaacagatccagccggcctttcagcaagtaatggcagtttttaaacaattttttgcagtaggcttagagaaaatggcgactattttttcaacaattggtcgtgtgctagcaggcgtttttgccagcggtttgcaattaggtagtaacttattagggcaatttggtggcacctttgacaaagctggtttagcggttggtcttttggtaaaagttctgacaaaggttgcactggctgcattaggaattctgggccgtttggtctaattatttccttgattgtttcattcgtgacggcctggatgaaaaccggtgatttgagtgcgggtggtattacccaagtctttgataatttaggtaacacgattacatcggttacaacaatgctggcaactaatctaccgaaagttatacaactttttacaacagtcttaaccagtattctcgggaaaataacagaagctattccaagcatcgtaaccgcgttatctagtttaattacgttaattgttggtgcgatcgttgccaatttgccagtcttaattgaagcggcaacacaaattattactacgttgattcaggggattacaacagtcttaccaatgttgatagaagttggtttgagcttattaatgactttagttaatgcgattgtcaccgccttgccaacaattacaactgcagcgattaatatcatcactacattagtgacagcttttgtcacagcgttaccaatgctagttacagcaggtgtttcaattatcacggccttagtcaatgcatttgttactatgttaccgttgattttgactgctggtttacaaattttgatggcattaatcactgggattatgacgattttacctcagttaattcaatcagcgctgacgattattctagcgttagtgacagcgttgataggtgccttaccacagattatcagcgcaggtgtcaaattgttaatggcgttaattcaaggaattatttcgattttaccaaccttagttgcggcagctattaccttaattttgacattggtaaatgccttaattggtgccttgccacaaatcatcagcgcaggcgtcaaattgctaatggctttgatccaagggattatttcaattttaccgcaactggttactgcagcaattacgctaattaccgctttaatgggtgcgttaatcaatgcgttgccacagttgttaagtgctgggattcaactgattcaagccttaattaatggtgtactcagtctattgggtgccttgctgtccgcagcaggaacattaatctcacaaatgatcacgaagattggttcttattttggtcaactgttagcttcgggcggacagttagttgaaaatatcaaaaatggggttaccaatgcagccaatcaggtaaaaaatgccattggttctgtaattgaaggtgcttggcaagcaatccaaggttggttttcaaaattcaccgatgccggtgcgaatattgtcggcatgattgctgatggaattacaggcgcaattggaaaagccaaagaagcaatcgatggagttgtcagtaaaattcgtaactttttaccattttcaccagcaaaagaaggtcccttatctgatttgcataaattgaatttcggcggcacgattgccacggggatttatgcaggcgaaacagccgttagtagagcaatggcttctattttagatttaccgctgttaaatgattttgccttggacttagctggtcgaggaaacttcacggcaacgattgaccatcgtttagaaaatgatgcatacaatcgaccattatttgtgacagtagagtcaacgttagatggaaaagttgtcgcagcaactacggcgccttatttagcaacagagttacaacgacaacaagtgaaacaaaataaccgcttaggaaggagaggataacatgtataaatttgttgataccaatcaagcaactcattcaacgcctcttccttcagaagcgttgaattttaacggccaatttttagaaaaagtcatccctggctatcaaacattatcagtttcaggacgagaattagttccaagcgaaattgaaagctatcaattagggattcgtgatggtaaacgtcacgtttatgcgcgaattccagaacgagaattaacagtcaaatatcgcctttcagctgtgaataatgaagcatttcgagatgcatttaatcatttaaacgttgctttgtttacggaaaaagacgtttctatttggtttaacgatgaaccggaaatgctgtggtttggcagtaagtcttcagtgagtgatgtacccgaagtgttaaccaagtaacaggcacctttactttattgctttctgatccgtataaatacacacggagkatggcgactagtgtgatgtggggttcgccaaccattacatttcaagcgaattacttaatggggaatacaggctcaggtgcatttgattttccaattttaattgaaggcggggcttattggggatcaaccatgattacctttcaaaatcgggcttacacgatgggggatttaggcaaagaagttcggccaattgaaatttatcctacggttgaaggattaaaagtcaaaccgaccattattttaacaggaaccggacgtggtgtttggattaaaacacggaacgatacaattaacttaggagactttgatcgttcggaaattattatcgatactgaaaatttttatctgacaaaaaatggtgcaccgatgattcgaccaatgaacgatttttatctatatcccaatgaaccgctgtatattcaagccaaagatagcgacttccgcttgacgattcgctatcctaaccgatttgtgtaggagggtgattaaatgttaatggcgctggatttgaaaagaacatatacggcaatcttggataatgcctatcaagtcagttatgaaaaaatagagaacaaaattggcagtttagattttaccatgccactagatgatcctaaaaatgaatttattgcagaaatgcaatgggtggaactgaccgacaatgagaatgaatatattggtttatatcgcgtgatgccaaccacaattaagaaagatgcgaacaataatcaaattcattactctgccacagaagcattatgtaccttaggtgatactgtcctttttggttgtcacgaaattaaaaacaaaacaacgaaagaggccattcaatttttattgaataaacaaaaaacaaagcattgggtcctaaaaaaatgtgatttttcaaggaaattaacctataaatgggaaaatgaaaatgggttagttgagcctttatttagcatcccagccgatttcgaagaggaatatctttggcaatggaatacagaggtctatccttttgaactttcattagtcaaaccgccaacagaaccagttgcgcgaattcaagaaggttacaacatgcaaggatttgaaatagaacgtaatcccaagatgctaatcaatcggatttatccattaggttcaggcgaaggtgttaacaaagtcaatattcgctcggtcaatcaaggggttccgtatttagagaacaaggccgcaattgaccgctatggtttattggagtcaatttgggtggaacagcgtttttctgatcccaaggcattaaaggaaaatgctttgcgaatgttagaagaatggaccaagccacaagtttcttgggtagtgactgcagctgatttaattaaattaacagatcaacctttggcaatcgatcgtttgcggttgggcacggttatcatgattaatacgaatgaatttgggagtgtcaaccttcgtattaaaaaagaaagcaaaaaagatgtctttggtgccccccaagacattcagctagagttgggaaacctgcaagaaacaattcatagtaccatgacagctttcagtcggaaacaagagattaacgaaacttacgcacaaggggcgacgacacttttaaatcgttcaatacaaggagaacttagcaagacacagccagtggagctgaatttatactttgacgaggacattctttatataaacaccgcagaattaacgttcaaggcaactgctaaaggaccttcgcattctgtaacgaacattgatttggtagtggatggcaaaaaattaccccaactatcattgcaacaacaacggctaaacattttgagttatttacgaaaaacaacagatgaaaaaatcgaacgcggcaatcacacgcttcaatttttctctcatcagccactatggttggatgcttcggtcatctgtcgtgtgtatattcaatcccaattgggtggccagttttaataaaataatgaaaactagaggagtgtgacgaaatgtcagtagaacatattgaagaattagataccctgaatcaaggtcgccttaaaatcaatgcaatcttggatcagtcgaatgcatcagctgagaaagtagatgcttaccaagtccagttaacgaatggaatttctgaagcgaaaaacatagcagatgaagctggcaaagaagccgtacaaattgccaccgatgcaggcaatcaagcmaatgaaacagccaaccaagcgatgaacaatgccaaaacagcaatcatgattgcaggaaatgcagtttcaacggcaaataataataaacaagaatttgatactttacgaaatgatttcgatcaattagtagcagaagcgggtgatagtaatccagaaattgtccaagcacgtacagatacacaaggcatcaaacaagctaccttagcgaatcgtcttcaaattgatttgaatgaccgtatgacaaaagcagacggtatttctttattggctaagccaactactgtcaaaatgaagttagactttaacggtaaaacggccggcaatacagccaccaatgcaaacagttattccactgattttacggcaaaaattcttaagaagccaacagaagtttgggaggaagtttcccaagcggactacaataaaatggccagccgtgatgatgagggcgtgaaaacaggttccacccaaagcggtgtgattccgcaacaattagcggccttcaatctcgttgaagccgctaaaaaattaattccacaaatgtttgaaacagtcacaactgacgaggcggtggcatttattcgccagaacgttcaattttttacgattaatcaacgtgtgaaagccgctgcgcccaataatcaaacgattaaaatcgctacgtatttaccaactacggataattgggtaactcaaatccaagaatcagcaaaagagtttggcgatttttcaattcaaatcaatgatcagaattttatcacagatgaaggtttcatttatttaatgagctatacagattcatcgaatggggtaacgccagctagcttagaagttgattacgtggggcttcatattggtctgtctgttgatgcccaagcggttttagcgaagagtggttttgttcaagcagagcaactcaatacccatatggaaaatcaagataacccgcaccaagtaaccgctgaacaagtggggctaggcaatgtagaaaattatggnttcgcatcagacagcgaagcagtcgcgggaactttaacgagtaaatatatgcacccgaaaaacgttgcggaagcgattaaaggtcaagctgtgacacaaacaggtgatcaagagattgctggggtgaagaattttgtaactatgccaaccgtcaatggtgtgcctttggaatcctctagaatggccatttatgaagctantggagttggtgaagycgaggcaaaatatcaggcggcctttaataaggataatatgaaatttgtattaattagggtaggaaatcgtgtcgatgcatttgtaagatgtaatttgagtgatccaacgaaattgaataataatttggttaaagtgtttactgttccaacaggatatacattatcgacgaagattacaaagggaatatggaatytggcgttaactgctatgcaatatacattccctcaaccgaattgtgctggtttatatgagatgggaaatcaaggaattctttttggtgctaaccgtgctggaaatatttacctacaaggaagttggtacacggacgatccgtttccaacaaaataacaagctagtttaggagtctttttatggaacgttatctcaacacaataacaatgcttttaagcattttcggtgggattgtcgtacgtttattaggcggattagatcaattgttggatgtcttcctctttttaattattgtcgatttcatcacaggttggattaaggcaatcgccacaaaagaattgtccagtcggattggtatgctcggaattgcgaaaaaagtgacgatgttatttgtggttgccgtagcggttcgtgttgaaaaagttgtggggaacaatttgccaattcgggaaatggttctgattttttacattgcgaacgaaggactttctttttttgaaaacattgcgacctttattcctatgccgaaaaagttaaaagagttatttattcagttaaaaaataaagatgattaagtagaagtggtcgggacaaacgtagaactttcgctgattgccgaagaaattacttctgtcccgccatttatctgcaggtttaagccgtggaagggaagttattttgactttcctttcatggcttttttaagaaaggagcatgctatgtttaaaaaattaatgattcaacttgctttagtgattggtttaagtttaacgattccgatgacggcttrcgcttacaccatcgaagcggatccaatcaactttacttattttcccggctctgcaagcaatgaattaattgttttacatgaatctggaaacgagcggaacctaggaccacacagtttagacaatgaagtggcctatatgaaacgaaattggtcaaatgcttatgtctcatattttgtcggatctggtggacgagtgaaacaattagctcctgctggccaaattcaatatggcgcaggttctttagctaatcaaaaagcctatgcgcaaatcgaattggctcgaacgaataatgcggcgacatttaaaaaagattatgctgcctatgttaatttggcccgtgatttggctcagaacattggtgctgatttttctctggacgatggaacaggttatggcatagtcactcatgattggattacaaaaaattggtggggagatcatacagatccttatggttatttagcgcgtgggggattagtaaagcgcattggcacmagatttacaacgggcgtttcygraacaggtgagactggtcattattcagccaggtaaacctaatgcgccaaaatatcaagtaggacaagcaattcgtttcacttcaatctatccaacaccagatgctttaatcaatgaacatctatnagcagaggcactttggacacaagtaggaacaattacag

SEQ ID NO: 50 - DNA, 2866 bp; double-stranded, linear
aaagcacaaatgcaacaagttgtgatagctattcaaaatacggaagcctttcagttattgaatgtaatgaaggttataggagatgagtaaacatgtatgaaggtttgttaaaacagtatcaagcgtatttgcccgtaacagaaaaaacaccaatgatttctttagccgaaggaaatacgccactgattcctttacctaatttatccaaagaattaggtattcaattatatggaaaatacgaaggcttaaatcccactggctcattcaaagatcgcgggatggtgatggctgtagcaaaagcggtagaagaaggtgccaaagcgattgtttgtgcttctacaggaaatactagtgccgccgctgctgcgtatgccacaagagcaggcattaaagcgtatgtagtgattccagaagggaaaatcgcactgggaaaattggcgcaagctattatgtatggggcggacattatttcgattccaggtaactttgatgaagcattaaaagcggtgcgagagattgcgaaaactgaggcagttgcgctagttaattcagtgaatccttatcgcttagaagggcaaaaaacagcagcttttgaagtttgtgaacaattaggtcaagcgcccgatgtcttagcgattccagttggaaatgccggcaatatttccgcttactggaaaggctttaaagaatggcatgaaaaacaaggaacaactttaccaagaatgcatggttttgaagcagaaggtgccgcagcgatcgtgaaaggccaagtgattgagcaacctgaaaccgtggcaacagcgatccggattgggaatcctgctagttggcaattagcagaacaggcacgggatgaatccggtggtttcattgatgccgtgacagatcaagaaattttaacggcttaccgaaaaattgctgctcaagatggggttttcattgaacctggttcggctgcttcattagctggagttattcaacatgttaaaagcggtaaaatcaaagcaggtgaaaccgtcgtggcagtctttactggtaacggactgaaagatcctgatacagcaatggagacagaagtagctatttcaaaaatgagtgacgtggaagaaatgcgtctgcacttacgaaaaggagtcgcaacactatgaaaataagagtacctgccactagtgccaacttaggacctggctttgattcatgtggcattgcattatccgcttatttaacaatcaacgttttaggtgaaagtgaattttgggaaattcaacatactctgggagaagagatttctactaatgaagagaatttattaattcaaacggcattgaaaattgcaccagaattaacaccaaaagttattcggatggtttctgacattccccttgcaagaggactaggcagtagctcaagtgtgattgtagcaggcattgaattagctaaccgactagcacatttaaatttgtcccctaaagaaaaagtccgtttggccacagagatggaaggacatccggataatgtggccccagctattttaggagatttcgtggtggctagccatgtagaaaaccaagtctaccatgtcaaacatcactttccaatgtgtgatgtcattgcatttattccagaggaaccattatttaccgaaaaaagtcgcgctgttttgcccgaaaaattggcttataaagaagcggtcgcggccagctcaattgccaatgttatgattgccgcaattttaaacggggatttacctttagcaggcaaaatgatggaacaagataaatggcatgaaacgtatcgtcgttcattggttcctcacttaaaagaaattcgtcgtttaactcagcaaaaaggtgcttatggctctttcttaagcggtgctggtccaactgtgctaatcttgtcgccagaagaacgaaccaacgaaattgttcaaagcttggagaaattatctaccaaagcgagcatccaaattttcaatattgatcaagaaggtgttcaagtcttttaaaaaaaacgagaaaaaatcactagtgattttttctcgttttttttaatcctcggatgtttccgtggaataataactatgatcttctaagttcaaagcattaagaatcattgaggcagtttcttcaattgaaagagaagcgacatcaataacgatacaacctaatttttgataaagatcattagcaaaagccagttctcgccgaattttttcaatatctgaataagaagtattttcaggcaatccatatgcgcgcattcgttctttacgaatcccgtttaaaacattgggatcattggttaagccaacaatttttttagggtccatttcgaataattgtttcggtaaatgtgcttcaggaattagtggcaaattagcaacttttaagttcttgttggctaaaaagagacttagcggtgttttagaagttcgggaaacgccaagaagtaacacatccgcttctaaaaagcctcgtgggtccttgccatcgtcatatttgacagcaaattccattgcttcaattcgtttaaaataattttcattcagatgatgtaaggcacctggttcccgcatgggcgcgacacctgttaatcgttcgatttccgcaactggtggtgtcaaaatgtcaaaatggaacaattgatgctcattgaaaaattgattagcaatcgccacgagatgatcattaatgatmstatgcagtaccatggcctctgcttttttggcatcttctaacgcttgcaccagtttatcttcgtctttaacgaatgttcgtctaatcaaagtaaaatcaacagtggggtactgggccattgaagcagccgccaattttgaagcggtctcgccagcagaatctgagat

SEQ ID NO: 51 - DNA, 1663 bp; double-stranded, linear
gatttnaaannaattaattgaaaatacccgctgscatgacacgggaagggattacgaaagaaattccaatggacgaaattgttccaggagacattgtaactttagctacaggagacatgattcctgcagatgccgtgttgatttggaccaaagatttattcgttaatcaatcgtcgctaacaggcgaatccatgccyswcgaaaaatttgtggatgcaggtgtggatcgtcaacaaacagaggtttctgcattagatatgcaagacctagtgtttatgggcacagatgtcttgagtggacaaggaaaagcgattattttaaaaactgggcaacatacattttttggtgatattgctaaaaatgctacaacacaacgaggaaaaactagttttgacttaggcttagcaaaagtcagtaagtttttattacgaatggtaatgattttgtttccaatcgttttcttgattaatggtttaactaaaggtgcttggggcgaagcgtttttcttcgcgattgccgttgcagttggtttgacaccagaaatgttgccaatgattgttacgagtaacttagccaagggtgcattatccttatcgaaacataaagtcattgttaaagaattagcggctatccaaaatttaggtggtatggatgtgctctgtacagataagactggaacgattaccgaagatcgtgtagttttggttcaacatttgaatccattaggtgatttgagtgacgaggttctaaatttagcctacttaaattcttcttatcaaacaggttggaaaaatttaatggatattgccgttattaatttttatgaagagcatcaatggaaaacgccgtttaaaaatgtcactaaaattgatgaaattccttttgatttttctagacgccgcttaacggttgtcgtgaatgcagatgatcatcaattgatgattacgaaaggcgccgtggaagaaatggaagaagtgtgcacgcatgcgcaaattaatggcgaaattgtaccattaagcactgctgtacgagaagaactacgccgagtgaatgttcaaatgaacaaacaagggatgcgtgtgttagcggtagctgtaaaaaaagatgtccataaagaagcagtttattcagttgaagatgaaaaagagatgacattgattgggtttatgggttttcttgatccagcaaaagagtcagccgtcagcgctatccgctccttacatgaacatggtgtcaacgtgaaagtgctaacgggcgataatgacattgtcgccaaaaaagtctgtaaagatgtaggcattgaagtttcccatgtgttattaggttctcaaattgaagcaatgacasntgaagagttgcgggcgcaagtagaagaaactaatttatttgccaaattaaatccgatgcaaaatctaaaattattgaattgctacaagcaaaaggtcatacggttggttttatgggggatggcattaatgatgcaccggcattacgaaaagctgatgtgggcatttcagtagatactgcagctgatattactaaagatgctagctcgattattttactggaaaaaagtttaaatgtactggaatctggtgtgattgaaggacgaaaagtatttagcaatatgatgaaatatattaaaattaccatcagttctaat

SEQ ID NO: 52 - DNA, 5663 bp; double-stranded, linear
cttaatggngatggnaaggggatattattggttattttttgagnatatatgatatcctttattatgtaggaatcntattatatggsaggmacgagcgatgaaagttattgttttaggatcatcacatggaggttatgaagcggtagaggaattactaaatcttcatcctgatgcagaaattcaatggtatgagaaaggtgattttatctcattcttgtcttgtggcatgcagttgtacctagaaggaaaagtgaaagatgttaattctgttcgctatatgactggcgaaaaaatggagagccgtggtgtaaatgtcttttctaatactgaaattacagcgattcaaccaaaagaacatcaagtgacagtgaaagatttagtgtcaggtgaagaacgtgttgaaaattatgataaattaatcatcagtcccggagctgtcccatttgaattagatattccaggtaaagatttggataatatttacttgatgcgtggtcgtcaatgggccattaaattaaaacaaaaaacagtagatccagaagtcaataatgtggttgtgattggtagtggttatattgggattgaagctgccgaagcatttgcaaaagccggcaaaaaggttactgttattgacattttagatcgtccattaggggtatatctagataaagaatttacagatgttttaacagaagagatggaagctaataatattaccattgcaactggtgaaacagttgaacgttacgaaggcgacggtcgtgtgcaaaaaatcgttacagataaaaatgcgtacgatgctgatttggtcgttgtagcggttggtgtccgtccaaacactgcttggttaaaaggtaccttggaattacatccgaatggcctaatcaagacggatgaatacatgcggacaagtgagccggatgtatttgcagtaggggatgctacgttaattaaatacaatcctgcagacacagaagtaaatattgccttagcaacgaatgctcgtaaacaaggtcgctttgctgtgaaaaacctagaggaaccagttaaacctttccctggtgttcaaggatcttctggcttggccgtctttgattataaatttgcttcaacagggattaacgaagtcatggctcaaaaattaggaaaagaaacaaaagcggtgacagtagtagaagactacttgatggactttaatccagacaaacaaaaagcttggtttaaattagtgtatgatcctgaaacaacacaaattttaggcgctcaattaatgtcgaaagcagatttaactgcaaacattaatgctatttcattagcgattcaagccaaaatgacgattgaagacttagcctatgcggacttcttcttccaaccagcgtttgacaaaccttggaatattattaatacagcggctttagaagcggtgaaacaagaacgttaatagaagagamaataaaacccatgagtatttatagtactcgtgggttttatttttattttgtattcaattgatttttcaactcttgttggacacgagttaattcttgttcatccacacgttgataggaaacaccatcttgcataaaaccagtaccttgaagttggtcttgtttcactttaccaaaggcactgcgataatctaaggcaatttttttcatgtcatcaaaacttaaatctgtcttcatattatcagaaacagctgttaaaatttcttgatagttgcttacgctgttaagacttaagactttttggacgatgccttcaatcacttttctttgacgttcttggcggccgtagtcaccattagggtcttcgtaacgcattcttgaataggagagtgcttgttcaccatccaatgaaattttaccaatcgtaaaatcatatccgtcttgagaaaaagtcagattattgttcacttcgattccgccaaccgcgttgactaattcttttaaaccagccatattaattgaaacataatgattaataggtatgtttaaatagttttcaactgtgtccattgctaaagatgcgccaccaaaagcataggcgtgattcaatttatcttgttttccttgacctggaatatcaacataggtatcgcgagcaagactgactaaggttgtttgcttgtcacgaggattaactgttgcaacaattgttgtatccgaacgaccttgctcgacacgcccatcatcgcctgtatcaatccctaataataaaacagaaaaaggctccttattgtttaaattgacctgactttttttagatcgttctactgtttcataggttttatccattgatttagaaacatcccaataaagttttgctcccattccaacaactgcaagaaatagamccaagataattccaargataatggcaaaaattttcttcccttttgacatattttycctccaataatttatcacaggttgtgatttttttcttataggttaatcttactaatttttagtgaagaagtatataataattgttgaaagactataaaactttaaggtattttgcattatttttgcttaatcttttgaaatatctcaattctattaaaatatgcgaattagtatattacacgtttccaatgtgtttcattgttgattaattagaattttagtggtatttttgtatttgtaattagtacagattttaattggaggtataacagtgagtaaaaaaggatcagatatcatagtagaaagtttaatcaatcacgaagtgccctatatttttgggattcccggtgcaaaaattgatggggtttttgatgcattagttgacaaggtccagaattaattttagctcgacatgamcaaaacgctgcctttatggcacnagggattggtcgtttgacgggagagcctggcttagttattgcaactagtggacctggtgccagcaatttagcaactgggttagtaactgcgactgcagaaggggaccctgttttagcattggctggacaggtgaaacggtccgatttgtcaaaattaactcaccaaagcatgaataatgctgcattatttagtccaataacaaaattcagtacagaaattcaagatccagaaacattatctgaaaatattgccaatgcttaccgtatcgccaaaacagcgaaaaaaggcgcaacattcttatcgatcccacaagatgtcacagatagtccggtgacaggcgaagcaattaagcctttgtcggctccgaaactgggccatgcatcagcaggaacaatcgcagctttagctgaacgaatcaagcaagcgaaattacctgttttacttttaggaatgcgggcctctgcacgaaaagttaccgcagccattcgtgaattggttgctataactggtttgccagtcgtggaaacgttccaaggagcaggcattatttcaaaagaattagaagaacatttctttgggcgtgttggtttatttcgaaaccaacctggggaccgtttgttaaaaagaagtgatttagtgattgcgattggttatgacccaattgaatatgaggcacgtaattggaacgcagaaaaagatgcgcgcgttattgttattgatgaagttcaaatggaaattgatcaatatatgcaaccggaagaagagctaattggtgatatgtctaaaaatattttgaaattatcagaagcatttagtgaaccaatattaacagaagatgcgcaagattatttagaaacgcttcaagaaaaattaacgattaaagaagtaaaaacaagtacaattgaaaatcgattacatccattagaaattgttcaaacgcttcaagaaaaaaccacgaatgaaatgacagttactgttgacgtagggagtcactacatttggatggctcgccactttagaagttatgaaccgcgtcatttattatttagtaacggcatgcaaacattaggtgtcgctttgccttgggcaatctcagctgcactagttcgtccaaatacacaaattatctctgtttctggggacggcggtttcctattttcggcgcaagaattagaaacagcggttcgtttaaagcaaaatatcgtgcatattatttggaatgatggtagttatgatatggttaaattccaagaagaaatgaaatataatcgatcctctggcgtagattttggtccagttgattttgtgaagtatgctgaagcttttggagccaaaggggttcgagttcattcacaagcagaatttgccgcagctttagaagaaggaatgcaaacagaaggcccagtgattattgatgttcctgtggattattcagataatcmagaattaggtaaaacattgttaccagatcaactttattaggagatggaaaaatgagcgaacaatatgtttatcaacatggtacgctaggcggtttaatggaaagtttgatggcaggaacggcagaaattggtacgttactcacgcaaggtgattttggaattgggacattagaaggctcaaatggcgaaattattttattggacggtacattgtatcatgcaaatcaaactggcgaaattactattctagaaggcgaagaattaacgccatatgccgcagttactcgttttcaagaagatggcgcattccctgtatcaacggaaaccgatgaaaatattaaagcacaaattttagaaaaaattagtcctaatttttttgcggcaattaaaattagcggtctttttgcgaagatgcatgtccgtgtggcacctaaacaagaaaaaccgtatccaccatttgtagaagcagcacgcaatcaacctgaatttacagcggagaatattcagggaacagttgtagggttctttacacctaaattatttcatggtgcctctgccgcagggtttcatttgcactttatcagtgaggatcaccaatttggtgggcacattcttgattttggcattaaacaagggactgtttcgtggatggaaacagcagaattgcgacagcattttccagttcatgatgctgattatcggaataaagaaattgatattgcaaaagctttgtccgcaattgaagaagcggaataactgaataacaaggcacatttctccacgsccattcaagttgactaactaggtcaacttgaatgggcttattgctgttcgtcgctttttgttgttatttttcaaaaaaaaatagtatcctttttataataagcaaataacaattggaaaggatggcgtaatggacacactttatagaagttggcaattgtctggttggctctatcatgatatttttgttatcattgtagcaattatttttatagtaattagtggtattttggttatttccttaataagaaggcggagtacaaggagactggttccctatgcgttaattttattggtttatcttgcagtggtacattttgctggtttaatctttttcggaatgtttcgttcagtaacgattgaagagaaaagtgcgacgttttattctgaaaaaacaaaaggcttaacttcaatcgagcgaatgattattccaaatggacgaacgaatggcattagcaccagtaactcattgttcccaagtggatttcngttaatagtcagacgggccgaacgaatgtggnagtaaacgtttaagttggccgtgattaatttaatggnccaacagatccatagggggttttganaa

SEQ ID NO: 53 - DNA, 1799 bp; double-stranded, linear
aaacagcatagacagcaattgagttatggccmcggtttgaagcwtwaaggraacggccatcagargaaatacgratcgsagcmccmccmttaaacscatcataatcagcaggtaaagtagaaactttttgtaattcagtgaaagaaccatctgttycatcatatgaaagaactgaaacagtgctatctaattcaccaaataaataagccaatgattttgttgggtggaacactaaatgacgtggaccagtccctggctcagtcacgaattgagcgatttcagaaagctttccatctaagctaacattatacgtatacacacgatcggttcctagatcacagacgactaagcgttgatcaggcgtcaaatctgtgtaatgaacatgggcattgttttggttttcatgaggaccagttggctctgtatgaatcactttgtcagcatcttccaaagaaccatcttctaagatacgatacacgtgaacgataccttggtgataatttgctgcatagacaagttgtcggttytcgtcaacagctacataacatggcggcgcaccttcctcagttactttattcaataagttaaaatggtccatttctggttgataagcggcagtgccaccttcaccgtcaacactagtgacgctaaaaagttcgcccttttgactcagagcaagataggtaggactcgtttcttctaacaaaagtgtcgcttctgttaaacgaccttgtgtcgtatctaatgcaattttataaatgccttggctggctcttcgagtataggtacctagtaaaatttgttctaacatcacaattcctccaatttgtttcaacacaatcactttttatgaaagtgcttttatataatgtagtataccataagaagtctaagaacaataaaactttctatctgagatgttcgcattttaaagtggtttgtgctattatgatgagagactgtgatgacagtcattttttgatttttagaggggtgacgaacatgtacgacaatacggataataacgggaccgttcgttgttcattttgtgggaaaacacaagaagaagtaaaaaaaattgttgctggtccgggtgtctatatttgtaatgaatgtattgatctatgtaaagagattattgatgaagaattttatgatgaagcagtccgagaattaacggatgtgccaaaaccccaagaaattttaaatgttttaaatgaatatgttattggacaagaacgtgcaaaacgcacactttctgttgctgtttacaatcactataaacgtgtgaatcaatcagaaacagctgcaactcaagatgacgttgaattgcaaaaaagtaacatttgtttaattggaccaacaggttcaggtaaaactttcttggctcaaacgttagcaaaaacattaaatgtaccttttgcaatcgctgatgcgaccagtttaacagaagcaggttatgtaggggaagatgttgaaaacatccttttaaaattactacaatctgctgactataatgttgaacgtgcggaaaagggcattatctatattgatgagattgataaaattgcccgtaagagtgaaaatgtttcgattactcgagatgtttcaggtgagggtgttcaacaagccttactaaaaattcttgaaggaacagttgcaagtgtaccaccacaagggggccgcaaacatccacatcaagaatttatccaaattgacacaacgaatgttctcttccatcgttggtgggagcattttgatgggaattggaaaccatggtttaaaaacccgccttaggc

SEQ ID NO: 54 - DNA, 11266 bp; double-stranded, linear
cgccaagttcgtcaataatcggtcagattgttttcaatcaggaaatcacgttttcgccgcttctttcaggtgaaaattttcgcccagcgttcatagcctgcgccnttttccggcggcaagtttcgcctgaatgtcaatcaggagattgacctttctgccggttcgcttcggcgctgtttttcctgacgtcaaacgtctgcgctggctggtaattctggcgcgcaaggcggtcttggtataatcgtcgcccagccggttcacccttgtagggcgatcccatccgggcagacggaatccgggatttttgccgtccacaacctcatatccctcagcccgcatctttgccagaaattcctcataatgattgcactctggcagcagccggtcaatggcttgctgtaactgctttttgtggctgacgccgtactgcgccgccgccatttccttttggggcctggcttttttcttcggattctcaatcaccgaaaggccgtgggcgcggcacagttcatcattcatgcgtcgcaggataaaagcggagtttttcacgttctggaattttgcgtcacagttcaggttggtgctgttaaattcaatgtgggtatggatatgccgcttatccgtgtgggtggccaccacaaactgatgctgcccgccggtaaatttcatcgccaattcacagccgattttgtgcgcctcctccgggctgacttcatcgggtttgaatgactggataatgcggtacatgataatgtcatgcttttctgamctgctgcgcccggtaagctgggcgtacagttttttgctgatttcaaattcttcggcggcagtttccgggctgcacatataggaggaaaccagttcgccgccgtctgtcttttcttctttctggtcatagtcgtggcgttctgccattgactgctgacgggtgcggtttttcataatctctcgtggtaaaatattagagatagcccaatggttcctcctttcagaaaaaaggctatccatagcctaaatagtagcatgggtagcctacttttgcaagccatattttgtatgcttgatacnaaaggggggcaggatacagctatggatacgatttcagcgattaagacccggatactccgtttatgtgcggagcgcaacattaccatcaacaaactggctacgatgtcggcgctgccgccatcctctgtcaaaaacatcttgtatggaaagagtaccgatcctaaaatttcaaccatcaagaaaatatgtgacggtttggatatgacgttgatagattttttcgatgcgcccgaatttgaaaatttagarccggaaattaaatagcgttaccgcgccgcgtcccgctgccgctgtgccgtccgtaccgctttaacgtgggtgcagagaaactcgttatagtccttgccctgcttcggcgggttggggtaaaccagcttcacccgcctggaaagttccgcatcgttctggatttcctgggtgagccgttccatgccctccaagccggccttgtcattgtcgaggcacagactgacttgggtaacgtgggggtggtcgtgaagaaactgtatcagggcgcgggggccggttccgcccagggataaataatggctgtcccgtggttcgccgccggacagctttactaatgtggcgagggagagcgcgtcaatagggctttccgccaccgccagccgggggcagtctgccttgcctgccggcagacagaagctgtaccgcttgtcgcttccctccacatccatgcggaagccgtcccgcgtcccccgcargctggcggcgcgggcgttccctgctgtgtcgcgcccaacaaagacgcagttctggtatttgcagctctcgtataaaatcccggcttccatgcacacgccaagcagttccgggtcaatgccgcgatcctgcaaatagcccacaacagcggatgcacatcggctggcctggggcagtcggaagggctttggctgtttttcttttatgggcggcgctttttcgggcggtggcgcacagtagccgcacagggtttccaccgcgcctacaaagtccatgccgcgcaccttgatcagataatcaagggccgtgcgcccaccgatgccccggctgttccagcaccatttcccgttggagatttttaagctgtcatgggttctggtgcagtattcgcgggggccgctttttttcagttcctgcggctcataggcctgcaaataagagagcagatcccattcctttgcttttgcaatctgctctttggttacgcctgccaagtaatcacctccaaatatgaaaaaagggcggcgggagcatctttcttttgcccccgccgcagttgtttacagtgcttcaaatttcttcagcaggtcgttcacgccctgccagatttcagagtagccctgccgcaagtcctccacatcctgctcatagaggttgtgggtgctgttgcacsggcgggcgatctggttgacgttgctggaaacggaacgcagcaattttaccagttccagcaccgcgcccatgtcaagctgcacgatgtagccgtccaccgccatcttgcgtaggtaagcccgcaggttggaggttcccagcaattccattttgcggtcaatcgccgccttttcttccggggaaactttggtgaacagccccaccgtgcgcccctcctttatcctcacagcaccgcctcctttcgcggggtgcgctccatgccggaatgtaccggcgtgggcggttcatagttacggattgcctgacggatagagggtttatagccagccgccacagcgggcatcggcacaaccggcgcgggttttccggcgtcctccaaatcagggctttcttcaacctcctgctcatcctcctttttgtccggcctggacagttcccggttaagctggtttaagcgggcggatttttcccgcagttcttcttcttttgggaatggccggtcggcttcttctttggcgttttccagttcgctttccagtgtggcaagccgtgctttttgtgcgtccaaccgctccgtcaggctttccagcgcattgttaatacgggtgacgttgcccaccgcatcgtcagacagttcggcggaataggtcaggttctgcttcatggtgacgcggaatttgctgccgtcacaccttagctgcatgggaaagccgcgaaactcgcccaaatccacggttttttccgggtcgtccatcagcatacacgctttaatcaccgcttcgcccgccgccttgcgctccgtgtaggtctgccccatgacagtcatggaaaacgcatcgtccttgaccgggtgggcctgcacggttggcaaatctgccgtcagcgcttcgattaacagcttggtttccgcgattttctgcgggtagtatttcagcgctttgtcctgcatttcgtactgttgggaggtgtggttggctttgagcattttcagcttggaaacctgcacatccaaatccattttttcgcggatacggtcgtcgccggtggcaagggccttgacctcagcataggaaagggcagtggcgtccacatcctcggcagagcgggcagggcttttagaggtcatgatctgaccgatgaatttctgtttgttttccaccagcccccagttgtaagcgtcgaatgtacccttggtgacatacttgaacattttcaccgacgcattcatgttgccctggcgcagagatcggcccgcccgctgttccaaatcggcaggacgccaggggcaatccaggtcatgggacgcgacaatgcggttctgcacattcgtgcctgcgcccatttttgccgtggagccgattaagacacgcacctgcccccgccgcaccttggcgaacagttctgccttttgggtttccgtgttggcgtcgtggataaaggcgatttccgcttcggggatgcctttggcaatcagcttttccttgatgtcatcatagacattgaatgagccgtcccccttgggtgtgctgaggtcgcaaaacactaattgtgttcctaaaatctccgtgctggcctgccattcctgcacgatatttttcacgcaggcgttgaccttgctgtccgggtcgtcgggcaggagcggattttgcagccgctgatccagcgccagcttgcgcccgtccgaagtaatccgcagcatattgtcgatatgggggtcaacctgcccgccgcgcacactttccgcacgctcgccaagttcctccaccatttctttctggaatccgctgggttccgtggtgacggtgatatattccgcctttggcacggggagattcagcatatcggcggtctggatgtcggcggcttctttccaaatagaaataagttccggcaggttatagaatttcgcaaaccgggtcttggagcggaagccgctgccctccggctttaattccatcgccgtgaccttttcgccaaagtctgccgcccatgcgtcgaaatggcggtggccgttctgctccagggtgtcaaactggaggtagcgcatcatggtatacaattctaccattgagttactcaccggggttccggtagcgaacacgatgccgcgcccgccggtgatttcgtccatgtagcggcacttggcaaacatatcgctggatttctgcgcgtccgtctgggcaatccccgccacattccgcatttttgtgtgtaaaaacaagttcttaaagccgtgcgcctcgtccacaaacagacggtcaacgcccaattcctcaaaggtaacaacactgtcttttttctttccgtccgccagcttttgcagcttggcttccaggtttttctttgttttctccatctgcttgatggtgtagcgctcgccgtcctccgcctttgcttcggcaatggcggtgacgatttcatcaatctgccccttaatgacggctttctgccgttccggggagagggggattttttcaaactgtgagtgtccgataattatcgcgtcatagtcgccggtggcgatccgggcgcagaatttcttgcggcgggcaggctcaaagtcccgtttcgtggcaaccagcacctttgcgccggggtacaggcgcaaaaaatcgccgccccattgttccgtcaggtggttgggaacgacgaatagggatttctggttcagacccagccgcttgccctccattgcggcggcaatcatttcaaaggtcttgcccgcgccgacacagtgggcaagcagcgagtttttcccatagagcatccgcgccacggcgttctcttggtgggtacgcagggagatttccgggttcatcccagcaaaacggatatgggaaccgtcatattcgcgtggacggatgcagttgaatttctcgttgtaccgcctgcaaagggtttcccgacgttccgggtctttgaaaatccagtccttgaacgtttcgcacatggcttcctgcttctgctgggcaatggcggtctgcttttcgttgaggacgcgcacctcctttccgtccacttctgtcttatcaaatatccgtacatcccgctggtttaaggtctgctcaaagatttcataagcgttgatgcgcttggtgccgtaagtagcatagacgcgcacgttatcccggttgtctgtgctttttccctgcacgttccattcgccggtggtaggggaatattgcagcttgatttttctgtcctgtaaatacacaggtgtatgcagcagttcaaacatgaattgctggtaatactccgggtcaatccaagacgcgccgatacggacgctgatttcagatgccgtcaggtctttgggctgcacctgttccagcttttcggcattgatggcaaactgcgggttttcctcagcggcggcgcgggcaatcgctaacttggcccggacgttgccggaaaggtattcgtccgccgtctgccagccctgatgccagtgtgcgccgccgtcctccaggtcaaaggggccggtggcggggtttttgaagatgatgccttttaagtcctccacaatctgcgggattttttcagggccgcccatgagggatgccatatagcccaaatccacgcaggctttttcaccgatagataccgccagcgcctccacagccgtgtccacgctggtaacggcgcggtgggtctggatggtgcgcctggtgaacatatccgctttacgctccagcttcccctcctcgttgatgatttcaagagagcagagcagcggataggaggaatcctgctcaaaggccagcttgttgccagtgctgttaagaagcccgtactttgcgctgaacgcatcatagagccggtttaattttgcctgctcggactggatttctgtgtcgtctgcgccggcaagctgtaagtcgatcaggcggcgggcgctgtcccggatgccgatcatgcccctgacgcgctccgtgggggttttgccaaggacggcctgggtcatgcgggagttttcccggaagtacagcttatcattggatagggtgtaactgaaattgcgtacagtggggtcggcggggatgctttccagttcctcgccgtcttgcccggaatccacttctaacagttcccggtcaggcggtgcgatatgccggatagcttctgcaagctgcccggaaaggtctgcgccggggatgggctggcaggcggtttcagtttcattgccgtacatactgcgtcccattgtcattgtccccagcaccatttccgggtggtctaaaaagtagcggttcagggggatgccgtcctctgtctgcccgacctccacccattccgggagtttttccgggatgcggtcgcgcttctggaaaaagaggatgtccgttgtgacttcggttccggcgttggccttgaacgcattgctgggcaggcggactgcacccaataaatcggctttttgtgccagcgcctcccgcgccttgctgtttttcttgtccattgtgcctttggtggtgataaaggccacaatgccgccgggacgcaccttgtccagcgttttggtgatgaaatagtcgtgaatcatcaggttttgacggtcgtaccgcttgtcatgcacctgatagctgccaaaggggacgttgcccaccgcaaggtcaaagaaatcgtccgggtggtcggtgcgctcaaatccgtctaccgttatatccgccttttggtatagctgtctggcgatgcgcccggtcaggtcgtccagttccacaccatataactttgctgccgccagtttttcgggcagcatcccgaaaaagttcccgatgcccatagacggctccaaaaccgtccccggcgtaaagtccatctgttccaccgcattgtagattgcctggataacggtggggctggtgtagtgggcgttgagaaccgtgctttgtgcagactggtactccccaggggtgagcagttctttcagttcggcgtattcctttgcccattttgggtcgtttggctcaaaggcgtgggaaatgccgccccagcccacataacgggataaaatggcctgttcttctggtgtggcaaggcggttttcggcttcaatctgtttcagggtgcggatggcttccacgttgtactggtacttggtcttttcgccgcctgcgcctaaattttcatcggtgatgcggaagttgtggcgttccggctccagacggagcggctgtaaaataatctcgctggggaatacccggctgtccacttcctcctgggcgcggcggcgggtctgtctttgcgccggggtttccgtaatctgcccgccgtcaatctccaccagttccggcggtgcttcctgttctggagaaacgtccttctctggaaaaatttccggctctgttggctccacgccctctctggcacctgccatttctgaccacctgatccgctggttcagttcggcttttaaccgttcttcaatatccggttccacggaaaccagcatatcatagtcaaggaaagcaagttccatatcaatcagttcccgcaggctgccatactgccgtgtttccacgcatttcccgtctacggactggctgatggagaaatccagcaggtttacgtccacctggacttctaaaccgccgtcctcggtcgtgccataggcaatcccgatatgctccaaatcggaaaaatccacatcatcgctgccatattcggcgtaggcaaactgttcaattagctgttttgccgtatctaaatcggaggtttcggggcgttccggctcctgcatgggttccgctgtaaaatgctcctgctggacttcctctacaaactgccgcacaaaggggatgctttcactgcggaaaatgggataccagccccgcagttccatatcttgcaggctgacggttccggcgttatagtccacgctgtcaatcttcatcagccgcccgtcaatggtcagttccatgccgacagggatataatccgccgcgctgcgttccttgatgatttcatagggggcatcgccgccgcgttccgtgtcaggccgcgccagcaccacgctttttccatgttccagcagcttttttaagacggactgccagccattggctccggtgatggacaccatccccaggtcgggaatatcgcgggtgatggttttcgttcccagcgcaggggcggcttcctctgcgtctgtgccgtaaaacagcatggttttccctacccggacgcctaccagtttgtcagggtattgggctttcaggttcaggtattcctccacgttgggcgtaaggttcagaccgtctgcggcggctgtttttggggcttcctgggtctgcggcgaacctgtgccggtgggttctgcgcccgccttttgcgcgggggatggtacaatattgctgtccccggtttccggctctggattgaccgcagcgggcgcgtcctgcaccttttccggctctggctccgagttcccaggctgcacccgttccggctcctggggcggggtggaaaatactggcgtgtcctgggtggcagaaatggacatttcagtggcagcggcaaccttttgaattttttccctgatttcctccggcatatccgcgtcgtaaaaagtcacggtacggtcaggggcgatatgggcaactgttttgtagtcgccgtgttcttcctccagacggttccagacggtcaggccgttccccatatggccatagcctaaatcatagcggtcagcggggctttcggccattatgggcgcagccccttctggtatgttcggcgtttcctgcggtggttccggctttgatgcgatagggacggccgtttcagatgcgccggtttctgcctgcgaaagttccggctccggttcaggagttgcggctggctgttctggttcggacgaaagcccgaacatatctaaagtaagctgcccgtctgcatcctcccgtggggcaggctgtttcttgcgggaaagggcttttgccgcagcagcaaggccggttgcaggttcagccgtttgtctggcggaatcctgcctttccttctgtttctgtttctgctttttctgccgttcctcctgcaagacggcatcaggcagaggggtgaataaggagtattcgccccgcaggtatgcgcccattttttgaagcgtcggctccatcagggaataggcgcgctcatccggggataccattgccagggctttcaccattttttcatagtgcgccgcgcattgttccgggtcatctaacagcgggcggaataccttttttgccgcgtcaacatcccagtcgtgggggattgtcttgctggcatcgttggggtcgtagtattggaaggtatatagactccgagcaagctgcattttttcatattccggcagatatgccttttccctgcggttcagataccgatccgttttaatcagtccggcaatccgcttttgtacctgcttccagttcagcgtaaccgtatcataattgccaccggaaaaatcgtcggcgcgggacagcttgatgcctttgccgtcgtgccattcatcatagccaatgtagccatgcccgccaatgccgtattcgtttttcagaaattcgatgcactctttggcatcatgcccctgcataaagtaggcgtaaatacggaatttcccctcggaaacgccagagccgccagtgaacatccgggtaatctcgtcctcggtgacaaaagctccacgggcaggcgcaaagccctccaccccatgaaatgccgtcaccggcttatccatatcggtcaggcgggtaaacagttcggagggcgcgggccgctggcggaagcgcagcagattcgggttctcctgatgggagatggcaaactgccggacttcctgtgcaattttggctcgttctgccgggtctttcaggagcgcggcaattttagccgtgctgtccgggaaaccaccgtacagcgcgtcaatggtgggcagcaagcccttttcctttgcttcctcgctgaaattctgccgcagaaaccacagtttttccgacaattcccgaaattcattgtcacgggccgcgtcgattttgtcctggctggcaaactggccgctgttcaaaagctgccggatctgtgccgccgcctgcttccaggtgacaagggagccgcccccggcagagcgccccggcgcgatgtggataccgctatggctgaaccacagcgaatactcatgcccggcaattttaagccccttgccgccgctgccgtattccttttgcagaaaatcggcggcagactgctccgtagggtctttctggaaaaaagcgacgatacgcaggatgctgtccggctcgttgccgccgcttgtgagggcgcggccaatgaccgcatccgtgaccttgccggaggaaacggcggrgcgcagttcctgctcggttttctgtgcctgagcaatagtttcaatctgtgttccacagtggggaataaagaaaactgtgtaaatgccggcttttcagacgcagaaamgcggactgttcgcccgccgcttcctgctggttctcctgatttacttgtaaacgatctcgttcagtacggtttcctccgcctgggcgagaaacaggttgactgcctgcacccatcccatctggtcgcgggctttcatcccctcgtmcacgccgttctgtttctttaattccgccacgatccggtctgcctgttcctgcgcntgccggtcgatctcccgcaggtggggttccagccgcccggtcagcagcatcgaggtgtatgtccccttgtggtgttcctgaagaaaggtctgccgcagcctgccgtacttgcccagcggcatttcctccatctcgtcctccccgtc

SEQ ID NO: 55 - DNA, 7528 bp; double-stranded, linear
aattttagtgtagtaaagaagtacgtgaatttgattttggatattgtattagggattttaggagttttcttattagtatttatggctagttatttagttgacctcgctacatatctcatgaagccaatgacgccggataatttttcagttatcatgcaagaaattatttcattctttatgttatttgagtttattatgatgattcttcgctatattcaagaaggacaccatattccgatcgttattgattttaattgttaaccgcaattttacgtcaattaatggktgcgcatggcgatggcytgcagacttwatkgttawctttawcaattcttttactagtggttgtgctatttattctcgggttaaatggcagcaaattttatacgctaggaaaagcgaaagtagaagaagatcacgagcaagattttcaycattaatcgaacataatcaaagaccgtccaacgtgagaatttttctctaacgtggggcggtctttttaatgcatagttaaatagttaactcaatcagttcaattgttggtaagacaccaaagcgtgcgctgattttagtggttccgattcctgggtgaacaattagcggcgtttcatcttctaaatgataaagcccatgtgtatattttttagcaagctgatttttgtaagtgaaaaaaggcaagcgaatctgtccgccgtgactatgtcctgctaaaatgaggtcaatgtttttgttgactgctgagtctgcgacatctggctcatgggttagtagcagagtgggcgttccagtagggcggttgactaaagctgcagctaagtcggtttgtccatataacgaatcttctaaaccagcgacgtacaaggagatacggtgtgagacaggcagtaatttgcccgtgttttttagtacggtaaagtcggcagcttctaagattgtttcgtaaaaattggtatctaagccgctatactcgtggttgccataaatagcgaatttgccataaggggcgttaattttacggaaaagttgactcacttcatcttgaatttcgataccgaaacgggcataatcatcaaataagtctcctgtaaaaacgactatgtctggttgtaatgtatttgttttttcaacaatctgttttaaggccttcacagaataattcttttttaaatgaatatcagagagttgaacaatccgtaagttttccctgattctgttactttaatttgatttttgtgtatgactaagcatttaggttcaataaaaaaactatagcttaaaatgccgataataatgaaaaatagtgccagaaataaataaacgttcataatttcctccttgaagtcgctaaagtagtttactacaaaagtgttaagcaaaaaataaggaaaggttaaattttcagtaaactttctcgatgaagttttttggtgattcatgcttttctgaagtaaatttgctataatgaaaaatgagaaaaaagaaagaaggtcgaaccaatgatggcaagagtcgaaaagctacgggagttaatgaaagaaaataatttacaaggatttttagtgacaagtccgtataatttacgttatttaaccaattttactgggacmacaggcttggcaatgattacattagataaagctttttttgtaacggattttcgttatacggaacaagctgcggaacaagcaaactggttttactatcgttaaaaacacaggacatatttttgacgaagtagcagatttagctgaacgtttgcaattagataatttagcttttgaagaaacgcaagttagtttcgctgattatagcttattggaagaaattttaccatgtgaattagttcctgtaatgggtttgattgaagaattaagagaagtgaaagatgaagaagaagtagcgattattgaaaaagcgtgtgccatcgcggatcaaggatttgcctttgtcttagagatgattaaacctggaatgacagagattgaagtggctaatcaattagatttcttcatgcgttcaaaaggagccagtggtgtttcttttgagacaattgtggccagcggtctacgttcagcgatgccacatggcgttgctagccataaagtcatcgaaaaaggtgagttaatcactttagatttcggttgttattatgaaggctatgtttctgatatgacacggacattcgctattggtagtattcagccaaaactaaaagaaatttatgacattgttttagaagcacaattaaaagtgttagcagaagctaaacctgggttgacgggcattcaattagatgcgattgcacgggatcatattgcttcctatggctatggcgatgcgtttggtcacagcactggtcatggcattgggttagaaattcatgaaggaccaaatgtttcattccgagcagataaacagtttgtaccagggaatgtgattacggacgaacctggaatttatttgccaggaattggtggcgtgcgtattgaggacgatttattaattactgctgaaggtaatcgtgtattaacacatgcgccaaaagaattaatcattttataaaggttgggagaacatggatatccaagagtatcagcggtttattagtgcgttttataaaaaacgtaactggtatcaatatgatccgtttattcgttccaactttttaacagaagaagtcggcgaagtttgtcgggccattcggacaattgaaattggccgtgatcgatcggatgaaacagttttggcggatgaagagaatctggaaaatttaacggaagagttaggcgatgtgttggataatttatttattttagccgataaatatgacatctctttagaaatgattatgcaaaagcatcggacgaaactaatggaacgttatcctgaagaataaagatgtaaaaataagaaagccaaaattacttggtctttcttatttttacgtctaaaggcttgaattagaaatttatgacaagaaattatctgttcttttagtcagaacttagcttttctggtagcgaaataggctaattaatgataaactaagaacgagtattgataagcaaaatttggacgttctttcacaactaactgaagaaaccagtgttgttttaatttttaagaatcatccgttgcttaaaagagaatccttaagagacttagtgattcatcaaataaatcgtttatttaacgattttgtgcgtaatagataaggaggacaaccaaatgtcagaagaaaaaaatcttgtaatcaatgcaaacgattctttaggagaaatcgtgatcgctcctgaagtcattgaagtaattatcggaatcgctgcttcaaaagtagagggcgtttatgggatgcgcggcacgtttgccaataatgtgaatgaattattaggccgtgcagcacacggcaaaggtgtatatttacgaacagaagaagaaggcttaaaagtcgatatctattgttacttgaactacggtgtttctgtaccaaaagttgcgttagaaatgcaagaccgtgtgaaacaacaagtcttatttatgacagatattgatttagttgaagtgaatattcatgttgtagcggtagtacctgaaaaaatccctcaaccagacttaaatgaattattcccagaagatgaagatggagaagagaatgagtaaaacagaattaacccgtcacgagattcgtgaaaaagcgctccaagccctttttcctttagattttaatgctgatttaaccaaacaagatgccattgattatgcattggcttatgataatcgggaaatcgtcagtgaagatggcgaagacctagtccctacgtatttagatttacttgtcggcggtgtgtgtagccgcaaagcagaactagacgaagtgattacgaaccatttaggtaataactggtctatgcaacgcttagcaaaaatagatattgttattttacgtttagctatttttgaaatgctatacgtttcagatgtgccaaacattgtggcattaaatgaagccgttgagttaagtaaaaaatacagcgacgaccgttcacgtaaatttgttaatggtgtgttatcaaatgtaatgaaagaaattgattcagaggcgtaagctctgaatctttttttactatctaactggtgttaagatactgggttatatgctaaaataaatactattaaagaagtaaagaaacaatagagggagcgaaggaatgagtacagtaattaacggtcgtgaattagcagatcaaatgcaagcagagattcaaaaagatgtagaaaagatgacacaacaaggcatccaaccaggattagttgttttattagttggggaaaatcctgccagccaaacgtatgtgagaaataaagaacgtgcagcagccaaaattggcattctgtcaaaggtcgaaaaactgccagaaactatttcagaagaagaattattggctgagattgacaaatataatcaagattcacgctttcatggcattcttgtacaactacctttgccaaaacatattgatgaagaaaagattttattagcgattgatcccaaaaaagatgtagatgggttccatccaatgaatttaggccgtttgtttgtaggcaaacctgaaatgattccttgcacgccgtatggaattatgaagatgtttgaagcttatgatattgatttaacaggtaaacgtgcggtggttattggtcgaagcaatattgttggcaagccaatggcacaattattgttaatgaaaaatgcgaccgtgacgattgcccattctaaaactgaacatttagcagaagttgcaaaagaagcggatattttagttgtagcaattggacgcgggcattttgtcaccaaagagttcgtgaaaccaggtgcggtagtgattgatgtgggcatgaatcgcaatcaagaaggaaaactgattggtgatgtagcattcgatgaagtttctgaaattgcaagctatatcacgccggttcccaaaggtgttggcccaatgacgattaccatgttaatgtatcaaacagtcgaggcagcaaaaaaacaaaagtaaggtgaaaaaatgacgcaacagtatttaacagtaacagccttaacgaagtatttaaaacgtaaatttgatgcagacccttacttaggacgtgtctatttaacaggtgaaatttcgaactttcgcttccgagcgaacgcgcatcagtacttcagtttaaaagatgatcatgcgaagatttctgcaattatgtttaaatcagcctttcaaaaattgaagtttcaaccaaaagaaggcatgaaagtcatggtggtggggcgtatttcgctttatgaaaacagcggctcctatcaaatttatattgaacatatggaaccagatggtgtaggtgcactttatcaagcattggcagaattaagagaaaaactaggaaaagaaggactttttgaagggcctaaacaacagttgcctcgttatcccaaacgaatcgctgtggttacaagtcctagtggtgctgttattcgggatatcattacgacagtcaaaagacggtatccgattgcacaactggtcctttttccaaccttggtccaaggcgagcaggcggcggatgacattgtgcggaacattcagcgagccgatgcgcaaagcgattttgatacgatgatcatcggccgtggcggtggttcaatcgaggatttatggccatttaatgaagaaaaagtggctcgagccattcatgctgccaccacaccgattatttcatcggttggtcacgaaacagatgtgacaattgccgatatggtagcagatgttcgtgcagcaacgccaacggcagcagcggaactagcggtaccagttttaaatgaagaactattaagaattagtgaacggcgtagtcgtttagaacaaagctttttatatctcttacaacaacgaacagaacgtttccaacgactacaaaattcttatgtgtttaagcaacctgagcgactttatgaaggtcaaacgattaaattagatcgaatgacgcaacgtcttttccaagcaatgacaacaattcatcaccaaaaacaacgtcaagcccaaggaattatcgctcaattgcaacaacagacaccaaagggacaattaagagaaagtcagcaacaattggcatttttacaacgaaacttgcaaacacaaatgacacaattgttcctaaacaaacaaaagcaattcacgtctgctgttcaacaactagacttactcagcccactcaaaattatgggtcgaggatatagttatactacaaaagaggaccgtgtcgttaaaactgttaccgagttacagccagcagatcaattaacgattcattatgctgacggtacagttcaagcaaacgtcgaaacaataacagcgaaaaaagaggagttttaacatgccagcaaaagaaaaaacgtttgaagaatcattaaatgccttagaagaaatcgttcagcgcttagaacgaggagatgttcctttggaagaagccttagctgcctttcaagagggcatggcattaagtaaacaatgtcaagatacattggaaaaagcggaaaaaactttaacgaaaatgatgacagaaaacaatgaagaaattgtttttgaagagagcgaggaagcgtaatgacgaattttagtcaacagcatttaccgttggttgaaaaagtcatggtcgattttatcgcagaatatactgaaaatgagcgtttgaaagaagcaatgctctactcaatacacgcaggtggcaaacgattacgcccgctattagtgttaacaacagtggccgcttttcaaaaagagatggaaacacaagactatcaagtggctgcctctttagagatgattcatacgtattcattaattcatgatgatttaccagcaatggacgatgatgatttacgtcgtggcaaaccaaccaatcataaagtgtttggtgaagcgactgccattttagcaggggacggcttattaacaggtgcatttcagttgctttctttgagtcaattaggcttaagtgaaaaagttttactgatgcaacaactggcaaaggcagcggggaatcaaggcatggtttccggccaaatgggtgatattgaaggagaaaaagtcagcttgactttagaagagttagcggctgttcatgaaaagaaaaccggagcgctaattgaattcgccttaattgctgggggcgtattagccaatcaaacagaagaagtcattggtttactgacacagtttgcgcatcactatggcttggcttttcaaattcgtgatgacttattagatgccacaagtacagaagcagatttaggtaaaaaagtaggccgagatgaagcgttgaataaaagtacgtatccagctcttctagggattgctggcgcgaaagatgcgctaacacatcaattagcagacaagctgtgaccgtctccgggagctgcatgtgtcagaggttttcaccgtcatcaccgaaacgcgcgagacgaaagggcctcgtgatacgcctattttta

SEQ ID NO: 56 - DNA, 6682 bp; double-stranded, linear
tttttttgcaacgtttccatgaaagaatgcgggaagatatccctaaaaattgatcttcttatttctctattcaaaatgattctagcctaaccttttttactatttcatgatatgatgaagcaaagaatattttaggaggtttttacatggctgcaaaagaagcaagttttgatgtantttcagaggtcaatatggaggaagtcaaaaacgcaattcaaattgccttgaaagaattgaaaaatcgttttgactttaaagggtcaattgctgatattaaattggaaaacgataaattagtagtcgtagctgaagatgattataaagtcgagcaagtgaaggatattttatttggaaaattagtcaaacgcaatgttccgattaaaaatattcatttttcagaaagtgaaaaagccttaggcggtactgctcgccaatatggtgatttaatcagtggtattgataaagaaaatgcaaaaaaaatcaacacagctatcaaaaactctgggattaaagttaagtcacaaatccaagaagacaaaattcgggtaactggaaaaagtcgggatgatttacaaaaagtcatggctcttttacgagaattagatttaccaatggctcttgagtttaataattatcgctaaaaaaatccttcaactgttaatgaacagttgaaggatttttttgttttggtaccggccattcttgattattcaataaaacgattggtcggcgttggatttttcctgaaaaagcggcaattgctttgaaaacctttggcataaaataaaacgcatttaattcttctaaatccagttcttcttctgccgtaaacgagacacaaacctcttgttctgaaagcataatttcaattttctttaaaaattgaaattgccgcattcctggcacgaaataaccagcctttgcaacacgagaggttgtaatatctaatttatcactaatgattagcgctagtgtcattaactcttccgaatcaaagccgttactatgattttctatagaagataaaatttcttcttgataaggcaaacaaatcttttgcttacgaaaatatgcttctgcaaattgtttcccacgaagtgcatgtcctgcttttccttgtagcgcacccacatcatggagcagtgccgcaatttttgccgcctctaaatactcctctgaaacagcaagttgtttcaaaatcatttccgtcatggctacgacattggttacatgaaaccaattatggtatgcccacccagcttcttcatcttccatttgaccaattgcatcataaatttgtcgaatttcagtatcttgatgaatgcgttcaaacagcttcatttattttctccttaaaattagttactgttccaaaaattcttttaactctgcaggatttttttcgctgtttaaaccaacaattaaacgaatccgcgctttcggtccgtttaaaccacgggcaaaaacgacccccatttttttcaagccaacgccaccaccagcataatcatagatatcttcagcaatgccattggaacaacgagaaactaaaacgactggaatcccgttgtctagcattttttgtaatgctgggagcgtttctggcggtaaattacccgcgcctagcgcttcaattactaacccatccgtttctggggtgtttaataattcaaacatccgttcacccatccccgcataggccttcctacgtgaacatttcctttcacagaagaaacatcgcaaacttcttgcggtaagacctctttcgcaaaaaaagcacgttctttcgcaatggttcctattggtccaaaagttggcgtccgaaacgtcgctacgttcgttgtatgtgtttttgtcacataacgcgccgtatgaatttcatcattcatcacgactaaaacacctttatcgtacgattcgtctgaacaagcagtccaaatagcactgatgaaattatacaagccatcactaccgatttcgttacttgaccgcattgctcctgttaaaacaatggggatttttttctctaaggttatatctaaaaaataagcagtttcttctaatgtatctgttccatgcgtaataaccacgccatcaattggttcagaataagctttttgaatccgttcttttaattgaaacatccgttctaaggtcatgtgtggtgagggaatattaaaaatatcttcaacaactaaatgaaccttgccagaaaataatgcttcttgttccatcaacggatttttttcattcggggcaacacttcctcctgctactttcgacatggaaatggtcccacctgtatgaaggactaaaatggtcttcatttgtttcctcctttgttttctttattttttaaccaaaattgtttcacttgttgaatgagttgttcattggtgtttgcctttcgatgcgccaaccaatgcggcggaaagaaacgctggacacttggtaattcaaatcgttcgtctaataacaacacaaagcctttatcttgcgcatctcgaatgacacgtccagccgcttgcaagactttattcatgccaggaatttgatacgcaaattgaaacccttgccctcgctcttcttgataaaaagtgcgaatcagttcttgctctgggttcatttgtggtagcccgacactaacaattatcgtaccaatcaatcgggtacctttcaagtcaattccttctgaaaatataccacctaaaacacaaaaaccgatgaaagtttcttgaggattctctttaaattcagctaaaaatgcttctcgctctttttcgtttaagtccgttccctgaatttgagtttttacttgcgggtaacgttggctaaatacttgatagacatcatccatataggcgtaggaaggaaagaaaattaaataattacctgtttttgtttcacttaacttccctaaaagttcactaatctgtggataacttttttcacggtttttataggttgtttgaagatgactaccaatcatcaacaattgattttcttccggaaaaggatacggaatccgataacgtaggctttcttcacctccaccaagcacttcttgataataattcagaggtgttaaacttgccgaaaataagatactcgctttccctttatctaatcgttgtgacaataaataagccggatcgacacaaaattgtttcacaacgcagtcatagtttcgcaaagaaatagacgtataaaagccgttgtcgtaatactcgctgattcgaagataacttaaacaatcaaaataaaaactgagaatcgacgccaattcctcaatgtgttgattttctggcaaccattctgcaattacttctgttaatcgatgtatctgtttaactaatgaatcaattggcgcgcgttgggcaaaaaaatccgtgtctttttcttcacagattgcttcaatatcatcaaacgtagttaagactttttgacaagctcttttcaattgaacagattctttttgcaatcttttttgaattgcaaaaccgcattcctagaaatagcggccgaatacatctcccgtgaacgattaaccaaattatgggtttcatccactaaaaaaatattctcttctgcactttggggttcttcaaagaagcgccgtaaataaaccgttggatcaaatagataattgtaatcgccaataattaaatcacaccaaagacttgcatctagcgacaactcgaatggacacaattggtgcttttgtgcataccgttcaataacctctctcgttaaatgattttcatgttgcaataaatcccacagtccctcatttaaacgatcataatagccatcagcaaacgggcaatgttctggtgtacaatttcgttcagttaaaaaacaaattttatcttttgctgttaacgtaatactcttagtttgcgcttgtttttcggacagcgctttgacggcatcttcagccacttgccgcgtgatggtcttagctgttaaataaaaaatccgttcaccttcttcttcaccaattgctttcattgctggaaaaagagtggacattgtcttgcctgttccagttggtgcttccacgaagagccgctgtttactaagaattgttttatagacggctaccgccaattctcgttgccctttgcgatactccccgtaaggaaaactaagattttttaatgatttatttctcaaaatacgccactcttctttaaaaattacccactgttcatagcgcttcatcaaatcagtaaaaaactccgctaatgcagcttctgtaaaatggcgttcttgtcgtgtgatttgttttgtggtggtctgataataagtgagttgaagcgttatttcagaaagttgttcttgttggcaatacatgtgaccataacacatcgcttgataccaaaacaattcgaccttttctggcggcaattcttcaaacgctggttcggatgttttaatttcatcaatgaccacttgcccagtttctttcacaaaaatgccgtctgcacgaccttctacacaataattatggccatttaaaggcacctcaatttttaaagatacttccttttgataaaggctccccgcttccttttgcaacattcgatgaaggcgactaccttcttgtggtgtatgttcactcacatggcgagaatcgatacttccccgccttaaaataaattcgaccacttgacgcaccgcaatttttctcgttgatttcacgtaatcccacctatctgcctccctattatagaacatacattcgctaaacaaaagcaaaaaatccaaaacgaacacaatcatgcgttcattctggatttctctttagattatcaacaattaaaaacaacttgtttcttctaactgtttggtttcttttccatttgcttttgccacgaccaattgcgccatttgtttaaacgaattatttaaaccaatgccgccctttttgggcatcttcacaatcggtacttgctgataatagtgactaactgctggattttcttctgccatcgctgcaattgcaggaatgcctgcagcattaaacttacaagctagacgagcagccatttctccaaaattaggataatgcatggctggtccgcaaagaaccgcatcggcatgaaacttttttgcaaagccaataaatttctttgctacctcttcctcgttttccaaataatattggtcaccacaataaagtgtcgcaacaatttccgcaccttgcttctgtaaaaatggtagcaatgttacccctggacctaagggagcttttttaccacttggtttcagctgagcttgttcatcactgccaaatcctgctaaactgtggtttaagactaaaaggatttttttcatgcctatttcctccttatttataaatcatcgaagtcaaaggaatcaaaatcaatttcttcactctcttcttcttgtgctttccattcttcacgtaaatattggtcatccataactcgaataaaaggataataaatgaacattcctagtaccaataagagagcttgcagaattgatccttgccaaccgctgactaaaaatcctgagataattggcggggtcgtccacggcaattgaataccattcgtcaatggaactaagccccaatccatagcaaaataggcaataataatattaattgcgggtactaagacaaatggaattaaaaggattggatttaaaacaattggtaacccaaaaatgattggttcgttaatcccaaaaacaccaggaattagtgaaagttgcgaaagctttttaattcgttgacttttacagaataagaccatcacaatgattaatgagagtgtggaaccggcgccaccaaatgttgcaacatatcttgaaattgtccagtgatgatgttgggaatttcatgaccgtctttaaatgcttgtaaattttcaacagacaatgcccgcaaaacaggattaaagactgcgccaaccacactacctccgttaatgccaaagaaccaaaagaagtgtaaaaataaataagcaatgctcattgcacctaaggtattaccaagactcaataagggcgtttgtagaaattcaaaaataacatcttgtaaattaccataaggagttaaagcagccagccaattgactaaaaacatgagagtaacaactaaaaaactcggaatcagggcctcaaaagacttaaccactgttggtggcactccttctggcatttttattgtccaccctttacgaacaatggccacaaataaacgagtcgcaattaatgcgacaatcattcctaaaaacaagccactggaacccatccattttaaaggtaaactagtaacttcataaacctttgaactattttccggtgtaaataatgtttgataaggcgttacaataaaaaatgaaaccaatgcgataattcctgcttgcattgcatccacattgaattgttttcctaaactataggcwataccgacaacggccagaatagtcattacatcaaaactagcactagctggaacagacatcattgtcgcccagtctttaccaagcaaatgagacatccaagtatcccattgtggcaaaggaaaattagcaattaataagaagaccgaaccaacaatcaacaagggcgttgataaaaggaagccatcacgaatcgctactaaatacttattktctcctatcacttttgccaaaggggtcaatac

SEQ ID NO: 57 - DNA, 18724 bp; double-stranded, linear
aactcctagaaccaagtaggtactgtttaacatctatttgctttgcaaatagtgtttctcagcaataagaagggatttctgaaaattgttctataatttttggagaccaagtaggtattgttcatcatcgaatcactacgttcttcgtgattttcaacaatttcggcttatttccgaagaccttcaactcttagaggtttagctcttagaagttgttgagaacgaagcaacgcgtagtgttgcttctgttcccgccgtttatcagtttttgagcgtgaagtaaaaatccaaagtgatttttatcccacgcccattttcatttatgacgttggcttcgtgtaaattgagaagtctcgtcctctctagtggttgattgctgtgttcgttgtacggcttgcttttctggctcgctcttttttgcaacatcagtcacaacgtttggcttctgagaagggggaacagttgtttttttgtttaaagttggcgtagttctttttgtttctttcttttgtttctttttattatttttatcatttccagtgactgtcaaatagataatcagaaaaatcattaggatcgttgcaacaattaatagaataaacatgttaaatgaaatgaacatgcatggccctcgtttctcgttttttcttagtttaccaaaatttcaaaatttcgtcactcttttcttcagaaaaaacgaatttcaaaggggttaaaagaaacttttataaaaaagcctccttttttgtgtgaaaatgcacaaaatttctggaatcgtttgctgttaaaaccagatactggtaaaataattattgtataagaatcattttaaaaaacgatttttgttacaaataacgtatttgttgaaaaggcactgtgaagtagttagagacgacagccaagtgacttttaatgacagccgcccaattaatttcatggagccttttcgtagaaaacgaggaggttattttgcgtgaaagtgagtatattttcgacatgcgtggtggatttactttttccaaatgtagggcaagcaatggtagaggttttggaacgttatggctgtgaaacggttttaccaacaagccaaacgtgttgtggtcagccaacgtataatagtggctatgtgacagagagcacgacaacgcttaagaatcaaattgatagttttgacggtgccgattatgtggtgggacctgcggggtcttgtgtcggcatgatgaaagaataccacaaatttttagcagatgatcctatttatggaccaaaagcacaacgtttagctgagcgaacttacgagtttagtcagtttctttatcgtgtcttaggggtcaaagatgttggcgcaacgttacatgggaaagccacttatcatcgttcttgtcatatgacgcgaattttaaatgaacgagaatcaccctttgttttgttggatcatgtgaaaggattagaaatgattcctttaggacatcttgaaaattgttgcggatttggcggaacgttttcagtgaaaatgccagctatttctgaacaaatggtgacggaaaaaatgaacgatgtgattgatacaggcgcagaaattttaattagtgcggatatgggttgcctgatgaatatcgggggtaaattcaatcgtgatgggaaaaagattaagattatgcatattgcagaagtccttaatcacgaagtggatgaagcacgcatggaccaaccacaaatcatatcggtagggtaagggggaagaactgtgggattatcaacgagcaataagccgttaagtgaacgaattgaagaaagtaaaaaagatgtgtttatgcaaaaggctgtcgctaaagcacaagatgcccaatgggagaaacgagaaggtgcgcgggaagctttaggcaattggccacaatggcgtgaactgggagaacaaattcgccaacataccattcagtatctgcctgactatttagaagagttcagtgataacgttgccaaacgaggtggcaaagtcttttttgctcaaaccgccgaagaggccaatgaatatgtgaaacaagtggttctagaaaaaaaggcgaaaaaaattgtgaaatctaaatcaatggtgacgaccgaagtcgatattgatccaatgttattgggattagacgatgtcagtgtgatggaaacagacttggcggaattcattttacaaatggatgactgggatgagccgtcacatattgttttcccaagtattcataaaaatcgcgaacagattcgtcaggtttttgcgaaaaaattagggtatcaaggagataatgacccggtaaatttggcacgctgtgcacgagaagtgatgcgcaaattctttttggaagcggagattggcattacaggttgtaatttcgctattgcggatagcggcttaattaacttaaatacaaatgaaggaaatgctgatttgaccatcagtattcctaagacacaaatcgtgttaatggggatggaaagaatcgtaccaacaatgcgtgaagcagaggttttagataaccttttagccagaagtgccgttggtcaaaatttaacaacgtatgtgacgtttgccgggcaaaaaaatgcggatgaatccgatggtccagaagaatttcacgtggtcattttggataacggacgttcaaaagcgttaggaacagcctttcagccagtcttacagtgtattcgttgtgggtcttgtctgaatgtttgtccggtctatcgccatattggagggcacggttatggctctatttatccaggaccaattggtgctgtgctttctccaattttaggtggatataaacagtttggggaattgccttatgcatctagtctttgtggggcatgtacggaaacgtgtcctgtgaaaattccattgcacgaattattaattgaacatcgtaaagtgatgaccgatgatctgaaaatgaaacatggatttgaagatttccaaatgcgtatggtaggtaaagccactggttcaccagcaatgtttaaagcagccatgaaagtcgatcatgctgcagcgggcattttaagtaaacaaaaagacattactgttgaaaacatgtacaatcatggaggctaccttgataaaggaccagggttagtaaaaggttggaccgatgttcgtgatttgccaagaccaccaaaatcttcagaaaacttcagaagttggttcaaaaaacatcaagaaggtgaaaaaaatgactaacgaagcgattcaaaatcgagaaccttttttacaaaatctacgagaaaaattagacgtagaaaaacagcctgtttcggcccatccatttgagccagttaatcatttaccagaagaacagttggcagataaaacaccagcagagctattaacgattgtgaaagaacgtgtggaaacgattcacacgaacttagtggaaaccacacaagaaaatttactgacgacgattcagcaaattgttgctgagtttggtggggacaatcttttattgccaacagatgcacgttttgaagcctatggattagctgatttagctaagtcattagaggctgtttctgttaagcaatggcaacctggaagtgagcaacgagaagcgaatattcaaacagctgctcaggcaaatattgcgattgcctttgctgagtttttactagctgaatcaggaacgattgtggtggagtccaatgcgggacaaggcagagccttacattttttaccgaagcattacatttcaattataccgtttagcaaactcgttccacgttcgactcagccagcagctttttatacagaaaaaatagaaaaaggcgaaaaaatcggctcagcgattcactttatttcagggccttctaattcaggagatattgaaatgcaactggttgtcgggttgcatggtcctttagaagtttgttacgtggttgtgatggatcgctaaaacgctagaagcataatcaattcagccctttttagaattgattatgctttttttatgagcaggatcaaaaaagtaagaatcaaatttgaaagaaatacgttttttttctgaccattttgtaaaaaaagcgtacataaaaattaattgggtgttaagcactataggattgatttactttgtggtagaatatgagacataagataataaggtttttggaggaatgagtttgaaatcaaaagaattaattaaaacagtcgtcttttttgcctgtttagctttgggtctgtttttactgagacaatttgtatttacgcctgtcgtagtgagaggtcattcaatggatccaacgttagcagatggtgaacgggtaattacgttaaaaaacacagaaattaatcgtttcgatattattactttcccagcgccagatgaaccagataaaaattatattaaacgtgtgattggtttacctggagatacaattgcgtacaaggatgatacgttgtacatcaatggaaaagaagttgacgaaccctatttagatgaatttaaaaaagccttaacagatggtcaacctttgacaggcgatttttcattaaaagaaaaagtaccagcagatagctactttgttttaggtgataatcgacggaattcaaaagacggtcgtgtcattggttttattcataaaaaagatattttgggtgaagtgaaatttgtgatgtggccattctcacggtttggtccaataccagaagtgtcaaaacaataaaagagacaatgagtaaaagagaaggacggaaatgtgtaaaaacaaacacatgtttccgtccttcttttgtggtaaaataaaggcagtgcaaaggaaaaggatgtgaaaccatgagtgtgcagtttattagaggaaccgccgtggcagacttagaagcgccacttatacaggcgacaaaacaatggctagaggaagacgcacagcatgaagtattctatttagtcccgaaccatattaagtttgagcaagaaattcaagtcttgcaaaagttacgtcaattacagacaactacgtctgattcaataaccagtacccgtctgcaggtttttagtttttatcgtttggcttggtactatttacaacatacacctttttactcggcagatgttttatctgatgcaggtgctgcgatgatttttcgcaaaattttagtagaagcagaagaagagttacaaatttttagaggtgaaattaacaagcctggctttattcagcaactatttcagctttatcaagaaatgcgcgaaggcaatattgagattgcggagctttatccatttttagaaaaacaaacggagaaccctaaaggacaagatttacaacttaagtttcaagatttaacgttaatttttacgcgattccaattgcaaatgagtcagtatggctatgaatcagcggagattattcaacatttaagcgagtatttacaaacggttgatttgtcgaatgttcaattcgttatttcaggctatcagcagtttactgccagagaattaaagttgattgaagtgctaatggcgcaagcaggttctgtgaaagtagcccttttattggacaaacaatatccgcatgacttacctgatccgcggtcgttattttatgaagcgggacaaacctatcatcagctttatcaactagcaagacagaagcaaatcccgattctttcagattatgtggaaaagaaagaggtattaattacaaatccagatttgcaaggattaaacgattattggattcaatcgcaagaacacctgcctccattaagcacagctgactggaggggcgatggcttatttctgtggcgtgctgaaaacgttaaagaagaattaacacatgttgcaaccgaaattcgccgtttagtggtggaagaagggtatcggtacaaagaaattcaggtgttgactcgtgatttagattgttatgaaaatttattagaaccgatttttgcggaacacgagattcctgtttatgtcgaccgagatatggctatggatcggcatcctttagtcgaatggattgaatctttatttgctattcattcgtacaattatcgttatcgcgatgtgctccgttttttgagaacggaattatttatgccaatgaatcaactcgctacttctgaagaaagcttgactgattggttaaaccaacggaacgcttggcgcagaaaagttgatattaccgaaaatgtagtcctggcatacggctatgaaggttattattggtcacaagaaaaagattgggaatttattcggtatgattttgaagcggaagagcaagaagatgtcgctacgatggaagaagagtcaaatgcgattcgtcaatcgcttcaacggctgttacctagttactttcaagcaatgataagtgccaaaactggtttggaagcagcgaccgtcttctatcactttttactgcaaagtggtgtggcaacacaattaaaaatgtggcgcttacaagctatcgaagcaggtcaactagaaacagctcgtaaccatgaacagacttgggatgcattgatgtcattactagatgaatacgtcactgtttacggagaaagttcgtttgattttacaacgtttcaagaaatatttgttagtggtttggaaggtttgcactatagtaaagtgccgacagcgattgaccaagtacaagttcgcgcaatggatttaactcgacctggcgctgccaaggttacttttgctattgggatgacggaagaaatttttccacaaaagattgaaaataaaacactattgtctgatgaagaacggcagacaatcaatgatactttaacggaaaaccaatatttacgtgggacaaccggacgcaaaattgcgcaagaaccttatgttgcgtatcttgtcttttcttcagcgcgagaacggttatatttaacctatccaagtgttaaagataccgctcaagaagtcaaaccgtctccttattttaaaaatatccaaaaagatttaaacttgcccgtttttgaaaaaaatgaaacaaccattttcgatgatgaaacgaccagtttagcccatattagtacgtatcggacgttaatcggtgaattaacgcgtttgaaaagacaacggaaagaaacacaagaaggactgttgcctttctggttaaatatggaaaaagcgctaatgaaccaatcaattgcgccgctagccaagcaagttttcgaaagtttaacgcatcaaaatattcctgaaaagattgatgaggtcttagcagaacctttatatggtaaagatatttatacgtccgtttctcggatggagagtttttatcgctgtcagtatcaatacttttctcgctatggcttacgtttgaaagaaagagatgtctttgggctttcgccagcagctacaggggaattttttcatgaagcattggatcagttctttaaattattgattatgaatcaacggaacttatctgaattaaccgatcaggaagtcaatttattggcggaggaagtactaaatagtattttaggggatgcgcgtttttctgtattaacgacctctagtcgcatgaactatattcgctatcaattgagtcaaacaattaaaaaagtcagttgggcgctgaaacgtcaaagccaacgaagtgscatgacgactgttcaaacggaagtgttatttggccaaattgccgctaaaaaaggaatttctggtttggaattaccattaaaaaatcaagggaagattcatgttcggggaaaaatcgaccggattgatcaattggttacccccgaatcaacctatttaggtgtgattgattataaatcgagtcaccgtaaatttaatatgacagaagcgtattacggcttagccatgcaaatgctgacgtacttggatgtggctttaatggatgctgtgcaattagttggtcaagaagctaaacctgctggctcactttatctgcatgtacacaatcctacattatcttatgaaggcaaagacgacattgaacaacaaatgcttaaaaaatatcagtttgatggtcttttgatgaaagacccagatttattggatcatttagatacgagtctgcaagctaaacaaagttcgttgctgtttccgattgaagaatccgccaaagaacaaattaaacctggtcgtcgccaagaagataaatttgtgacagaaccagaattaggcgcgttgctttcccataaccgaaataaatttattgaagcggggaatcaaattattggcggcgaagttcaacttaatcccgcttatcaaggcaaggaacggattgcttgtcgctattgtccgtttcgaagtgtctgtgattttgatgtgatgctaaaagaaaataattatcatcgtattgagaatttatccaaagaggaaattatggcgcgcttgttaaacaaagatgaggaaggagcaaccgaagatgagtaaaacaattccactacgtccagccaatgagcaattcaccgacagtcaatggcaagcggtgtttgatggcgatgaaaatatcttagtttctgcttcggctggctcaggaaaaaccaccgttttagtccgccgtgtcattgaaaaagtcaaaagcggcgtcgatatcgatcgtctcttgattgtgacgtacactgaagccgccgcccgtgagatgaaagaacgtatccaagtggctttacaaaaggcaatgaatgaagaacaagatccagaaagaagacggcatttttctcgtcaaattgctcttttgccaacagccaatatcagcacgttacatgccttttgtttaactgttattcgtcgtttttattatttaattgacatagatccagtttttcggatgttaacagatgaaacagaaacattgttattaaaagaagatgtttgggatgcattacgtgaacaattttatgcggaaaatcaagaagcgttttaccaattaacagcgaatttttccaatgaccgtagtgatgacggactcactaacttaattttttctttttatgaatttgccaaagccaatcctgatccagaggcgtggattaatggcttaacacaagcctacgaagtaggggatcagctaggcgaatcaaagttatttcagacgtatttaaaaccgctagccgttgagacgttacaacgaactcttcagcgttacgaagaaatggtgaccttaacagagggcgaagagaaacttcaaaagatttggtatttagctcmaaatgaaaaggaacaaacaaaacaatttttacaatttttagagagaaatgatttagagagcgcctataatttgactgaattgttgagctttgaccgctacccaacggttcgtgccgaagagttgaaaccaaccgcggaacaagccaaacagttacgagaacaaaataaaaaagcgttaaatgatttgaaaaagcaactgtttacactttccccagatgccatgaaacaagtcttgaaagaggccacgcccattgttcaagaaatggctcacgtggggaaacaatttatggaggcctatggcgcagaaaaacggcttaaaaatttagtggattttaacgatttagaacattatacgttagctattttagcgaaaaatcaggcagatggctggcatgcatcagaagcctcggtttactatcgcgaaaaatttgatgaagtgttagtcgatgaataccaggatatcaatcaattacaagaatctattttgtattggttgcgccgtccgcttagcacagaaggaaacctttttatggtaggagatgtgaaacagtctatttattctttccgcttggcagatcctacattgtttattgaaaaatacaatcagtatgggcaaggcaaagagggcaaacgaattattctagctgaaaattttcgttctcgcaaagacgttttagactttacgaatttagtatttagtcaattaatggatgagcgagtgggccaaattgcttacgatgagtcagctgctttggttcatggttttgatcaattttcggaggcggctgattattcaactgaattgctaatttatgaaaaaaaagcaacagaatcagttgaatttccagaattacaatcccctgagttgttgattgaagataagacagaaggggaactttacgttactgctttgaaaattcgtgaattaattgaccaaaatttcttaatttatgataaaaagctgaaaacggatcgaccgattacttatcaagatattgtcttattaacgcctacgaagaaaaataatttaactattttagatgtttttaaatcattagaaattccagttcaagtcaatgatgctcaaaattatttccaagcaacggaaattcgtacaatgattgccttgcttcaattgattgataatccttatcaagacattcctttggcagctgtgttacgttcaccaattgttggattaaaagaaaacgaattagtgcttattcgtttggctaataaggaaaccagttactacgaagcatttttaacgtttaatcaaaagatggaaccaaccatggaggaagcagttgttcaggaaaaaactatacgttttgctgaatcattagaaaaatggcgggaacaggctcgacgcaaccagattagcaacttgctgtggacgatttatcgggaaacggcctatcttgattatgttggcgggttgcctgttggcaaacaacgccaagccaatttatatgcgttggtcgatcgggccgcggcgtatgaaaaaacaaccttccgcggattatttcaatttgttcgcttcatcgaaaaaatgcaagaaaaagacaaagatttagcagaaccagtcgttttaagtgaagagaatgccgtacgcgtcatgacgattcacgctagtaaagggttagaatttccggtggtattcgttttagatatgaccaaagaatttaatgtcagtgatttgaatgaacgctatatctttgaagaaaatttaggggtaggcattcgttatttacaacctgaagaacgagttatgtacgatactttaccatttttggcgattaaacaagtacgattaagaaaattactatccgaagaaatgcggaagttatatgtggcgttgacacgtgcagaacagaaactttttctggtaggctcctataaagaccaagcggcgatgtggaaagagtggctgaaagttggcgatgtagaaacactggtgctaccagctgaaaatcgcttgcaaagtaaaagtagtttaatgaattgggttgggatgacattggtacgtcatcaaaaagccgatgaatatcagcaagaagtagtagtaagtaacgttccgcaagtcaaaaagcacccagctaattttcatattcagtggttcaacgaagaacaactacgagcagccattcagcaattacaattgccagaaagacaagcagaggatttagccgaaaaagcgcaattatctgctgacaaaatcaatcgtggccttgcacggttaagtttcaattatccgtttgaagtggctactcggaccaccagttatcagtctgtttctgaaatcaagcgagtatttgatgaccccgataacaaagaaattggtaaaattgaggttcgggaagacaatactattcaagcgcaaccgttgattgtcaatcgaatgattgaaggagatttaagtaagcctaaatttttagatacggttcaagcgccctcagcagctgaaattgggacagcaacccattatttattacaactaattgatttaagtaagcaaccttcttacgaggaagtgcgagctgttcaagaacgcttagtggaaaataaattgattttaccagcaattgctgaaaaaatgaatctggaacaaatcgtggccttctttgacaccgccttaggaaaacaattgattcaacaccatcaaaccgttagaagggaacaacctttttctatgctgattgaagcagaagagctcattcaaaattatccagaaacgacacaagatgatttattaattcatgggattattgatggctatatcgaattagacaatcaatgcattttgtatgactataaaaccgatcatgtaaaaggcacctctccccaagcaatttctgaaattgtcgaacggtatcgcggacagatgaatctttatcgtagagcgctacaagaggcaacgcataaagaggtgtcgcacgtctatttaattttattaaatggaggagtaattattgacatgcagacmggaaatgttgtagattttataaagtagaaaaaattagaagcagaaacacttacattttgtaaggaatgtgctatactcattgaagaggtgaggaagatggaaaaagtaaaaacagaatcgtttgtactttgtsccgaaatttgaaaaatcattttcaatacttggtaaaaaatggaatggtttaattattgatgttttattagaacgaggtcctcaacgttttggcgaattaaaagaaraaattccaatgttaagtgatcgtgtcttagtagagcgattgaaggaactagaagctgaaggaattatcaccaaagctgttcgttgcggtgaaggaaatcgctttggantatttcctgaccgaaaaaggcgaagacttgcaattagcaatggaacaaattcaacattgggcagaaaaatgggtaaaagacgaagaatgcagttgaccgcaagcaaaacttcttgtaaactaaacgtaattaaataactaaaaaaacagtgatggaaacaagtagtttgaattgacgtgttttagggagagtcagccagagactggaagctgatttacacagtcaccaagcgaaattcacttcctgagtttgtttgttttcaagaagaaagcaaaccggtaattgccgttaaatgaaatgagtgcatgacaacaatttgttatgaattaggatggtaacacgatagctcgttcctttgaaaggaatgggttatcgttttttttttagtttaaataaaagatagaggggaacgcataatgacattacaagcgcaattagaagctcttagagacaatacgctcaaagaaatcgcacaagttgctactttaaaagaattaaaccaaattcgcgtagaaacattagggaaaaaagggccaatcaccgaagtttaagaggcatgaaaaacctttcaccagaagaacgaccggtggtggggggctttgcaaatgaaattcgtgatttattaacagaagcaattgaagcgcgcaaagttgttttagaaaacgaagcgttaaatgcggcactaaaagaagaaagtttagatgtaactttacctgggaaacaaatgcctcaaggcacacgtcatattttgacacaagttatggaagagattgaagatattttcttaggcatgggttatcaagtagtggaaggatacgaatagaatccgatcattataatttcgaacgcatgaatctaccaaaagatcatccggcacgcgacatgcaagatacgttttatatttcagatgagatgttaattcgtacgcatacttcaccagttcaagctcgaacaatggaaaaacacgatttttcmaaaggkgcattacgaatgatttctcctgggaaagtattccgtcgtgatacagatgatgcgacacatagtcaccaattccatcagattgaaggccttgttgtcgataaaaatgtcacaatgggtgatttaaaagggacgttagaagtcatgatgaaaaaaatgtttggtgaagatcgtaaaattcgtttacgtcctagctatttcccytttacagaaccttcagtcgaagtagatgttagctgttttaaatgtggcggcgcaggttgtaacgtctgcaaacatacaggttggattgaaattttaggtgcggggatggttcatccagatgtgttacaaatgtcagggattgatccaacagagtactcaggctttgcctttggcttaggaccagatcgcgttgctatgttacgttacggtgtaaatgatatccgtaatttttatcaaaatgatttacgtttcttaaatcaattcaaggtaaaggagtagttgaaaaatgttagtttcttataaatggttaaatgaatatgttaatctttcaaacgttactccgcaagaattagcggacaaaatgtctgtgacaggtatcgaagttgagggcgttgctgtacctgaagaaggattaaagaaaattgttgtcggcgaagtaaaagaatgtgttcctcatccaaactctgaccacttatcaatttgccaagtagacatcggtgaagaagaattgtcacaaattgtttgtggagcaccaaatgtaaaagccggaattaaagtcatcgtagcattacctggttcaagaattgcaggaaatcaaaaaattaaaaaaggtaaaatgcgtggcgaagtctctaacggaatgatttgttcgttagaagagctaggatattcagataatgtcgtaccaaaagcctatgctgaagggatttattatttacctcaagaagcagtgaatgggacacctgttttcccttatttagacatggatgatgcgattattgaattatcaattacaccaaaccgtgcagatgcactaagtatgagaggggtagcctatgaagttggcgcaatttatcgtcaaacacctcagtttaatgatcccgaactcaaagaagatgcttcagataacgtggaaaattacgtaacagtgactgttgaagattcacaagatgcgccagcgtatcaaattcgtgttattaaagatgtgacgattgcagaaagtcctcagtggttgcaaaaccgattgatgaatgaaggaatccgtccgattaacaatgtggtggacgtgacaaattatattttattattatttggtcaaccattgcatgcatttgattaccaaaaattagatagcaaagaaatcttggttcgtcgagcaacagcaacagaagaactaattacattagatggtgaaacacgtcaattaacagaagaaaatatcgtcattacgaatggaaaaacgcctgtcggcttagccggagtaatgggtggggctaattctgaaatcagtcaagaaacaacaactgtggctttagaagcggcattgttcaatccattgtctattcgcaaaacgtctaaacaattcaatttacggagtgaatcttcaagtagatttgaaaaaggcatcaaccaagcgacagttgggctagcttgtgatgtggcagccgcgatgattgcagagttagccaacggaacagtggtctcaggcactgcagttggttctgaagtggccgttaaagaagcgcaggtagctgtgactttagagcgaatcaaccaatatttaggcactgcattagatgaagcaacggtgaatgaaatttttgaagcactcggttttgcttatgaagtaaatcaaggcgcatatgaaattacgattccaccaagacgttgggatattgcgattgaagcagatattattgaagaagtggcgcgcatttatggatatgatcatttaccttcaacattgccaagtggagaaacagttgctggaagtctaaccaaagcacaacatgttacgcgccaattaaagagcttactggaaggtcatggtacgagtgaagccatcagctatgcgttgacaacagaagaaaaatcccgtcaatttatgatgaaagaaagtcaaacaacacgtttgcaatggccaatgagtgaagagcgttctgtgttacgtatgaacttaatttctggtttattagatgatgtcgcatacaatgtggcacgtaaaaataataatatcgccttctacgaagtaggacgcgttttctaccaaacagaagatccaacaaaaaatttacctacagaagaaaatcacttagcacttgctttaactggtaatacaatggttaaagattggcaaacaaaagcaacagccgttgatttttatacagtaaaaggcttagtggaaagtattgtagctgttttaggattaacagaaaaaatcagttatcaagcgacaacggcgattccagaaatgcatccaggccggacagcatggatttatttagaaggtgaagtggttggttttgtcggacaagttcacccaacgacagcgaaagcgtacgatattccagaaacatatgttgctgaattaaacttgcaacaattagtagccatagaagcaggcggggttacttatgaagcagtttctaaattcccagcagtttctcgagacattgctttattagtcgatgaaacagttaccaatcaagaactagttaaaactatttcagataacgcaggtaaatatttgaaagagattcatttatttgatgtatatcaaggtgaaaaactaggcgctggcaaaaaatcaatggcgtatagtttaactttcgttaatgcagaagcgacattagtggatgaagaaattaaccgttcaatggaaaaagttgaaaaagcgctaattgaaaaacatcaagtagaagtaagataaaataaaaacaggaaagtggggcataagtcgaaatgacttatgccccactttctaaatcttaagataatcagctgaacaaaagcagctccaagaaataagccgaaattctccaaaaattaaagaacaattttcggaaattccttcttatttcttggagctaaacacttttgtctcagcctcctatttttaactacattaataacttttcgcccaatttcgtgaaagccaacgtgaaaattgtgagatactaaagttaataatgaaataaattagggcgacgattccgtaaatagtgaatacttgtcctgtttgtgcgtagcgccccattaagatataagatttgccaaagagttcttgcaaagcaatcacggaatacaagaaacttgtatccttgatgacagtaacaaactgagaaacaattgctggtaagacattgcgaatggcttgaggcaaaacaatatgataaagaatttgccaatttgaaaaaccttgagaacgtgccgcttcaatttggcctttgtcgaccccatttaaaccaccacgaataatttccgctaaagcagcggtggtaaacacagtaaaactcacaattccagcaggtgtggatttgattttgaaaatcaaaaaaataacataaatccacaataagtttggaatattacgcaccacttctacataaatactggcaagtaacttcagtggtccatgggtttgatttcgcaaaacggctagaatggtgccaaaaatcgtactcaaaataattgagacgaaggaaatatagagcgtcaattttaagccgttaaatagaaattgaaaattatttgctgtcagtaattgacgcatttcttctgaaaaaggcatctgttttcctcctatctgctatatgctttcttatttttttcttccatttttctagccaaattcgctaatgggaagcaaagaatgaaatataagaaaccagcaagcgcaaaggcgggaatatagttcaagttgacagacgaccaactattggcagcaaacattacgtcagcgccagaaataatggcaactgttgacgtatttttaattaggttcactacttgattggttaaaggcggtaacataatccgccatgcttgtggtaaaatcacataccgcatcgtttgaccgtacgttaatccttgggagtaagccgcttcaaattgccctcttgggacagctccgattcctgagcgaaccacttcagaaatgtaggcgccatgatagaggcctacacacagaatggcaatcgtagtaatagaaaatgaaagcagcgggcttagcagaggaaagccataatagactacgataaattgaatcaacaaaggtgtgttttgaaaaaattctacatagacacgactaattgcgtgtaaaagtttacttttggtcgctgataaactgccaaagaaaatgcctaaagcaaaggcaactaagatcgctcctaaagaaagcagaatagtatagagaaatgcctgaccaaaaattcgccaatcttgaaataaagcctcccaacgatataaggcaaatggcccttcttcaagccaggaaatattggctaacaaaaacataaaaatccctcctaaaatttttgattcttcaagtcttaggaatgattaattttttaagccccagtcttgataaattttttctagtgtgccgtctttttcccatttttcaattaaaccatttagataatcatttaattcagtatttgctttctttgtggtaattccatattcttgtggcgaaaaaccatcttttaaaatttctgtcttgccatccacatagccagataggattgatttatccactgaaaatgcatcaattcgtttagaagttaacgctgtttttaattctggataggaacctaattcttgataagtaaatttgattccttcctcttgcgcttttttctctaagttttcttttgtcgtagcagattgtgcaacgccgattgtttttccgtctaaatctttcatgctggagaagttatcctctttgcgcacaaggaaaccaatctcatctgtataataaggagttgtaaaattataagtctttttacgttcatcagtaattgtaaatgtagcaattaccatatctagttcaccattgtctaaaaggggaccgcgcgttttcgctgtcacgcccacaaattccacattctcttcgctgccggtaatttctttcgcaatcaagcgtgcaatatctggttccattccttcatttttgtntgatcaggattcatatagccaaaattaggaatgcttctttgacacctacttnaatntnccctgctttttttaat

SEQ ID NO: 58 - DNA, 7254 bp; double-stranded, linear
aaaaattacgtgattcgcttagcctgaccagacttttgtctaagtcttaaaacttgataagtaataagaggtcgggacagaagtgcttaactccgagaacaaagtaggtactgttcaacatctatttgctttgcaaatagtgtttctcagcaataagaagaaatttccgaaaattgtcataaaacacaacgaggaacgagttgatgttgcatgatacactacactccgtttcgttcgcatcaatttctaagcatggaacatgctagaattgaaggacccggtgttctttaatttttggagaccaagtccttcaattcttagtgatttatcacttagagattgatgagatcggagctctgcgaagtaggtattgttcatcatcgaatcactacgttcttcgtgattctcaacaatttcggcttatttccgaaggaccttcaccaagtaggtacgatgatttcatctgttcatgcttcacagtgaaacatcgcaactcttagagctgtagctcttttgaaggctgtactgtgacgagacgcatgtcgagaaaacaccttagaagttgttgagatcggagcaacgcgtagtgttgcttctgtccccgccgtttatcaatttttaagcctggaacaaaaatccaaagtgatttttgttccaggctcttactttcatactaatcttaggtcaggttgtcatcaagtttgccaataatagacttttacaagcgcgccttttttgagtagtacaccagctggttgttctagcaggcaatttgtttctaaagtatttgataaattggatgaaagatgactttttgtcactaaatttactgtgccatctatttctttcgctcggtaaaatcgacgtagtctactaggggttaattcatgcgctaaaattactgttcgttccttgagatttaactcgacacaattaaaaaaagtagctaataatgtccagtaaaaaagatgtaaattaaccattgccgcaaacggattgcctgaaacgcttaaaatgagtgtttcttgaaattgacttcccataactggggttccaggtttcatatttacaaaatgaaacaactctgttcctccgatacgtttaattgctaaaggtaaattgtccttttcacctaccgaaacaccaccacaagtaattaatacatcaagttttggtgaaatctcaatcagcctcttcgctaattcttcagggtcatctgaacaatggtctaggtggattacttcattaccactcgctttgacaaaagctgctaacatgtagagattactattataaattttcccaactgacagtggttcttccaaagaaactaactcactaccggtcgctaaaatccccaccttcatgcgcttcaaaacaacaactttatcaatcccttgcattgccaacaaaccaatcatgcgactattaatctgttgatgttttgctaaaattttttgctgaaaagcaatatcttctccaatttccgcatagttttggcccgcagtgacagagcgaaaaattttaacatggtcttgcccaaaatccgtccattcttgtggcactacagcatcaaaatcggttggaataaaagcacctgttgttattttaatcgcacagttattcgtctgattacaataaaacatggaatcccctgccactaaagaaccgacgacttttaaacaacttgggctttcagcagtcgcacctcgtgtttctactgcacgaacggcatacccatccatcccggcacgaggaaaatgaggaatcgctgtctctgcaaaaatggtttctccgctaatccgtcccaaggaatcaagcagcgccacttcttctgtttcacattgactcttcatatgttgggtcattttctctcgtgcttcttccaactcgatcatgttttaaccatccttttttatttattcactggtttaatcgcaacggcacaaactttatattcaggaattgtggcgatatcatcaaatacagcattggtgatttcgttaacattcccatctggaaagtggaatgtcataaagacttcttgcggaaatactcgatttccgacagccgcataggtttcgattttgccacgtcgagaatgaacttcaactttgtcaccttcttggattcccagagcttgtgcatcgactgcatttatctcaatataagagtgattcgctatttggttaatcccttccgttcgtcctgtcattgctcgggtattgtaatggtaaagcattcggcctgtcgacattaaatacgggtactcttcatctggtaattcttgtgcttgcttatacggaattgctttaaataaacctttcccacgagcaaaactacccacatgcataatcggcgtacctggatctgtcaagctccgacaaggccattgtaagctctccttctctaatcgttcataattaattccaccaaacgaaggcgtcacagctgaaatttcttccataatttcttttgcagattcatacgcacaaggatagcccattcgtgtcatgacttcacaaaaaatttcatagtcttctcgcgcttgtcctcttggttcaacagctttacggactctttgcacgcgccgttctgtatttgtaaatgtcccgtctttttctgcataactgatgcctggtaaaacgacatctgcataagcagccgtttcggtcataaataattcttgaacaactaaaaagtcntaaactttctaaagcttgacgaacatgtcctgtgtctggatccgtaacaattggatcttctccaaaaatataaaggcctttgacgcttcctgccgttgctgctggtaagactttagtagaagttaaacctgtgtttcgatttaacggcacatgccaagctttttcaaatttgtcgatcacttctggattattgactttttgatagcctgggaaatcataaggcatacagcccatatcgcaagcaccttgaacattattttgacctcgcaaaggattgacaccacagcctggttttccaactttaccaaccaacattgccaaattagacatactcataacaccctcagttcctgtcgaatgttccgttacacctaaacaataaatgattggtgctttctctgcttttgcatacatgcgtgctgcttgaattaaatcttctggatgaatatgacaaatttctgcgactttttccggcgtataatcagccaccattttttctaaatctaaaaatccttctgtccgttcttcaataaaatggcgatctgctaaaccttctttcaaaatcacatgcatcatgccattagcaaatgcgacattcgttcccgcctgaacttgtaaatgcagcgcactatccttcactaagttaattttccgcggatcaacaacaacaacttgcgttcctctttggatggcttggcgaatttgcgcaccaataactggatgagcttcttctggattggaacctactaataaaatcatgtcgacatcttcagtgatatcagcaataggattagtcatcgcaccagagcctaaggtttgggctaaaccatggaccgaagccgaatgacaaacacgggcacagttatcaacattattggtaccaaaagcagcacgcaccattttttgaaagacataattatcttcatttgtcgctctagagcacgaaaaaccagcaagagcatccggaccgttttctgctttaatttcgttaaattttgacgaaacaagcgttaaggctcttcccaagaagcaggttcaaaaatgccattccgttaattaatggctccgttaagcgatctcctgacccaacaaatttatatgaagcaaattttcctttcacacaaagtaaatttttattagctggtccatccaggggttcaacacccaccaaacgattatttttaacgagtaaattcatctgacagcctgtcccacaatgcggacaagttgtaggaattttctgggtttcccatttgcggtactctktcgtatcttttgctgttaacgcacctgtaggacaggaagagacacaattgccacatgattcacagatagattgatcaaacgcctgcccataactcggcatcatttttgtttcaaagccacgattagcaatactaagtacatctcttccctgccgcaattgacagacacgggcacaacgacgacacatgatacacttttctggatcataagagaaaaatggattactggtatcttcttgatggcaaggcattctttttccctcggtaaagctagtgacatcaatcccataatctagcgcatactgttgtaattgacaatccccgttttttccacaagaaaaacattctaatttatgattactcaataataaatcaagaataaaacgtctggaatcagcaactttttcagaatgtgttgccacaaccatgtcctcttgacaatgtgccgtacaagcagttgttaagccaccacgtcggccaccttccacctcaaccacgcacatccgacaagaaccatcaggtgctaattcctttaaatgacagagcgttgggatttcaacacctagccctttcgctgcttcgagaatggtagtccctttaggcacagttacttcttggttatcaatagacaacgtaactgtttgcgtatgcaactttgttttcatttttaccaacctcctttgctggtggcatagatttctgtttcagcagtcgtttcaaattcttctggaaacaaagccaatgcactcttcattggatttgcgacggattggcccaaaccacaagctgataatcgcgtgacatgtgtgagcatcttttccaatcgcggcaaatcactagctggttgcctcgttccgatkgaatttactcaataattccaaaatcctagttgttcccaatcgacaaggggtgcatttaccacaggactcatgagcaaaaaaggccgccacgtgtactaaatagtccacaacattaactgaatcatccattactacaattgcaccagagccgacagataagtcatgggcccataaatcttcgtaggaatacaaacaatcccttaacgttgcgacagcaccaattggaccggattgtccaccgaagtgaataaatttcaatgctcgaccagttgcagagcctccgccgtattgctcgccataaattatttcttctaatggtgttccaaggttgacctcgtataagccccgatttttaatatgtccagacaaacaaattagctttgttccgccaccatcggcagtacccatctctaaaaaggcttgtccaccttctcttaaaattacaggaacacttgcaaatgattcaacattatttactaatgttggttgcaaatataaaccaacatctgctaagtgtggtggtttgacacgcggccgccccgtttttccttcaattgaatttaaaagtgctgaattttccccacaaatataggcgccagcaccagaaataatcgtaatatcataattgaatccttcaattcctaaaatgttttcccctaaaaagccagcttgtcgtgcattatcgagtgcttcttgaaatgttttttggattctgcgatattctcctcgcatataaatataacctgcttttgctgaaaataaatagccagcaataatcattccttcaatcacactcaatggatcttcagataaaagtactttatccttaaaggtccctggttcgccttcatcagcattacaaacaatgtactttgtggttccttttgcatgataaagatggcgccatttttttcctaaaggataggctgctccaccgsgacctcttaagtgcgcaatatccagttcgtttaaaatttcttcatccgatagtgaaattgctctttttaaaccatcaaatccatcgtatttacaatattcagcaacatcggtcgcagattgcattttccccattctctctaataacattggttggtttctcttaagcattgactcacctcytacagtccttcatagcaatcattttgtaaatgttgaawtaattgataaattttctcttctgttagttgactaaaaacggtgtccttaattttaattactggacctaaatcacaagccccgatacaaggaatactatgatacataaataagccatctggtgtcggctgattctctggcacttctaaaatggtttctaaaacttcggcaaccatcgccccaccagtataatgacacggtgtgctgttacaaatcttcaagacatacttcgcttgcggttccgtctttaaaatggcataaaaactgacgatttcatagactcgcgcttccgttaaatgtagatgctctgcaactaattgagctgtctcctgatcgatatacccttcctctgaagcaaattgtaattcaattaaaatatttaaaattcgttgtggatcagcatcgttttctagaataatcgcttctttttcaattaagcttaatgcacacattcctttttattccccctttttagtgaaacttgaagttgttctccttgataatagatacgcaatttttttggtatttcagcagatagtaaacaaaaatcggctttatctatgactttttttgctgattctttttggcgattctggttattcatcataagaaatagtcctggctgcacaacattacgtaatgaatttgattcacaaatgattaatgcttgggccggcacagctttcagaaattgctgaatggcttccgccaaattttcttgaaaaactttcaatagaaaaactttttgacaacctgcagctaataatttcatggtatctttattgccaatcgtctcttgctcttctactaattcataaccagctgtaatactggtacaaattccgcatccttttgtgcctcgttgacacacccctcgttgaccactaatcgtaataatcttcaagccataaattggatagacttcttggtactgtttaataagggcttcggctaatgtcgttttgccactattccgaccagtagaaccaatttgaatcatgtttggtatctcaattgccatagagctcctccgtctgaatcgttttctcaactcttggtttgacagttgctggttttgtcataaagatcaatggtacggccataaaaagactgccacctactgcattgcctaaaaatacccataatgtattctgcaaataatcccaccaactgattgtggtactttgtgaaaaaattgccgctggaataataaatgcattagcgaccacgtgttgaaacccacttggggattacaattcaaaatgagat

SEQ ID NO: 59 - DNA, 7296 bp; double-stranded, linear
ggggccaatttagaaaatkgacmattgaatagaaaaggatgtgaacaaatggcaaaagaaacaaatgttaagttagtcacggtgagtgtttttgtggcaacatttatgacagccattgaagggaccattgtgtctactgcgatgccaacgattgtcggctcgttacatggcatggaaattatgaactgggtattttcaatttatttattaacgaatgcgatgttaacaccgatttatgggaaacttgcggataaaattggtcgtaaacctgtcttcatgattggcattatcatttttattttgggctcctcgttgtgtggctttgctcaagatatgttgactttaattattgcccgcgcaattcaaggtgtgggggcaggcgcaattttaccagttgcgttaacgattattgccgatatgtatacattggacaagcgagcgaaaattttaggtttaaacagtgccgcctggggaattgctagtatttttggtccgttagcaggtggttttattgtagatacagtcggttggcattggattttcttcattaatgttcctattggacttgttttattgggcttgattagtattttcttagttgaaccaaagcgggaacggaccaagatgccaatggatattttgggcagcgttactttgatggtagtgctgctaacgttattgctaggttttcaaatgattagcgataatggttttacattagtaacatttggttgtttaagtttgagtgtgctcttttttgtagcatttgtgatgatagaaaaacgcgcgcaagacccagtgattgatttgcatttatttaatcaaccaacgtttgttttagtaaatcttattgcagcgcttattagcggtttcttaatggggattgatgtctacattccgatgtggatgcaaggtgtcttaggaaaaagtgcaggaattggtggcttagttttagcgccctatgtcgttactttggatggctggatcatttatagcaagtagttttatggaaaaatatgctatgaaaaaagtcttaacgattgggttatcgattctattagtcggggccatctttttagtggtaatgccaatggccgttccgttttggcttttctttgtagtgtcttctgtcttaggagttggttttgggattactatcacaacgactacggtgacagcacaaagtacagtggagcctgaaaaaatgggggttgcaacatcgtttaatacgttggtgcgtacaattgggcagactgtgatggtgtcaatttttggtgtgattttaaatgcaggaatgtttgcgaaattggaagcgagcgcgttaaacgtcgatgcagatgtcatgaatcaattagtgaatccacatactgcaaattaattccagctgcgttgttaaaaccattacgcggtatcctctatgcaggtctgcataatgtttacttagtcggtgcgggcttagttgttgtcgctcytttgttaaatattttcgcaaaagcgcaacgagcgaaggtttagtggtacactaatagaaagagtattggagggaaaagtagatggcctttttacaagcaaatatttattcmaatgtattggaaatggaagtgaatgtgaacgtaattttaccacaagaaacggtaaaaaaagtgggcacaagtacccaagcagcattaacagatattcccgtgttgtatttattacatgggatgggagggaatcacagtgtctgggctcgcagaacctctattgagcggtatgtcgctgatttggggattgctgtcattatgccgtccacggatttagcttggtatacggacacacaatacgatatgaactattggacgtttatctcagaagaattaccgaaaatttgtcatcaactctttccacagttaagtacaaaacgagaaaaaacctttgccgctggtttgtcaatgggtggttatggcgccttgaaattaggattagcgaaaccagaatcttttgcagccgttgcttctttgtctggggcagtcagtttatcatccactagttttggggaattattaaaagtccgtaagcgaagctattgggaaggtatttttggcccgttagatcaaattgaaggttccattcacgatccgctgtatttattacaacaattagtagaaagccaaacagaaatgccccaattttacctttgttgtggggagcaagatatgttactttctgctaatcaacagatggctcaagcgttggaacaggcacaggcaagttacacttttgaaactggaccaggagaacatgactgggtgttctgggatgaatggattcaaaaagccttggcttggctaccaataccaaaatagagaaagtagttttcaatatttattttaaaagttaasscttggtccgtcagtcgaaatgactgacggaccaagggctttttttatttagatgaagatgtgttgtctgcttgcaacccatctaagtaggttttaacggcttgaataaaggcggatttttggtggatggagtgtcgaaattgaatgctttcctccatgtacgttaactcattgtcggatacatattgtttcatgtgcaacacttgttcttttaaatagtcatctccgttcaacacttgcgaaacgagctgtttttcctccgttgcgtccataatcatcccaaataaaagatgttgtaaagacgttactgctaaatgagtcatttctggtgaaaaacctgcttctcttaaaatgcccatcatttgattcaaatggcgtaatcgttggggataggcagggacggtttggatttcgatagctacggcacagggaaattgttgatagagatcataatagttttccatgaaggctagtaagtcagaataccattcaccacataatgcaggttcttgaaagtgctcttcaatcgcttcagccatactttgaagtaaggcttgcttatttttaaaataccmataaattgcgggcgcctgtacaccaagctgtttggcgactttacgcatagaaagttgttctaaagtgggacttttttctaacaaagaaaatgcggctgcaataatcgtgtcttttgataatttcggttccatgattttagctcctattaaacgttatcttcgtaagtttatcaaaaagaaggtacactttatgataggaaaaacttgtgaaaaattaacttgttcgcttgtattttaccactaaaaatggtaaattatgaatcggccttattttacagtgttaaattggtgaagtcaatgagcaaattgatttttttgtaatggggaagaattcgcagaccaacactgaagaagcagggaactattttaagaaagtagggataagatggaccttattattcaacacgccaaaaaatacaaaggctcggtagttattgccttgttggcggtgatcgtaatggttgtctcagcactttggcaaccaaaattgttacaacaagtgttggaagcaattatgaatgacgatagcgacaaaatgaaaaacttagggattcaattaattgccattgcaggattaggactcgttgcaggggttattaatacaattttttctgccaaagttgcccaaggtgtcagtgctgacattcgtgaagcaactttccgcaaaatccaaaccttttcatttggcaatatcgaaaaattttcagcaggtaacttagttgttcgtttaacaaatgacgttactcaaattcaaaatgtcattatgattgcgttgcagacactttttagaattccttttttatttatcgggagttttattttagcgatgctaaccttgccacaactatggtgggtgattgttgcacttgtcatcgcagttattttgatttctatgctgtccttttcgcaaatgggcaagcatttcatgattattcaaaacttgattgataagattaatggtattgcaaaagaaaatttgttaggcattcgtgtcgtcaaatcatttgttcaagaaaaaaatcaattgtcacgttttacaaaagtgagtgaagaattaaccacccataacttaatcgtaggtagcttatttgctgtgatgattccagcgtttatgttggtggcgaacttagctgttgtaggctcaattttctttgtgagtaacttagtcaaggacgatccaactttaatcggtggtgtcgcttcctttatgaactatttaatgcaaatcatgatggcgattattatcggcggaatgatgatgatgatgacttctcgtgccgctgtttccattaagcggattaaagaagtgatggaaacagaaccagatgttacctacaaaaaagtcccagaacaagagttaattggtagtgttgagtttgaccacgtatctttccgttatcctggggatgaagaagataccttgaaagacatctctttctctattcagccaggtgaaatgattgggattgtgggcgcaactggcgctggtaaatctacattggcacaattaattccacgtttgtttgatccgacagaaggaaagattgaagttggtggtgtcgatttacgagaagtgaacgaacacagtttacgaaaaacagtttcctttgtgttgcaaaaagcaatcctgttctctggaacgattgcgcaaaatctacgccatggtaaacgtgacgcttctgaagcggacatggaacgggcttcaggcatcgcccaagccaaggaatttattgaaaaattagcagaaggttatgatgcacccgtcgaagaacggagtaataacttttctggtggacaaaaacaacggttatcaattacaagaggtgtgattggtgaacctaaaattttgattttagatgatagcaccagcgcgttggatgctcgttcggagcggttagtccgagaagcgttggataaagagttaaaagagactaccacgatcgttattgcccaaaaaatttcttctgttgtccacgcagatcgtattttagtattggataatggacgtttagtcggggaaggcacgcatgaagaattagcagctacgaaccccgtgtatcaagaaatttacgaaactcaaaaaggaaaggaggaagcttaatgactgatttaataaaagctagtaaatttttctatcattatttgaaacgttacaaagtttcgttcctctttattttcttagcaattttcgcagcgacttatttacaagtcaaagcgccgcaattcgttggggaagctattcaggaattagcgaaatatgcggttaatgtgatgcaaggaaaagacgataaaagtgcgttcgtttctgtcatttggaaactactcattttttatgtcttaactagtgccgctagtttcatttatagtattctctttacacaagtcgtggggaaatcgacgaaccgcatgcggattggtttgtttaacaaattagaaaaattgacgattcgtttctttgattctcatcaagatggtgaaattttaagtcgttttactagtgacttagacaacatccaaaatagcttaaaccaagcgttgctacaagtattaaccaatattgccttattggttggtgtcttaatcatgatgttccgtcaaaatgtggaactggcatgggccacaattgcttctacgccgattgcgattttaattgcggtctttgtgattagcaaggcgcgcaaatatgtcgatttacagcaagatgaagtgggtaaattaaatggctatatggatgaaaaaattagtgggcaacgtgtgattatcactaatggcttacaagaagaaaccattgacggctttttagagcaaaatgaaaaagttcgtgccgctacgtataaaggtcaagtgtattcaggattacttttcccaatgatgcaaggaatgtcattagtcaatacggcgattgttattttctttggtggttggttagcaatcaatggctctgttgatcgtgccgctgcgctaggtttagtcgttatgtttgtccaatattctcaacaatattatcaaccattaatgcaaatttcttcaggttatagcatgattcaattagctgttacaggcgctcgtcgtttaaatgagatgtttgatgaaccagatgaaattcgtcccgaaaatggcgaaaaattagaagagattaacaaagctgtggctttaaatcatgttgtttttggctataatccagaaacgcctgtgttgaaagatgtttctattcatgtggataaaggtgaaatggtcgctttagttggaccgacaggctcaggaaaaacaacgattatgaatttaatgaatcgcttttatgatgtgaatgaaggcgccgtgacgtttgatggtgtggacattcgtgaaatggatttagatagcttgcgttcacatgtaggcattgttttgcaagagtccgttctattttcaggaacaattcgtgagaatattgcttttggtaagccagaggcaacggatgaagaaattgttcaagcagcgaaacaagcgaatatccatgaatttattgtaaatcttgagcaaggctacgatactgagattacggaagagaataaccttttcagtacggggcaaaagcaattagtaagtattgcacgaacgattattaccaatccagaattattaattttggatgaagcaacaagtaatgttgatacagtaacagaagctaaaatccaaaaagcgatggacgaagcaattaaagggcgcaccagttttgtgattgcccatcgtttgaaaacgattctaaatgcggatcggattattgttttacgagacggtgaagtcattgaagaaggcaaccaccatgaactagttgaacaagatggattctatgcggaactttataaaatcaatttgtttttgaataagtcgaaaaagaagcaaaatgagtcattctcatttgcttctttttttgctatgctaaatagaaaaaggagaaatgtcaatggaaaaaatgaggaatatacggcaattacggcgcacgtttttgttgctaaatactttatttgtactgagtgtattcagagagaatcgatggacaaaatcggcactgctttttttggttgttggctaatagttttttatatggactgcagtagttgatttatcttgggggcgaaaaaggctggctgatacatttgaagcggtggtattattgcgcggttcttctccaaatagcaggcacattgattgtatatttttcgttttttgtataaaggtctctcgtttcttgccggagaatatgctaaaataaaaagcagcagggggcgagaaaaccatggaaaagccnaatnaacgccnagctggatttagaacgtacacgggccaattaattttaa

SEQ ID NO: 60 - DNA, 9927 bp; double-stranded, linear
gattaaatgtccttgcctctgtttttgaaaatcctaaatcaagcctttcacacctatatcttttcggtagtacattccaggaaatgagtaattatccaatgtttgataaacttttttgcgggcttcttcaagagtcgaagcagttgcttctgctaaaaagattcgtccgccagccgaaaccagagcctgttctgaacgagttacccctgcataatagatggttgcaccagacatttctggcaatggtagatttgtcttatattgattaggatagccttctgctgctacaacaacaccaacactcgctaactcattccatgcaatcgttggttgctctttcaccagcaatgaagaaattatttctgaaaggggactctctaaacgtgccaacacaacttgtgtttctggatccccaaatcgagcattaaattcaataaccttggggccagttgctgtttggattaaaccagcatataaaatcccttgaaacggacgtttttcagccaccattcctttagcagtcggtttcaggacttggctaatggcttgctgaaccgcttcttctgggacctgaggcactggtgtataagcgcccatcccccctgtattcggaccagcatccccatcgaaaatccgcttatgatcttgagcaatcaccatcggatataccttctcattagaaacaaaagccattaaggaaaattcttctccttgcaaaaattcttcgattacaaccgtttgaccgcttgctccaaattgttggtcctccatcatcgcaactagcgcccgttttgcggctgcttttgtttcggcaactactactccttttccagctgccaaaccatctgccttaataacaattggtactccttgctgttcaatatattctaaggcaggtgccaaacgtcgaaagacccgatattccgccgttggaatctggtatttttgcataaaatctttcgcaaaactttttgaaccttcaattattgcagctgctttcgtcgggccaaaaatcagtaatcccgctgcttgaaaggcatctacaattccttcaattaatggcgtttccggtccgacgaatgtccaatcaatctgattatccttcgcaaattgaattagttccgtttgctgctcttcaccgataggtacagtccgaatattatcaccactcataccaggattacctggtgcacaataaacagtcttgactttgtcttcttgctgtaattttttggcgattgcatgttcacgaccaccacgcccaatcactaatatattcatcggtttctcctttaaaaattaatgtttgaaatgacgagtcccagtaaaaatcatcgcaataccataatgattcgctagatcgattgatgcttggtctttaatgctcccgcctggctgaataattgcttgaatgccatgttgtgcagcatattccacgctatctgccatggggaaaaaggcatcacttgctaagacggccccttgtaattttccagctgcttgggcttgatcaactgcaatttttactgaaccaattcgattcatttgaccagcgccaatccccaccgtttggctttcattggctaaaacaatagcgtttgattttacatgcttgactgctttccaagcaaagttcaatgcgtctctttcggctggtgtgggttggcgctctgtaacaacttgccatgcttggtcattttcaacaactgtatcctgttcttgaattaataacccgcccataacagaaactaattccaccgcttttttttcttgagcatgaaaatctaacgttaacaaacgaagattctttttctgagataacagtgccaaagcttcttcctcaaaactaggcgcaataattatctctaaaaagatttgatgcatttcagccgcagtcgcttggtccactggacgattcaaaacaacaatgccaccaaaaattgaaactggatctgcttcaaatgcctgacgataggctgccaaaatcgtttttcctgttccaattccacatgggttcatatgtttaacagcgacgaccgtaggttctgtaaactcgctagcaatccggagtgctgcatcagcatctcgaatattgttatatgacagttctttgccatgaagttgtcgagcggaagcaatggataatgatacaggtacaacggattgataaaaggtggcttgttgatggctattttcgccataacgcaatgtttgcttacgttcataagtaagcgtctgtttctctggttcagtttcacccacttgcgtcgttaaatagtcagcgataagcgcgtcataagcagcggtatgacgaaagacttttgctgctaatctttttctagtggctaactggctagttccagtgctgctaatttcacttaatacctgttcataatcactaggatcaaccactgctgttacgtcttgataattttttgccgctgaacgtaacatgctaggaccgccaatatcaatcatttcaatcgcttctgcttcagagatcgctggttttaaaattgtttctttaaatggataaagattcactactacaaggtcaataaagtgaatgccttgttcagtcagtgctttttgatgcgcttggtttcccctttttgccaaaagtccgccatggatattcggatgtaacgttttgacacggccatctaacatttctggaaagccagtgatgtcgtcaatagcaagtgtcggtacccccgcttcttccaagacagtccttgttcccccagtggagataatttcaaagccatttgcaactaagcctgctgcaaatgttgtcactcctgttttgtctgaaacgctaatcaatgctcttttggtcatttcattgtctcctttacaatttgtgaaattatttttgggtaccattcgtgctcaagagcatgaattttctctgctaatgtgtccactgtatcttcggtatcaatcttggtggttgtttggaaaataatcggtcctgtatcaaccccagagtcaacataatggatagtgattcctgttattttcactccataatgaaatgcttcttcaattccgtgaagacctggaaaactaggtaacagagaaggatgaatattgacgattctctttggataagcctccagtaaagtcttgccgataattctcaaataaccagctaacacgattaaatcgatctgatgctcttttaaatgtttcaatacttgttcctcatattgcccacgagatgaaaaatcagatggcgaaaagcaaacaacgggaatcttgcgtttttgggcacgggtcaatacataggcttcaggctggtcacaaaagactaagctcaaatgccctgcgatttttttttgggaaaaagctgcagcaatcgcctcaaaattgctaccattgccagatgcaaaaacagctatcttcataaggcttccttaaaaataacggctttcgttttcctaggtaccaaacgaccaatttcaaaagcttctggcaaaagctcctgaactttttcaacatgctctggactcaccgctaaaatcatccctaagcccatattgaaaatttcatacatttcttcaggtggaatttcaccgtatttttgaatcaatttaaaaattggtagcactggccaactatttaattgaatctctgcagctaatgcggaagaaaacattcttggtagattttctaaaaacccgccgccagtaatatgcgcagccccatgcacgagtcctgcttttaacaatggcaataattccttcacataaatttttgttggtgttaataattcttcccctaacgttttgggtgccaattctggaagcttgtccgttgttttaaacgaatgtttcttaaaaaaaatatttcttactaaagagtaaccattagaatgaagaccacttgaaggaagaccaatcaagaaatcgccttcttttacgttacttggagtcaagagttgacttttctcagcaatacccacggcaaaaccagccacgtcataagcatctgcttcatacatatcaggcatttcagctgtttcgcccccaattaaggctgcattcgcctcacaacagccagccgcaacacccgcaacaattgcttcaactttagctggattaacggtccctaacgctaaataatctaaaaaatataacggttcggcgccttgtgcgacgacatcattgacacacattgctacacaatcaattccgattgtctcgtgtttctgttcttcaattgccaagagtaactttgtgcctacgccatccgttcctgataccaaaactggttctttaagcttgtaactacttaaatcaaaacaaccaccaaaaccaccaagcatgcccaacgttcccgtccgttgtgttttttggctatgcttttgaattcgttctactacttcgtatcccgcctcaacatttacaccagcttttgaataggcattttccatgtcaattcctcctagtttcttttttcaaggatgcttgatattgttcttcataatcatacaaaggcgttggatagtctccattaaagtaagccatacacagcccagaataaggagcatcataatttaattgaatcccatcaatcagccctgcttcactcaaaaaagccagcgaatctgcgccaatctgctctttgatttcttcaattgaatagtttgccgcaattagttcgtcccgcgtctgtatatcaatgccataaaaacacggatattttaatggtggtgaagcaattctgacatgaacttcttgcgcttctgcttcttttaataaatgaataatgcgccgaatagtggtcccgcgaacaatcgaatcatctactaaaatgactttttttcctttgaccacgccacgaactgccgatagtttcatacggacaccttgttctcttaattcttgtgtcggctggatgaatgttcgagcgacatattgattttttactaaacctagttcgtaaggtatctgtgcttcttctgcatagccgctagctgcagacaatgacgagttcggtacaccaattaccatatcagctgcgactggactttcgattgccaagttcttccccattcttttacgagctgtatgcacattaactccggcaatatttgaatctggtcgtgcaaaataaatatattccattgcacaaattgccggttggacttccgtagtgaaaacctctattttcaagccttcatcagaaatgatgactacttcaccaggcgccacatcttgaataaagcgagccccaactgtttctaatgcacacgtttcggatgccacaacgtacgccccattgttcatttgtccgatggagagagggcgaaagccgttgggatccagtgcagcaatcatcatcgtttctgttaataaaagataagcaaagccacccttaaccaaattcaagctctcttttaatttatcgagaaacgaggcagcagtgctttttcgaatcaagtgcattaaaatttcagtgtctgaattggaatgaaaaatagcgccttctctttctagttgttttcgtaaacgtttggcatttgtcaaattgccattgtgtgctaacccaattgactatcataaaatttaaataaaaatggctgaatattatccacgctacccgtaccagcggttgcatagcgtacatgaccaatagccgccgttccttctaacgcattcagttgttcttgcttttggaatacttctgctaataaacctaaatcacggtggccatctaatttcccagaattgttcgccacaattcccgcgccttcttggcctcgatgctgcaagctgtgtaagccaaaataggtcacttgtgccgcatcaggatgaccccaaataccgaaaataccacactcttcatttaagctttttgcttcataagacatggaatcgcatcctcccataaggctttggcttcttttgttgagcaattgatcacatcatctaacgcatgaatgaccaaaccagtttcagtcactttcccaatatgttgagcttttcttccgataagtgtttcaaatgcttcttgatgctggggactaactgaaagaataaaacgggattgcgtctccgcaaatagatattctttttttaatggcagtgtcacctgtaaccccagttcgttagcaaaagccgactcggctaaagcaacggcaacgccaccttcagcgcaatcatgcgcgctagcaactaggcctacttgaattgcttttaaaactaattcttggtttgctttttcctcttttaaatcaaatgagcgtaattgcccttcaattcgacccagttgtattttttgaatttctgagccgttaaaatctgcgtgggtttcaccgatgagataaattaagtcatcaacttgtttaaacgcttgtgtggtaatttgtgaaacatcttcaatcactcccaccatgccaatcattggcgttggataaatggcttgaccatctgtttcattgtaaagagagacgttccctgaaatcacgggtgttcctagctgacggcaggcggcggcgattccatccgccgacgtccataattcccaaaaactttctggtttatctggggaaccataattcaagcaatcagtgatagccaaaggttgtgctccactcgctacaatattacgggctgcttctgcaaccgcaatttgcccaccaatttcaggatttaaatacaaataacggctattacaatctgtcgtcatcgctaaggctttattggtgccccgcactcttaaaacagctgcatcacttcctggttgcaccactgtattcgtttgtacttgactatcataggtttcgtaaactgattttttcgatgcaatcgttggctgttgcaataggcgttttaataattccgtactattcgtaatttctggaatgaagggcgctaattttttaaaagcacgcatccgctctggttcttgataggctttctggtagacaggggcttcttctgccaaagcatctactggtacatctgcgactattttgccaccgtgaaagacacgatactgtccatcatctgttacggagccaatcgctaccgcttctaagtcatacgtttgaaacaattcacaaacttgctgttctgctcctttttccacacagattaacatccgttcttgggactcagacaagagcatttcataggggctcatctgcgtctctctctgcggaactttatctagctctagaatcaagcctgaacctgcttttgatgccatttcagcacttgaagaaaccaagccagccgcccccatatcttggatgccgattaaaatatcttgatgatttttgattaaatcaagacaagcttccaataataatttttccataaacggatcacctacttgtaccgcagatcgttgctgttcttcaccttcactaaattcttctgaagcaaaggtcgcaccatgaattccatctcgtcctgttttcgcacctacgtaaagaatgctatttccgacgccttttgcttggcctttttgaatctcatcatgacgaatcaatcccacacacatagcattaacaagtgggtttccttgataacatggctcaaaagcaatttcgccgccaacggttggaataccaatacaatttccataaccgctaatccccgccacaacttcttgaaacaaataacgtgttcgtgcatccgtcagttcgccaaatcttagcgaatccagtaaagcaatcggccgcgcccccatactgaaaatatcgcgaataattccaccaacgcctgtagctgctccttcgtaaggttctactgcagaaggatgattatggctctctgctttaaaaacaacagctaatccgtcaccaatatcgacaatcccagctccttcaccagggccttgaagcacttgtggcccttccgtcggaaacttttttaaaacgggcttggaatttttgtaagagcaatgttcactccacatcacggagaataagccagtttctgtataattaggttctctttgcaaaatggtctcaatctgatgatattcttcatctgttagtccccattctgcatacaaccgtgtttccttgatttcttttggtgttggttcattcatcattggcttaattcctttccaaagtttttaatgattgaagcaaaaaagctgcgtccatctgttgaacctaacaattcttccatcgctcgttccggatgaggcatcattcctagaacattgccctgttcattacaaataccagcaatattcgcaagactaccgttcaccttttcttgatacgtaaaaacaatttggttcttttctttcagctccttcaacgttttttcatcacaatagtaattcccttcgccatgcgctactggtaaatgtatcgaaacattttcaggatactcgcttgtaaactttgtgtgcgtattcactttcaatgggacacttttacaaataaaacgaagcgaatcatttcttaacaacgtgccaggaagtaagccaatttctgttaaaatttgaaagccattacaagtaccaaaaaccattttgccttctgtagcaaagcgaatcacttcattgataattggcgaaaaccgagcaattgcaccacaacgtaagtaatcgccataagaaaaaccaccaggcaacaatacgccatcaaattttgctaaagaagtggcatcgtgtcggacaaattctgcatcgatgcccatcacytctttgacagcccacaataagtctgcatcacaattggatcctggaaaaacaatcactgccaatttcatttaaatttcctccaaagataaaatttcaaaacgataggattccatatttacattggctaatagttgatcacaaatttgttcaattttctcttcaattgcttctgtctgctggacgtgcatttcaaaatacttaccgacacggatttcggctacttctgtaaaaccaagccgatggactgcttccttaaccgcttcaccttggggatccaaaattgattctttatacgtaacatagactttgacaaaatacatacgcgcttcctcctcaattagctgttagtaaacgttgtaaaacttcttcatatacaggaactatttctcctaattcacggcgataaacatctttatccagatgttcgtttgtgtttaaatcccatagacgacaggtgtctggagaaatttcatctgccagtaacaattgattggccttcgtccgaccaatctcgattttaaaatcgatcaaacaaatattgaggcgttgaaagagttgactaagcgcctgattaatttgtaaagccaatgctttaatctccacaatttcagcaggagtggctacttttagaaattgaatatggtcttcgttaataaaaggatcatccagacgatcttctttgtaataaaattcaataatgggcgtcactaatttagtgccctcttcaatcgctaaacgctttgaaaaacttcctgccgcataattacgtacgacaacttccaaaggaatcatttctacgacctgaattaattgttcgtgttcagatacttttttgataaaatgattgggaatcttctgttgctgtaaatgttcaaaaattagactagtgatttgattatttaaagcgcctttcccaagaactttgtcttttttttgaccgtttaaagctgttgcttgatcaagatattccacaaaaagaaccgcagcattttctgtttgatacaacttcttcgcttttcctgtatacacaagtgctttcttttccattctttccctcttctcgttagcttcatgaaccctattctttctaactcagctgattcacatcagacaaaaacttacattagttacaaaaaaacaataatcgttcgtgtttgtcgaatgtaaaaataaaaaacttgcttggagcaagcatttattaagttacgttccaaataccaacagtctcaatttcctttaacgtttctgata

SEQ ID NO: 61 - DNA, 7678 bp; double-stranded, linear
tgtctgcmrtrcagtaagggcgtttttggctgaagcaagatatgaggtggatgcctgcacagatggaaacgaagcacacaccaagttctatgaaaacacctatcaactggttattcttgatattatgctgcccggtatgaatgggcatgaacttctacgtgaatttcgggcgcaaaatgatacccccattctgatgatgacagccctgtcggatgacgaaaaccaaatccgggcgtttgatgcagaggcagacgactatgtaacaaagccattcaagatgcggattttactaaagcgggtggaagccctgttacggcgcacggtgcgctggcaaaggaatttcgtgtgggcaggctgacacttctgccggaggattttagggtactttgtgacggtacggagctgcccctgacacgaaaagaatttgaaatccttttgctgctggtgcagaacaaaggcagaaccttaacccatgaaatcattttgtcccgcatatggggatatgactttgacggtgatggcagcacagtccacactcatatcaaaaatctgcgggcgaactgccggaaaatatcatcaaaaccatccgcggtgtaggttaccgattggaggaatcattataatggaaagaaaagggattttcattaaggttttttcctatacgatcattgtcctgttactgcttgtcggtgtaacggcaacactgtttgcacagcaatttgtgtcttatttcagagcgatggaagcacagcaaacagtaaaatcctatcagccattggtggaactgattcagaatagcgataggcttgatatgcaagaggtggcagggctgtttcactacaataaccaatcctttgagttttatattgaagataaagagggaagcgtactctatgccacaccgaatgccgatacatcaaatagtgttaggcccgactttctttatgtggtacatagagatgataatatttcgattgttgctcaaagcaaggcaggtgtgggattgctttatcaagggctgacaattcggggaattgttatgattgcgataatggttgtattcagccttttatgcgcgtatatctttgcgcggcaaatgacaacgccgatcaaagccttagcggacagtgcgaataaaatggcaaacctgaaagaagtaccgccgccgctggagcgaaaggatgagcttggcgcactggctcacgacatgcattccatgtatatcaggctgaaagaaaccatcgcaaggctggaggatgaaatcgcaagggaacatgagttggaggaaacacagcgatatttctttgcggcagcctctcatgagttaaaaacgcccatcgcggctgtaagcgttctgttggagggaatgcttgaaaatatcggtgactacaaagaccattctaagtatctgcgcgaatgcatcaaaatgatggacaggcagggcaaaaccatttccgaaatactggagcttgtcagcctgaacgatgggagaatcgtacccatagccgaaccgctggacatagggcgcacggttgccgagctgctacccgattttcaaaccttggcagaggcaaacaaccagcggttcgtcacagatattccagccggacaaattgtcctgtccgatccgaagctgatccaaaaggcgctatccaatgtcatattgaatgcggttcagaacacgccccagggaggtgaggtacggatatggagtgagcctggggctgaaaaataccgtctttccgttttgaacatgggcgttcacattgatgatactgcactttcaaagctgttcatcccattctatcgcattgatcaggcgcgaagcagcaaaaagtgggcgaagcggtttggggcttgccatcgtacaaaaaacgctggatgccatgagcctccaatatgcgctggaaaacacctcagatggcgttttgttctggctggatttaccgcccacatcaacactataaatatttaaaacttaaatgattttgaccgacaggtataaccctgccggtctttttgtttttcgccgctacaggaaaactacagattgactacagggaaagtacagatacgcttgccataataacaatcgtaccagccacaaatcgtagttttattgcaaaggaggcattcaatcaaatggaaaaaagcaactatcattccaatgtgaatcatcacaaacggcatatgaaacaatctggggaaaaacgggcttttctatgggcgttcattatctcgttcacagtctgcacgctgtttttggggtggagattggtttccgtattggaggcaacacagctaccgcccatccctgcaactcatacaggcagcgggactggtgtagcggagaatccagaggaaaacactcttgccaccgccaaagaacagggagatgaacaggaatggagcctgattttagtgaacaggcagaaccccatccccgcccagtacgatgtggaacttgagcagctgtcaaatggtgagcggatagacattcggatttctccctacctccaggatttgtttgatgccgcaagagctgatggagtttacccgattgtcgcatccggataccggacaacagaaaaacagcaagaaatcatggatgaaaaagtcgccgaatacaaggcgaaaggctacacctctgcacaggctaaagcggaagcagaaacttgggtggccgtgccgggaacaagcgagcatcagcttggtcttgctgtggatatcaatgcggatggaattcattcaaccggcaacgaggtttacagatggctggatgaaaacagctatcgctttggttttattcgccgctacccgccagacaagacagagataaccggtgtgagcaacgagccgtggcattaccgatatgtcggcatcgaagctgccacaaagatataccaccaagggctttgccttgaggaatatttaaacacagaaaaatgagaaaaggatataatgctatgaacagaaaaagattgacacagcgcttcccgttcctgcttccaatgagacaagcgcagagaaaaatatgcttttatgcgggaatgagatttgacggctgttgctatgcacagacgataggagaaaaaacgcttccctatttgctctttgaaacggattgtgcgttatacaaccacaataccggatttgacatgatataccaagaaaacaaggtgttcaacttaaagctggcggcaaagaccttaaacggcctattgataaaaccgggggaaaccttttctttctggcggctggtacgccatgcggacaaagataccccctataaagacggccttacggtggccaatggtaagctcaccaccatgtcgggcggcggtatgtgccagatgagcaatttactattttgggtgttcctgcatacgccattgacaattatccagcgcagcggtcacgtagtaaaggagtttccagagccaaacagtgacgagatcaaaggggtggatgcaaccatctcagagggctggattgatttaaaagtgcgaaacgataccgactgcacctaccaaatatgggtgaccctagatgatgagaaaatcatcggtcaggtgttcgccgacaaacagcctcaagcattatacaaaattgcaaacggcagtattcagtatgtccgtgaaagtggcgggatttatgaatatgccaaggttgaacggatgcaagttgccttaggtaccggggaaataatagattgcaagctgctttatacaaacaaatgcaaaatctgctatcccctcccggaaagtgtggatattcaggaggcgaaccaatgagaaaaagtatgggcattactgtttttggatgcgagcaggatgaggcaaatgctttccgcaccttatcaccagattttcatattatccctacgctgatcagtgatgcgatatcggcagacaacgcaaaattggccgctggcaatcaatgcattagcgtaggccataagtccgaggtttccgaggcgacaattcttgcgctgagaaaggtcggggtaaaatacatttctacccgcagcatcggctgcaatcacattgatacgactgccgccgagagaatggggatctcggttggcacagttgcgtattcgccggacagcgttgcggattatgctttgatgctgatgctgatggccatacggggtgcaaagtccaccatacacgccgtggcgcaacaaaatttcagactggattgtgtccgggggaaagagctgcgggatatgactgtgggagttattggaaccggccatatagggcaagcggtcgtcaaaaggctgcggggatttggatgccgtgtgctagcctatgataacagccgaaaaattgaggcagattatgtccagcttgatgagcttctaaaaaacagcgatattgttacgctccatgtgccgctttgtgcggatacccgccatctgatcggccagaggcaaatcggagagatgaagcaaggcgcatttttaatcaacactgggcgcggggcgcttgtcgataccgggtcgctggtggaggcactgggaagcggaaagctgggcggtgcggcactggatgtgttggagggcgaggatcagtttgtttataccgactgctcgcagaaagtgcttgaccatccctttttgtcgcagctcctaaggatgccaaatgtgatcatcacaccccatacggcgtactacaccgagcgtgtgctgcgagataccacagaaaaaacaatcaggaattgtcttaactttgaaaggagtttacagcatgaataaaataaaagtcgcaattatcttcggcggttgctcggaggaacatgatgtgtcggtaaaatccgcaatagaaattgctgcgaacattaatactgaaaaattcgatccgcactacatcggaattacaaaaaacggcgtatggaagctatgcaagaagccatgtacggaatgggaagccgatagtctccccgccatattctccccggataggaaaacgcatggtctgcttgtcatgaaagaaagagaatacgaaactcggcgtattgacgtggctttcccggttttgcatggcaaatgcggggaggatggtgcgatacagggtctgtttgaattgtctggtatcccctatgtaggctgcgatattcaaagctccgcagcttgcatggacaaatcactggcctacattcttacaaaaaatgcgggcatcgccgtccccgaatttcaaatgattgaaaaaggtgacaaaccggaggcgaggacgcttacctaccctgtctttgtgaagccggcacggtcaggttcgtcctttggcgtaaccaaagtaaacagtacggaagaactaaacgctgcgatagaagcagcaggacaatatgatggaaaaatcttaattgagcaagcgatttcgggctgtgaggtcggctgcgcggtcatgggaaacgaggatgatttgattgtcggcgaagtggatcaaatccggttgagccacggtatcttccgcatccatcaggaaaacgagccggaaaaaggctcagagaatgcgatgattatcgttccagcagacattccggtcgaggaacgaaatcgggtgcaagaaacggcaaagaaagtatatcgggtgcttggatgcagagggcttgctcgtgttgatctttttttgcaggaggatggcggcatcgttctaaacgaggtcaataccctgcccggttttacatcgtacagccgctatccacgcatggcggctgccgcaggaatcacgcttcccgcactaattgacagcctgattacattggcgatagagaggtgacccgtatggaaaatggttttttgtttttagatgaaatgttgcatggtgttcgttgggatgccaagtacgctacatgggataacttcacgggaaaaccagtggatgggtatgaggtgaatcgcatcatcggcacaaaggccgtggcgcttgctctgcgcgaagcacaaatccatgcggcagcccttggctacggcttgcttttatgggatggatatcggccaaaatctgcggtggactgtttcctgcgttgggcggcgcagccggaggacaacctcacaaaagaaaaatattaccccaatattgagcgagccgagttgattacaaagggctatgtggcctcacaatccagccatagccgtggaagcacaattgatcttacgctctaccacttggatacaggggaacttgtttcaatgggaagcaacttcgattttatggacgaacggtcgcaccatacagcaaaagggatagggaatgcagaggcacaaaatcgaagatgcttgcgtaaaatcatggaaagcagcggatttcagtcctatcgctttgaatggtggcactataagttgattgatgagccataccccgatacctattttaattttgctgtttcataatgaaagtatttgattttctaattatgtataagttggctacaaattacttagtatttcatcagaccaattactctcttgtttacagaaaaattctgcgctgatggaatctgctttattatgcgggcgaaaaatgaaattgaccatattttttcagaactttactctgtaccgaattgcctgcaaaagccttattttaagctgaaagttcaggaattgcttttgtttttgtgtatgcccctcgtgatttgtacacctatcttaattggctttgcaattctcattccgtatctctgctttaagaatttggaaaaacgaagcattgtgaatcggctgcgggcagagcaaaaagagaaccagcagaaacaagtcgttcttgctctgctgattcactcggaactgtttgattcgggttttcgttgaaggtcaagtagctgctctgtcaggaagtccagtgtgttcagcagaatctgctgattgtcacggttgcatgactgaaattttcccatgaaacgctggagttcttcatcctcaatagagtttgaagcttgaaacaggacattcggagaaattcccagtcgttcaattaaccgggaaagtgtttcataagacggattttttcttcccttttcgatgtcctgaaccgttttgaccgccaagccagattgatccgccagttcctgttgggtcaagttacatcgaaccctttcggctcggatgtgcctacccagaaatttcaggctgtcttccggcatgattgttcacctcatatatattctatcgtaccaatttgtattttggtactcccttagagttgtgttccaatcagtattatcatgccggtttttgagtttaatatgcaataaagccctgttggaagcaataaaaaaaacagcttctcacggcagggcctaattgccacgcccccgtggtttgtctgtaaaatcatgggggtattttatgttcaaaagaataatgggaggtaatgcgttaaaaaaagtgtagctccgccgtgggcattatccgccccgctaagcgcactatcgttcctatacaatacatatcatcattcctactaccttattcggtcgcattgcgccaggaagcctaagaagcttcctggccyttttgtttgtcgaattttgttgaatgataacgagaattgtcgatgtcgcagcccgccttcatcggttcgcagcccatgaactgatgaaaggagtaaacggctatgaccaaagaatattgggtagcggtcttagaacaagaagatcgtntgataagtaa

SEQ ID NO: 62 - DNA, 4732 bp; double-stranded, linear
atttattataagggagcganattncatggcacgcgtagaaagttttgaattagatcacaacacagtaaaagcaccatatgttcgccttgctggcacagaacaaaatggtgatgcgttagtcgaaaaatatgacttacgtttcttacaaccaaacaaagatgccctaccaacaggcgcattacacacgttggaacatttattagcagttaacatgcgtgatgaattaaaaggaatcattgacatttcgccaatgggttgccgcactggtttttatatgattatgtgggatcaacattcaccacaagaaatccgtgatgcattagtcaacgttttaaacaaagtaatcaatacagaagttgttccagcagtctctgcaaaagagtgcggaaactacaaagatcattctttatttgcagcgaaagaatacgcaaaaatcgtcttagaccaaggaattagtttagatccatttgaacgtattctgtaatctttagcaattaacgacagagaaacccactattaagctgtgggtttttctgttctctttcttaatttaaacggaggttttttatgaatcaaacaatcgaacaattactaagtcaccgttccgttcgtcattttaaaaagcaagcgttaacggacaagcagaaacaacagttaattactgcagctcaagcaggatcaagctccaattttttacaagcttatacaattatagaaatcaaagatcctgagctacgcagagaattgggacgtttagcgaattgtgaagactatgtcgttaacactggtgtgttctatgtttttgttgctgatttgtatcgtcatgcaacgattttgtcaaaagaggggcaatcattggaacccttaaagacaccagaatcattattagtagctgccgttgatacaacgattgctgcgcaaaacatggccattgcggctgaatctatggatttagggatttgttatattggcggcattcgaaatgacttagacacagtagccaaacgcttatctttgcctgaattaactgtaccacttttcggattaacaatcggtgtaccagaaacgttaaatggtgtaaaaccacggatgccttttgaaaatattttaagtgaaaatcactaccaatcagacaaattgacagatatgcacacatatgatgaattattaaaagattattatgccagccgctcaagtaacgcccaaacagcggattggtcacagaaatctttgtcctatttttcttataatcgtcgcccagaagtaaaaattttcttgcaaaaacaaggatttgatgtctaaacaaaagagcgtgggcttacgttatttcaacgtaagcccacgststtttgttaatttttatttatctttactaaatttgtcttttaagtcttcaaagccttctttaactttatcagttaatttttcagcgccttctttaaggtcgtcgccggcatcacgtgctttgtcttttacgtcagcaaaggttgattgagcttttccttcaagttctttgcctttatcatccgtaactttgccttgcgcttcttttgcagtaccttctactttatcttttgcatcgtcaaaacgtccttttaaatctgccatgctaatccctcctaaataattaattacataataagagtatcattcttagccatttccttcaaatataatgcatgaactacgaataaatggttatttttgagccattaaagctttttttgccaaggcaaagcaaccgattgttcctggattatcttctaaaagaggcgtcaccaagtatttttctaaaggcggtgtttccacatatccattgactaattcagcaaatttttcacgaactttcggcatcaaatgacgttgtttcatgacgccgccacctaaaatgatcacttctggcgctaataataaagtcgtattgtacgncgttgcgctaaataataagcttctaattcccaagttttatgatcctcttccaataaatgtccttttttaccagaacgaccttcaactgctggtcctgctgcaatcccttctaaacaatctccatgataaggacaatttcctgcatacgtatcttcaggatgacgacgaactaacgcatgccccatttctgggtggctaaagccttcaataaactcaccgttttgaatcgctccagcgccaacaccagttccaattgtataatatacacaactagatgtatgttgcccatttccagcaacatactcaccatatgccgcagcattcacatccgttgtccaagccattggcacatcaaaatgttgtttcatagttcctaacaagtcaaagttacgccaagctaattttggtgtagaagtgatataaccatacgtaggagaatcaacgtgaatatcaatcggaccaaatgaaccaatcccaatcgcttttaaaggatattgttggaaaaattctattacttttttcattgtttcttctggggttgttgtgggaaaactgacacgttctacgatggtcaaatcatctgtcccaacgccacatacaaattttgtgccaccggcttcgatacttcctaaaagtttttctgtcattgcaatatgctccttcgtttccattttacaagtaagcggatacattacttttgattaaataactaacatacacgtttagtttaccacttttttgtcgtttcgacagaacaatttaacaatttcagtcaggttgcccaatgaaatctggcaagttgctaaagagcattttcctaaaacaaaaaaacgagcattcacggttatctaacaatgaatgctcgtttttgtttattgattctttagcgaaaaatataacaatagtccgattgcaatccagccaccactaagtaaaagcattaaccaacttaaaagcgtttcttttagaatacttctgggctcttttgcatgctgaataaaactcatactagtcaccaaagaaaagaggaaaaacataaaacaaatgaccgctaaaccgccagacaaccaaaaccaactagccattattctcactctccttttcgcttgttttttgataattattgcgccaaatgacactataaattgccccaattgtgattactaacaacgtgtagaaagtcggtaaccaccatgtgggtaggacccatttgaccgtagcttcttgattcaatttttttgcttcacgagtgttaatcgtaaattcttgttgaaaaggccaagactgttgttcatcttgttgtaaaatagcacgtcctgtaaatatataagtcccagcatctagcggttgtttacccaaatcaagatgaaaattcatggaactatttggggcaaagcgaacattttttagtgtccgttgtgcaatttttttagaggatcctttttttatcacttgaccttctaaacgaacttctggaaaaatagcagcatatggattttgaatgaccgcctttagcgatttggctcctaaagcaattgtaggtgttactttcgctaatttcagttggttcacctctgttaaaggaacattcgcagcactcctcatggcaatcgcaacattaaacccgtagcgactggttaatcccgttgtttggttctcttcctctgttttttcatctttgagatgcgcataaaccccgcccaaaacaactcctttgataggctgatcaagtcccttcaccttcatctttgctgatactgtttgatgaggcggcacactcacttcctcattttctaaagtaaccaagtctgtcagcggaacctttaacgatgaatcaagtggtttatcaaaatcattgtacacaatcaaaccattatcatttgttgatgcatttgctagagtcaatacgatggacaatttttcgtctgtcttattttttatgtctaagacaatagtggaagattgctttggtgccagaattaaatcataataactagatgttcctgacacttgattttctggtaaaacaggcgttactgtaaatttagtcttcatttcttctgtagcttctacttttggaacaataataaaaaatgtgaaaaacagaaatagacagawaacaccgactttttttctactcatttcttcaagatctcctttataaagctgaatgtacctactagtctaacaaatcagcgaaacaatgctgatcaatctttgacttttgggaaggataatcttgaaaaaagtctccttgaaaaataccaaggagactttttattattcactataatataattctttttttatctgtgtggttgatacttctggcgttcgtggcaaataaagaacctttgcggttgtttcaacttctagaaaatcaaaagccccttgccaatcatcgcccatgactaaagtatcaattttaaattcagcaatatcggaaactttttgtttccaactagtttcaggaataactaaatcaacataacgaattgcctctaataattgtttacgtttttcatatgaaaaataactttgtttctttttttctaaattaaaagcatctgttgaaagtccaacaatcaggtagtccccttgttgtttcgcttttttcaacaaattaatatgaccatagtgtaggaggtcaaatgtgccgtaagtaagtatttttttcataaaaacctccatttgtactttgatatttcttcgttaattatcaatttttatgaatagaaaaaaggctactcttgattgactttgatggtttttcgatgcaaattttttattttncgtagccgtn

SEQ ID NO: 63 - DNA, 7294 bp; double-stranded, linear
gggaaaatwtttttatgkgctatggcgtattactagttacgttgttgccctagtgtcccttatttaaaatatttggtgaaaaatcagcgtttatggaccattggatacggcccatttccagtggggaatgttttkgcctgtgctttttggctttttcatgctgattggctttgatcaattttttattgcgtttcatggattattttttaacaacgatgcttggttatttaatccgctgactgatccgattatcaatgccttacctgaagcctactttatgcattgttttatcttgttttttattttattagaaggcctgtttttgataggtattttaatcggaaaacgttctttaaaaaaataaagagagaaaagtgaacaattccaaaattgctcgctttycttttttattcaatctagttttaaaaactagattgaataattgtcaaaagtatgatattcttttttagaaatggttaggagggtttttatggacgagatagaaaaatcactacaaaattggggccaacaattggaaaacgttcatttgccaagatggcatgagttaccagatattgaattatatatggatcaagtgattactctgatagaaaaatacttatccccattgattacactggaaaaacatactttgttaacgtcctcaatggttaataattatgtcaaacacgggttaatcccggccccagtgaaaaagcgctacaatcaaaagcatttagcgtttttaattgcgattacgttgttgaaacaagtgttaacattgccagaaattaagcaaggcattttattccaaggagctacggttggtattcgtgaagcgtacaatttattttgtcaagaacaggaacgagcgatttatgtgattgctgctcaagcgcaagaaaaagaagttcaggccaaatcacaagaacctatggggattgaatatttggctgtaaaagcagcgacaatgtcttttgctactaaaatgtttagtgaaaaagtgattgaattggaacaagaatacttaaaagaaatggatgagatgacacatgaataaagaaaaaatcgcactactagttgattctgggacagatgttccagaggcattagtcaaacaatacggcatgtatgtcttgcccttacagattatttatcctgaaaaaacctatacagataaggtagatattacaccagaagaagtgtatcaacgtttagagaaagaaatccctagtacttcattacctgatggtgcaacaatccaagctatttttgacaaaattaaagaagcgggttacgaaaaagtcttagcggtgaccatttctagtggtttaagtggaacgtataatgtagttcgcttgcttggagaacaaaccgaaggactagatgtatttgttttagatacaaagaacattggtatcggggctggcattcaggcgatacgagcagcagaattaattgaaacaggattaggatggcaagaattacaacaaaaattaacagaagaagtagccaacgcaaaagtattttttaatgtagccactttagaatatctacaaaaaggtggacgaattggtttagtcacttctattttagggaatgcgctaaaattaaaccccattatttcttgtaatgaagaaggcatttactatacggtggctaagtctcgcggccgtaaaaaaagtcttgataaaacgtttgagttggtgacgaactttataggtgaggcaccccgtttccgtttggcagtcgctcacggtgcggcagaggaagaagcmaaagcmatgatggaacgcttgaaagcagcttttccacaagcagaagaaatttactttggaacaattagtccggcattagttgttcatacaggaccaggacttttaggtgttggcatacagttattaaatgttattaaatgaaaaatcccctcaaatttttttgaggggrtttttcatttaagattycycttttycatagraatatcatttagcyggaaaaacaacgraaattwtwttgaaaatytcacgaatgtgttacaatccatctacaaagggggattttttgtgaaaaaagcaatagcagaatgtttaggaacatttattcttgtcttttttgggacaggaacagccgttctaggaaatggtatggaagggattggaacaacggggattgccttagcatttgggttaacaatcgttgctgctgcctatagtattggcacaatttcaggtgcacatctaaacccagctgtttctataggaatgtggcttaataaacgaatgacaacaatggaactaatctactatgtagtgggacaaattgttggtggcttgattgcctcatttgctttattaagcattctaaaaggtgctggtaaaagtattgagaacttaggtcaaaatggcgtaggggaattaagtgttgctggtgcattgacagtcgaaattattttaacatttatttttgttttagttgtcatgacagttacaagtgctaagaaaggcaatgcttcattagcaggaatcgtaattgggttaacactaacaatgattcacttagtcggcattcctttgacaggaacttctgtcaacccagctcgtagcatcgcgccagccgtttttgcgggtggttcagcgttatctgagttgtggatttttatcgttgcgccattaattggtggattattagccgctcttgtagcaaaattcgtcttagatacggaagaatagattagcgaaagaagaatctttgataacaagcgtcaattgttgtcagagattctttttttgttatactaggagaacctaaaggcgcatttttaaccaaagatgaaaacatcatcaaaataaggtataataggaaagtatcaaataagattagaaggaaaaagaggtgtctctttgtgaagaaaattttagtagttgatgacgagaagccaatttcagagatcgttaaatataatttggttaaagaaggatatgaagtatttactgcttatgatggagaagaagcacttgaaaaagtggaagaagtggaaccagacttaattattttagacttaatgctccctaaaatggatggcttagaagtcgcgcgagaagtgcgcaaaacacatgatatgccaatcattatggtgactgccaaagattctgaaattgataaggttttaggattggaattaggagccgatgactatgtaacgaaaccattttcaaatcgtgaattagttgctcgtgtaaaagccaatttacggcgaggtgcaaccaatgcgaaagaagccgaggtgacaacacaatctgaattaacgattggtgatttaaccattcatcctgatgcatacatggtctcaaaacggggtgaaaaaattgaattaacccaccgtgaatttgagttactttattacttagcaaaacatatcggacaagtgatgactcgtgaacatttattacaaaccgtttggggttatgattattttggggatgtgcggacagtggacgtaaccgtacgtcgtttaagagaaaaaattgaagatagtccaagtcatccaacgtatttagttactcgtcgtggggttggttattatctaagaaatcctgaacaggagtaatcaggtatgaagaaaaaagttcacttttttcaatctgttaattttaagattgctttatcatttattctgctgttactgattgcgattcaaatcattggtggctatttcattcgtgaattggaagccactacaatttccgattttaaaaaaaatatggattcccaagttgtccaattgtcaaacacgttaagtacgcagatgagcaacaaagatctcgaacgtagtgacgttgatgcaaatttaaaaaaagcgttatctgatttttcaaatgcagatatttctgaagcgagaattgtcgatgataaagggattattcgggcaaccaatgatttaaatcaacaaaatattattgggaaaaagaatgattatcgtgatttaaatgactttacgagtaaaaaatatcaagctttagataatgataaacgcgtgtatgtgaatgtccagccgattcaatcgcctactggagaaacagtgattggcgtcctttatgtgaaaagtaatttagaaaataaataccaagaaattaccaacacagcaagtatctttttcactgcttctattattgccgcagcaatctcgattattgtgactttactgattgcacgatcaatcacgaagccgattggtgaaatgcgcgagcaagccattcgaatcgctcgtggtgattacgctggaaaagtagaagtccatggaaaagatgaattaggccaattagcagaaacatttaatcaattatcagaacggattgaagaagcacaagaaacaatggaagcagaaagaaatcgtttagatagtgtcttaacgcatatgacagatggtgtcattgcgacggatcgccgcggaaaggtgattacgattaatgaaatggccctttcattattaaatgtaaaaaatgaaaatgtgattgggacctcgttattagagttgttagatattgaagaagattacacattgcggaagctgttagaagagccagatgaactgctgattgatcgctcaacgtctgatcgtgaagaagaccaaatgattatccgggtagactttacaatgattcgtcgggaatcaggatttattactggcttagtttgcgtacttcatgacgtcacagaacaggaaaaaaacgaacgggaaagacgggaatttgtttccaatgtttctcatgagttgcgaacgcctttaacaagtatgcgtagttatatagaggctttgagtgaaggagcttgggaaaaccctgagattgcgccgaatttcttaaaagtcacgttagaagaaaccgaccggatgattcgtatgattaatgatttgttaaatttatctcggatggactctgggaatacacatcttcaattagagtatgtgaattttaacgaattgattaattttgtcttggatcgctttgatatgatgattgaaaatgagcaaaaaaattacaaaatttgccgtgaatttactaaacgcgatttatgggtagaattagatacagacaaagtaattcaggttttagacaacattttgaacaatgcgattaagtattcgccagatggcggcgtcattacctgccgactagttgaaacacataataatgtcgtctttagtatctcggaccaaggtttgggcatccctaaaaaagatctcgggaaagtcttcgagcgtttttatcgtgtggataaagcacgtgcgcgagcacaaggtgggactggtttaggtttagcaatttctaaagaagtaattcgggcccataacgggagtatttgggtggaaagtacagaaggtgaaggatcgactttctatatttcactaccatatgaaccttatgaagaggattggtgggaatgatgaaattatcagaatggattacaagaattggcttgattttgatggtcattttaagtatatatttttcagtcaatatctggctgaattctgccaaaaaaataccagaaatgaagtcgggaagccaagtcacaacagctgtcaatgaaaaagccattggcgatgtctatttacctttgcaattgattcgaataactgatggaaaagcgatgcaaagtaatcgtgaaacattaattagtaatgttcaaaatgatattaaaatggctacgtttggtaaattgacacaagttgtgacaaaaaatgcagagcaacttaagcgctacaaccaaatggaacaaggcattgaacttctttatcaaggtccctttttaatctcggactatgcttcgatttataatctatccattaattttactaactttaatgagttgacggaccagtattttacgaaaattcaattgggattttaacgaaaataagatacgttttttagattatgatcaagccaacgtctatgaagcgcccatgactgtcaataaggcgcgcttaatgggaattatcaataaagagggattacaatatcaagacgtttccgaaaatacgctaaccaaacaagggcaatgttatttaaccaatgatatgaagttgaaaaagtacagttatatcttagcttcgcaaccagttactcgttttaggaatgcttttttcaatgaaacggaagatatccaaaccaatgaagacagtcaagacttaacctacacgagtaaagaagaacgattgtttgcagaagaaaaactgggaaaaattgattttaaagggaccttgccagaagagaataaacgggactcaatctataatcaaagcttttcttatgtaaaacgtttaggaaccaatatggggaatttgcgttactttgatcgaacgaaagatagtgtcaattatcggacttttgtggaaggtttcccagtgttcagtaatgatttaaaaggccaagtggatattcgcatcacgaacaacgatggtgctgcaccaagcgtaaccattaacacaagtgtgaatacgatccaagtgccgattccttcagaagaagaagtgacgctggaaagcacggaaaaattgattaagcgtttagaaacggctggtgctaaaaaggaaaaaattcaatcggctgttatcggttatacgtggcagacaattgaagaagtcaaacaagtcgttgatttaagtccggaatggtatgtcctttataacaacaattggtacactgcaacggacttggtaaaacaattaccaagcttggaggtgggctaatggattttaaacgaattgagtggattttcttcttagcatttttaggattaaatatctttttatttggaatttatcgggaaggtcaacaagaggagagcaacgtctcttcttccagccaaacagaatcgattgaaagtcggttggaaaaagataacatctcgtataaagggacactttcttcagaacgattggaaggttattatttaagtggcgaacaaaccaatttttctgctgctttaaaaatccaacgtgaaaagaataaaaattttttgagaaatgggctgcaaattgcggataatactttaacgagtgtacctagtaaaaactattttattgatcctaagaaaattgataaagatttaagtacctttttaaatgaaaaaaatgctttattattcggagacgaatatcaatacttaccagaattttctcatttaaaagagccgacggcagaaattgtggctgcacaatcgtataaaggaattccttttagagacgacacggcaaaattaagtattttagcagatacgtcaggtgaattat

SEQ ID NO: 64 - DNA, 3422 bp; double-stranded, linear
natttcatctaactttttgacgccntaacaccctattatcactttttacatcttatttcgatttaaaaataacgataaaaagcccgttcctaacagaattactgctgaaacataataagggaaaaagtgattgatatcaaataaagctcctgctgccattggtcctaaaatattaccaaaacttgtaaatgtcgaatttagtccgttgatggttccttgttgatctccagcatgtttggataaataagtagttactgctggtctaaacaagtcaaacgctaaaaagacaataaacgttgaaaatacaacaactaaattattttttgtaaaggcaatcacggcaataaaaatggcacttgcaaaaaaggttaattggattaaacccatttcacctattttttggacgattgcatcaaagaaaaacaactgacaaatcaacgctaaaataccactaaccgtaatcacgattgctatttcacttgtggtaaagccaaaattaatagtcgccataatactataaatagattcgaacgcttgcaggccaaaagaggaaattaagataatcacaaataatgaggtaaacattggatttcttaaaatatccataaatgaaccttttttcgcttcaacagcggctaaaattcgtttctctggctccttcaaaacagttaatgtcaaaataaaaccaataaacgctaaaaatgcggctgcaaaaaacggggcgcgaatacctaaataagcaataaaaccaccaactcctggtccgataataaaaccaccactaattgcggctgacacaagccccatcgctttcggacgttcagaaatcgtggtcatatctgccacaaaggctgtcactgacggcattaataaagcggcggcaatcccgcctaaaccacgagaaatataaaaaccgcttttcgcttgggctaaaccaaataataactcagaaattgaaaacaccaacatgcccgttgcaatcatttttttccgaccaattttatccgaaaggacacctgcgattggcgatgtgattaattgggcaatcgcaaaaatagaaatcatcattcccattgtggtaccagaaaaatgcatttcttcttttaattggggaattacgggaatgactaggcctacgcctagaaaaacaagaaataagttagaaattgctaagtacatcatactattttttttcgtcataatttgcctcctccataaaaaaacagccatcaaaaatggctatttctgtttctttgtatgtactttctttgacagtgtttcggctgaaacactcgttgagtcattgagatacattttacactaattcactgaaaatttcactagtttttacttatttttttaaaggaaattgttattttttaaagacataacttaagtatccaagtatttaatgaatcgcttttgttttttatcagaaacatagccaatgtgttcataaaattgatgtgctgctgtacgctgttcccctgaatttaagcgaatcgcagacaagttacactttttagctccgttctagtttcgtcattaattgtttaccaattccacggccttctgcttcttttgccactgctaatcccagaacgttcaataacgtttgggaataaattgtttcatacagttgcgcatgcacatagcctaaaatcttgcctgtcttcgtttcttcataaacatataaaaactctctgtcactggctagtagtaatttctcaatctgtttacaggtcacgtcaacgggaacttcatagcccaattgttctttattaatgatagttaacgccgctgcatctgttggcttcatttttctaatcaagggtaacaccctcctttacattcttacttaaataataacgaaagcataatatccgcaaaatcatttaattctgaatcattgtattgctctaacaaaactgtttcgcctcgatactcttttaaagctagttgtatcagcgaatgatgattagtaggaaaatgtactaggccccattccccgccagccctttttgataaaattttattctcttgcttaaatgccattactctacacatatttaaaataacgtacataggttgttgaacaatttctttttttgcctctttcacatcagctacaatactttcaaaatatttcttttgatctatccagccaaaaacggaatcaatcggttttcctacgagtacttttccatataattttgtaatcataagatgtgccactagatcctcatcgtatcccatcatatcttcaatatatttatttttattagtcagatatctggaacgatgtatcggagaaaaatgtaaatcgaagggaatcggataactcaaatttattgtatcttttaattgtagcacakggaattctatccctttttttggkgcccacttatctaaaatattaattgtataatctaataattgtttcttctcatcaatagtaagcttttcataaaccacaatcagtacatccaaatcacttactgaatgacaataggttccaaaagcataagaaccatgaagatatattccaactaaattttcttttattattttcatatatccattttccatttgagctaataattgatgaaccacgattattcctccattattgattgacaattgctatagttttttcgataaataaagaactaactcatcatcattaacacaccgttcgtttggtttcagctgcttattttgaaaccagactcctgaaccatctggcacatatccttgtttgatatataatctttgcgctgcaccataaccaggatgcaggcctactcccaaagaaacagtatctgcataacttttggcaacattttctgcacgatttaataataaccgccccactccttgtttttgaaatggtaagaatacattgaaatcagctatttcaggatataaatttttaaaaggtccttccttagctaatggcagtaacgtcacataacctaacagcgttgcctttttctccgctacaaaaaccgttcgttgcttgactaattgttcttctaaatagttcattaaaatctcttggcgacttggccaaccttgttggrcaaattgagtatccagcgctaagatatctttctcttgcatttctctaataaccactagctcagacatcagcatttcctcccgaaaagcgttttcattttataaaacgaagcgaataattcttcgctcccttattcattttcaaaaccatcgagttgataatatttgggcaaaacagcaacacatgtttcttctgaattaacagcaataacgaacccttgccataaggnccacgtcaccgcttcacctaatttctctttcactcgttgnatcatttcagcttgcgttaagtctcgtgcaggraaatgttgaactttatcattactgattaaaaaaataaa

SEQ ID NO: 65 - DNA, 9172 bp; double-stranded, linear
ccggaccatcaaaatcacttttttcctgctcttttnaagaaacgaanggacccatgtcttttcagaaaagtttgttacaatnacaagcgtagagaggatgttagggtatggataaaatgaaagctattactttttttgatttngatggaactttgttagatggaacatcgcaaataactcctgagattaccgcagcagtggcggccttgaaagacaatcaaattttacctttaattgcgacaggacggaccttgtgtgagattcagccaattatgaaagccagtggcattgattctgcgattgtaatgaacgggcaatttattcattatgaaggaaaaacgatttattcagatgaatttacaacagaggaatgtgtttcactgcatgaacatgtcaaacagcgtggtcatgaattggctttttacaatgagcgccgtattttttgtacagggcatactggcacagtgaaacaagcctatgattatattcattcagctgttccagaaattgatcccacaggttatgagaatgatgccgtcaacatgatgttggtcttaagtcaacatggcgatgatgatgaatattactatgagcggtttcctgaattgaccttttatcgcaatggtcctttttcaatagatattgttcgtaaaggggtctctaaaggctctggtgtcaaaaatctttttaacaccttgggattaaacggcattccgacttatgcctttggtgatggcatcaatgatttggcgctgtttgaggcctgtgattatggaattgccatgggtaatgcgcgagaagaactaaaagaaaaagccacctttatttcaactaaaaatactgagaatggcattgttaatggcttgaaaaaatttgatttactataagagaaaactaccttcttctattgatgtactttagaagaaggtagttcttttgtatgttcatttttctttttctgctgtgcacagagagctactcccactacttgaatcagcaaaatcgctcccaacaaacaacttaatacgatgtttcctgataggattgttcttctgattaaaataattaatacaacactgctaattccgtagagtaaccattggttgtccatttttattgacccctttgtttttctatgtttaggataggatgtttcctactaaaatgcaaggnaagatcctagattcttacaactaacccataatttttactaattccttatttgttttcatttattcttaagattcatttcatttttggtaaaaaatcacactttttttctatctctgttttaaattgcgtacagttcttaaaaaaaakgatacactaaaagtgaactcgaaakgaarggrgccattcctttggttaatagcgaaaaaagaaaacaattaattattgatacatgcattttagctggaaaaattatgctggaaagcggatctgaagtatatagaaccgaagatacaattactcggattgcagcaaatgctggcgagccagagagcgtttgttacacgacggctacagggattttcgtgggctttcgttccagtaattatacgcaattagaaaacatcccccagcgctcgattaatttggaaaaagttagccttgtcaatcagttatcaagagaatttgcgcaaaaagagattactttaccagagctttatcagcgcttaactctattagaaacagatacccccactttttcaatttcgttacgcttgttagcagccgggattgttagttgtacgttaatgtacatttttggtggcacttggcaagattttattgcaactttttttgttggcgtgattgggtatgccagttatctttttacccaaaagttattccaagttccttacctcgattcattcgcagccgcttttgtcattggtttgttggcctatttggctgtgcattttcacttagcggtcaacatcgataatatcattattggtgcggtaatgccgttagttccaggtgtggcgattacgaactcttttcgcgacattttagcgggccacctcatcagcgggacggcgcgagggacagaagctatttttattgctgggtctgttggcctgggaattgccttgatttttaaattatttatgtaaggagtgttcaaatggaactaatttttcatcttctctttagttttttagcgactgtgacgtttggtattattacgaacattcctcgtaaagcactggtggcttgtggcattactggcatgacaggctggatgatttattatgtcttaacgcaaacttttgatgctagtcaaacctttgcaaactttttaggaacggtcgggttaggaatcgctagtatctttttttcccgttacaaaaaaatgccgatgattattttttatattccgagtttggttcctttagtgccaggaggccctgcctatcaagcagttcggagcattttgttaggaaatattgatgacggtttgcagttgattttaaaagttgtctttactgctgcagccatcgcagcgggctttatggtgacctcgctactggaacgaattgtcaaacgttttttccccaagcgactcttccgattggtcaaaaaataaaaaaacaagctcattttctgagcttgtttttttattctacttcttcaaagaacagcaacaaatcttgtagcgttaattgtgctttttcagcagcgtttaaatcttgaacaattttacctttttgtaaaacaattaaacgattgccatatcgtaaagcatcttccattcgatgggtaatcattaaacaagttaagttcccttcttcaatccgttgttccgttaagtgcatcaactgcttggatgttttgggatctaaggcagcagtatgctcatctaaaagtaataattctggttttgtgatagtggccattaataaacttaaggcttggcgttgaccgccagaaaggttacctgtcggtgtatccagatgattttccaagccattgccaacttcttggcagatttttgtaaacaaggcgcgttgctcatttatcttccgtaatgttaagggacgtttttgtccgcgtttcatggcaagcaataaattttctgccacagtcattcttggtgctgtccccattttaggatcttgaaaaacacgcgctagagatttggcccgtttgacttcagaaagattggtgcgattgactccttcaattaaaaattgtccttctgttagtgtcaaagttcctgctaaactattgaatagcgtactcttgcctgcgccatttccacctaaaacagtaatgaagtccccaggataaatggctaagttcacatgatccaaaatcacttttttttcattcatcccattatcaatgatttttgtcgcattttttaattcaacaactggtttcatttcgtttcccccttatcagaaaagccgtgtagtcgtaatgcttttttcaattgtgggatcattaaacagattgctaaaatcactgctgagaagattttcaaatacgtcgtatcaaagcctaatttaatcactaataaaatcaatagttgataaataatactccctacaacaatcgccatcagccgttcaccaaacgttaattctccaaacagtacttcaccaataatgagtgaagccaagccaatcacaatgacaccggttcctttacttacatccgcatatccatcattttgggcaatcaaagcgccagataagccatcaagccattcgataaaaccaatcctaaaattttcatgcgatccgtttgaatgccaatcgagcgagccatttcttcattgtcacctgtcgcaatataggcttgtcctaaactagtgttaaagaaaaataacagtaaaatcattaccacagccaaaacactaatccctaaaaaaatagtatcataataatcgggtaaggccattttttgaaaaacatcttgaatcttcggttggtttaataaagacttatttggcgacttcatcacaaataaaatcacggaatttaaaccagacatcactaaaattcctgctaaaataattggaatttttccttttgtaaacagtaaaccagtcactaaaccggcaagcattcctgctccgacccctaaaagagtcgctataaatggtgaaacccctgttgtaatggcagttacacaaaccgccccccctaacggaaatgaaccttctgtggtcatatctggaaaatttaaaatacgataagtcataaaaatacctagtcctaacaaggcccataacattccttgtccaattgctgaaacaatcatcgcttctcctactttctttgataattagttaatcaatttcgatttttttgctaactctgcgggaatcgtaattcctaacttttgagcttgtttttcattgataattgtgtcgcctgtattaaaggtataaatgggtgtagttgctggttgactttttccagacagaacctctgctgccattttgccggcttgtacccccaacgcatgttgattaatccctacagttgctaaaccgccttgttctaccattgtatccaccgaaggaataatcggcgtcttggttcgatttgcttctccgactaccgtttgcatggcattagcaatcgtattatcagttggtatataaatcacatctgtttccttagtcatcacttgaaccgtttgtgcaatttcattacttgatggcacagcatatgttttcactgtcaatcctttggcttcagccgctttctgcgcttcagctacttggtatcgagaattttcttctgaggaagcatagagaatacctatttttttggcagctggtatcaattcttttagtaaatccatctgggctgacaaaggagattgatcactaacacccgtgatattaccgcctggcttttgattgtctttcaccaatcctgcactaacagggtccgtaatggcgcctaaaatgattgggatttcttgggtagtgttggctaacgcttgcgcactggcgtggcgatgccaattaaaacgtctgcctttttttgtactaattgttgactcatgattgctaacttactctggtcggcttgaccattttgaaaaataatttctaagtttttgcctttgtcatagccattttcctttaatccttcttcgacacctttataaatttcgtccaatgcggggtgactgacaaactgcaaaacccctacagtaactgtttctttctttgaattcgtcactttttgattcacaaaaaaagcaccgattaaataaatagctaataaagacacgacaaacgttaaacgtttatttttcattttgcattctcctaactgcccttttgtttggcaactttttctttttaataataaaaccattatctatagggcgtttcttccgttgaaagtgaaactgagattcgtaatcctctgcttagtcaaaatccaaggaacacttttttacaaatgtcaggatttagctgcgacgaggattgcaactttggtgagaatcgcaggagtactttttctacgaatgggacaacgttctcttcgttcaccttgtactactcatcactcttgaaggccaaactgcggcgagtatacgcagcctgcatctactctgtcncttcgtgccaatcgtagtgcttgtcaggatttaactgcgacgaggatcgcaactttggtgagaatcgcaggagcacttttctacgaatgggacaacgttctcttcgctcaccttgtactactcatcatctactctgtcacttcgtgccaatcgtagtgattcgtagcaaaaaaacaacgacttatcctaagtgtttaggagtggtcgttgtttttatgcaaaacaaaaaccacatagatgggtcctctatgtggtcgttttttcttcttgaatataaccagcatagatacactttttagaataagtcttctaaagttgtatctatgaaagaatcatacatacaactatctacgccagttttgccatgattggtgcatttcttttacgttagataattgtgtcatgtattttccctcctagttatgttgttaaaggtagtctacactatattgattttgttcgtcaagaaaaagtttttattttcttgcatttcttttacttctaaaaaacgagccactcttatgagaggctcgtttttctttatttcagcatatttaccacttaattgtttcggtttctttcaattttcacgggaactttaactgcttgtttttgcgattgaatcagccataaacttactaaaatcgtcattgaaattactaatgccatcgaaaatcccctctttctaattccttaaaactttctacaatctaagtttaacatagctagctattattcaccagtttctggtactgtatcagtgctttctgtcgtcgtttcagtagattgagcaacgccagtcgtgctggtcgtcgtctgtgtttccgcggtctttgctgcttctttttcagcttcttgcgccgctttttgctggtctttcaaaacgccagccattggtaatcgatttaattctggtattaattgtgtttttaaatccatagatttttcgacaaccgtccgtgtcttttctttgccgttttcaaagaaaacaagcgtaatctcatcgccgctaacattgtattgctcttgtgctttgccagcattataaattaacggatagatatacagcgaacgatgaaattcattcattttatctgaattaaacagcttcaccatttgatcgtattgcttgccagatggtttagcaaacatgactgacatggctcctgtttcttggattttcttgtctgctgttttgtaatctaagacactgactttctctgatttgatgggtcctgcgactaacgattcaacttgagcagctcgaatatttttttgcatcgttggaataaaaatgattgagccaattattaatactaatgctacaatagcggtaatcattaacagttttctttgtcttaattcataaagtgcctcttttagttcttccataaaattattcaacttctaatcgctcctcgcttttagttcttatctattatactaatcattttctttcttgcctacccttgcgctttaattactaaaaaaaccagcaaacttccccagctttctaaggaaaacccaactcctttttaacaagcttctttcttaaattcaaaaactccgctataataaagctattagtcggaaagaaacgagggatttattatgtcatttgatggcgtatttactcatagcatggttcatgagttgacagaaacactcgtaagtggccggatttcaaaaatccatcaaccttatgaaaacgaagtcgttttagtcattcgtgcgaaaggtaaaaaccataaattattattatcagcacatcctagttatgcgcgcatacaactatctacaattacctatagcaatccggaaacacctcctaattttgtgatgatgttacgaaaatttctagacggtgccattttagaaacgattcaacaaatagaaaatgatcgcgtgattcacttcaccttttcaaaaagagatgaactaggtgacttacaaaatattgttttgattgttgaattaatgggacgtcacagtactatcgttttagttaaccaatcttctggaaaaatcttagatgcgataaaacacattggaatgagccaaaatagttatcgttcgttgcttcctggagcaacttatattgaaccgccaaaaccaatgggacttaatccgctcacggcctcaaaagaagaagtctttgcgcttctttctacagctcctgaattaaacggacgctatttacaacaacatttccaaggtctaggcaaagatacagcagacgaattaagtgcccgtttacttgcacaaccaaatgaaaaaatggccatctggacggaattttggtcctcagtcactgaagctgttgtaccgacattaacagttactgaaaaaaaagaatattttacgcccattccttatcaatcattagttggtgaacaaacaacgtatgcgacactcagtgaattactagatgccttttattctggtaaagcagagaaagaccgtgtcaaacaacaaggcggcgaactaattcgcaaaattgaaaatgaactaaaaagaaatcaaaagaaacttaaaaaattacagcaaaccttagccgatacagaaaacgctgaaaattaccgtcgcgacggagaactattaacaaccttcatggcacaagtcccaaaaggagccaccgaggtggaattaccaaattattatgaagaaaatgcaccgttgcgtatctcgctaaatcctgcactttcacctaatcaaaatgcacaaaaatattttcaaaaataccaaaaattgaaaaatgctgtccgagttgttaaaacacaaattcagcaaacacaacaagaaatttcttatttagagtcagttgtggcacaacttgaaattgcgacaccaatggacattgaagtgattcgtgaagaactgattgaacaaggctatttaaaacgtaaaaaaaataaaaaacaaaaacagccgaaaaaaagccaacccgatcttttttatgccacagatggcacacctattctcgttggaaaaaacaatttgcaaaatgatcaattgactttacgaaccgctaaaaaaactgattattggctccatgccaaagatattcctggatctcatgtaattattcgtgacgcacatcctagcgaagaaacccttactgaagccgcacttctagcagcttatttttcaaaatatcgactttcttcacaagtgcctgttgactatgtccaagtaaaacatgtgcataaacccaatggagcaaaaccaggttatgtgatttatgaaaaccaacgaacgttatatgtgacgccaacagaagaatcgatcaaaaaaatccagcaaaataaggcttctgcttcctaattgtattaaactaaaaaacaacgtactgccgattgatcgtacgttgtttttttgcattggcaaagacatttatcaagtgataaataacacaagtaagctcaattagtttacaaactagctatttctctctatactgactgttggaggtgaaattcatggtctttttacacattatttttgggatgtttgcctttattggcgctttaggtttaggtgtcgccttccgcgatagctttacagaactttcaacacc

SEQ ID NO: 66 - DNA, 788 bp; double-stranded, linear
attattgatcgagaaaatgaaattcgagaatttaaacctgaagaatattggagcattgatgggaatttccaaaaaggtcgcaagaaattcaaagcaaatttctggggcgtagatggtaaaaagaaaaaattaccaaatgcagaagcggtgaaagaaatcacttctcggattgacggtaaagattacgatgttacaaaagttgagaaaaaagaacggaaacgtaatcctgcattaccttttacaaccagtagtttacaacaagaagcggcacgtaaattaaatttccgtacccgtaaaaccatgatggttgcgcaacaattgtatgagggaattgctttagggaaacaaggcactgtggggctgattacctacatgcgtacagactcaaccagaattgctgattccgccaaagcagaagctgctgaattcattgaaaagacctacggagatgagttttcagcacatggcggccgcaaagcaaaaaatacgcaaggtgcacaagatgcccatgaagcggttcgtccgtcaagcgttttaagaacacctgatgaaatgaagaagtatttagataaagatcaattaaaattatatactcttatttggtcgcgctttgttgctagtcaaatgacaccagcgattttagataccatgaaggtcacgcttcaacaaaacggcgtaacgtttattgccaatggctccaaagtgaaatttaaagggtttatgcaagtatatgttgaaggacgcgatgatggtaaagangacaaggaaaaatattttacctgaantag

SEQ ID NO: 67 - DNA, 4313 bp; double-stranded, linear
ttatgattaaggcaacaacgccccaagcacgatatggaaatcccacgccacgtgtagctgaaacacctagtggtatgctaaatgccattggattgcagaatccaggtttagaagtggttatgcaagaaaaattaccgaaattagaaaaataccctaacttaccgattatcgcaaatgttgcaggtgcttgcgaagaggactatgtggctgtttgcgcaaaaattgggcaagcgcctaacgtcaaagcaattgaactgaatatttcctgtcccaatgtgaaacatggcggcatagcttttggtacagatccagaggttgcttttcaattaacacaagcagtcaaaaaagtcgcctctgttccgatttatgttaaactatcaccaaacgtaacggacattgtgccgatcgcccaagcaattgaagcagggggcgcagacggtttttctatgattaatacattgctagggatgcgcattgatttaaaaacgagaaaacctattttagccaatcaaactggcggactatctggcccagccattaaacctgttgctattcgcttaatccgacaagtcgccagtgtttctcagttgccaattattggaatgggcggtgttcaaacagtggatgatgtcttggaaatgttcatggcaggtgctagcgctgtcggtgttggtacggccaactttacagatccatatatttgtccgaagttgattgacggattacctaagcgaatggaagagttaggtattgaatcgttggaacaattaattaaagaagtgagagaggggcagcaaaatgcacgatagaccaattattgcgttagattttcccacgcaaaaagaagtggctgtttttttagaaaaatttcctaaggaagaagccttgtttgttaaagtggggatggaacttttttacgcagaaggaccagcgattgttcgctggcttaaagaacaaggacacgatgttttcttggatttaaaattacatgatattccgaatactgtggaaaaagcgatgacaaatttagcaaaattaggcgttgccattactaatgtccatgcagcagggggcgttcgaatgatgcaagcagctaaggaaggtctaatcaaagggactcagccaggcgctaaggttcctgagttaattgctgtaacccagttgacttctactagtgaagaagagatgcaccatgatcaattaatcaacgttcctttagagacaagtgtcattcattatgctaaatgtgcggaaaaagcgggtctggatggtgtggtttgttcagcattagaagcacgtggtattcaagaagcaaccaagcagacgtttatttgcttaacacctggtattcgtccagcaggaagtgcagtaggtgaccaacaacgggtcgttacgccgcaacatgctcgcgaaattgggtccacatatatcgttgttggccgacctattacccaagcagaaaatccttatgaagcctatcaagaaatcaaaaaagactggagcgaaaagtaacatgacaaaagtagcaaaaaagattgccaaagatttattagatattgaagcggtatttttaaaccctaatgagccgtttacctgggcaagtggcataaaaagcccgatttattgtgataaccgtatcacgatgagttatcctgctgtgcgtaaagaaattgcagaaggcttagcggcaaaaattaaagagactttcccagaagtcgaagtgattgctgggacagctaccgcagggattccacatgcggcatgggtagccgatattttaggattaccaatggtttatatccgcagtaaagccaaagatcacggcaaagggaatcaaattgaaggccgaatttctgaaggacaaaaaatggtagttatcgaggatttaatttcaacaggcggtagcgtgttagaagcggcagaagcggcggaacgtgaaggagcaacggttttaggcgttgcggcaatcttcacttatgagttacccaaaggaacggcaaattttgcagataaacagatgacgttactaacgttaaccaattattcaactttaattgatgctgcattagaagcaaattatatcgaagaaaaagatgttaccttattacaagaatggaaaaaagatcctgaaaactggggcaaataaccgttgaactaaagaaggttcttgtcgtctgatttttagtgtcattttcagtaaccagatttaacggtaggagaacttaggtcatttgccgaggagcgtaatgatctaagttcntttgtttgacgtagaaaagatgttaggatagagttttaacatgagttttacctgattactatgtggaaatgraggaagagtgtatgaaaaaaataaaaaatatggacgtkgaatggagctatacaggccaacgatggacccagaacattggcatacgctatgtgactggtttgcagaaggtgctaagtttgcttatcaatcgccaattgctttagaaaaagaaagtgctgagacagtaaattctcagattacgtttcattataaaaaagaagaattcactgaaaaagaattcaaaaatacgtttcattttgtaccaccaaatacggaaagttacgtaatgtttgaaaatgttgcgtatcatttaaccgatatccattttcatatgcctagcgaacatttgctatcgggaaagcagtatccgctagaattccatttggttcatatgaacgatgctggcgaaaatttagttgtcggttgcctgtttaccatcacagaggaagaaaatcgtttttcagaagcgaatcatccgatggactgggaaaacggcacgcaccaacaatggtttaatccgtcaatctttttaccagaggagcgtctacactaccattatgtaggctcgttaacaacaccgccaactaagggtccagtgaaatggtttgtatttgataccattcaaaaaatggatcaagcctttttaaataagattaaggaaggtatgttggcctttaacaatcggccccttcagccgttgaatgggcgtaagatttatttttcaaatgattagtgtgtggaggaaaaagggttgaatattcaacaaatgaagtatgttgctgccatagctaacaatgggagttttcgggaagcagccaaaaaactatttattacacaacctagcttgtcaaatagtattcgagaattagaagaagaactagggatttccctctttttacgtaccaataagggcgcttttttaacagaagaaggaatggtttttttagaacaagcagagaaagttttagttcaaatggagttattggaaaatcgctatcgcgagacagtgaccagcgaacgattctccatctcttcgcaacattacgattttttaggtgaggtaattgccaaagttcttaaaaagtatggggatcaatataaagattttcgtgtctttgaaaccacgaccttaaaagtaattgaagatgtcaaaggatttcacagtgagctggggattatttatttaaatgaacaaaatagtgtcagtattgaacggtatttagaacaagctaatctagcctacgaggtaattagtacttttaatacacacatttttttaggaaatcatcatcctttagccaagcaaaaagaaattcatttagaggaattagttccctatccacaagttcgctttaatcaagaaggaagcaatttttcctatttttctgaagatttagttgaaattcctgaacaggaatcggtcattcatactacggatcgtggaaccttgatgaatttgttggtagaaaccaatgcttatgcttctggttcaggagtcgtaacgggttttacgaagaaagaaattcggttagtgccattggcgccactttggaaaatcgtatttgtttactctttcccaaaaatcgggaaatcagtccaattggtcgctactttatcaaaganttaaaagcgttgtttaaaaaagaggtagataccaaaacatttmgcactaaggataaaaagaagaggtcgggacagaagtgtttaactccgagaaataagaaggaatttccgaaaattgttctttaattttcggagaatttcggcttatttccgaaggatttgcttctgttcccgccgtttattagtttttgagcgtggagcaaaaatccaaagtgatttttgtcccacgctcttcttttttggctcattttgaaacagtagaaatggttkctctttcaattaatgtgacaggcacttgaatgtcttctatgatttgaaggtcttgttgcatcgtttgtaataacacttcaccagctagttttcccatttctttaaagtc

SEQ ID NO: 68 - DNA, 8921 bp; double-stranded, linear
attnttncatgcgataaatggtattcctggtttatcagccgtgaagcctaaagcagctttctatatttttccgaaattgatacggccaaatttgacttttatgatgatgaaaaatttgttttagatttcttacacaaacatcatattttattagtccatggtggtgggttcaactggcaacaacccgatcacttccgtattgtttatttaccgaagatggaagacttaaaaactacagcagataaaatgcgtgaatttttaagtacctacaaacaaaaataaaagaactaccaaaaaatagcctctaacgaagctattttttggtagttcttgttttatcaacaatactattctgcggtttcacatgcttttttactaataatcattcggttggtatatttttcttccatatcaggactaggatttgctactacgatgagataagaattttcatactccttctccacaaagcctgaataatttgttttttcccaaatgaagtgaacctttttctcttcggccatacaataacactcctttttaataaaaatgaacctatttattttctaagaaaaccttagataatgttcttgcagtatattatgcaataaagtacaataaaagcataatgcgaattcgcatattttgacaaaatccccattttgcaaggaaaatggccgatataaataggagctattgtgatgaattctttaggtgcagttattaaagaaattagaaaaaatagaaaattgacacagaaaatgttatcagaagacatctgttcgcaaagcgttttaagtcgcattgaaaacaatgaagagttgccaaacgttctcgtaatgcaacaactttgtgatcgtttaggtgtgactgttgatcagattatgcgttataaatctggtgatgtgcacgttgttacgtattcatttgaaaaaatggctgaatattttcgccataaaaaatatcaattattattaaattatttaaaggaaaatcgtattgaagaacaattgtatttagatacggactggcaaaaatattattattatttaggtagttgtgaattgtttgttctaaatgattatgaaaaagctattgctagcttgcgtaaagggttatctttcacctataaagccgataagttaaatgtttctgatttagagattcaattaattagttgtctaggtgccacttatggttacatgggcaatcgagtagaagcagaacgatttttaagtttgagtattcattattttaatcaattgccaaatgaacgcagtaatgcagagttaacgaaaatattttttaattatgctgatttcttatttaaaaattatacagaaaaagatgccgaaatttatgtggatcaaggaattacttgggcccgcaaaaaaaatagttattattatttaagtgaattattaaatctaaaatatttagttttaatgagaaagaataaacacgaagaagcagaacgttatctgaacttagcacaacaaatgaaaaatgtggaaagtggcaatctttaaaaaatcctcagaattgcttaaaaggtctacaccatttcttgacttttgtactgattaagagtacttttgaagtaagtaaaataaagaaagaaggatgaagatgaaaacatttatctttgcagacaagttctttttaaaaagcgatgttaaaggacctggttatttagaaatcacggatggtatctttggtaattatacaaaagatgaaccgcaaggggacgtaaaaattattcgtgaggaaggcaaatggattgccccaggtttagtcgatactcatattcatggttacatgaatcatgacgtaatggataacgatgcagaaggcattaaagtgatgtctgaaggcttattatcttgtggtgtaacttcatttttaccaacaacgttaacttcaagtaaagaacgtttaacagacgttgcacgtacgattggtcaagtctaccaagaagtacctggtgcaaaaattcaagggatttactttgaaggacctttctttactgaagaacataaaggcgcacaaaatccaagttattttggagatccagaccttgatacattccacgaatggcaagaagcttcaggcggaattattaagaaaattgcgttggcaccagaacgtaatggtgtgaaagaatttgttgaaaccgttacagatgaaggtgtcgttgttgctttaggccatagtaatgcgaccttagaagaagctgatgtggcagttgaagcaggcgctagcgtttttgttcatgcatataatgggatgcgcggcttaaatcaccgtgaaccagggatggttggtgcattgttaacgttacaacacgttttctctgaattaatttgtgatggacaccatgtacatccgcaagcggctgaagtattgatggaaaaagcgggccatgatcacgttgcgttaattacagactgcatgatggctggcggtatgccagatggcaactataatttaggtgaatttcctgttgtggtagcagaaggaacggctcgtttggatactgggaacttagcaggtagtattttaaaactaaaagaagcaattaaaaatgtagttgattggggtattgcaacacctgcacaagcaattatgatggcttcattagttcctgcgattagctgtaaaattgatgatcaatgtggcatgattgcaaatggtcgcgatgctgactttatcgtattagaaccaaccatggaattagcagccacttatttagatggcgtagaacgttatcgagcataagacacaagaaaaagcttgcggaaatttatccgcaagctttttttataattcttttggtaaaatcgcagaagtgatttctttgttctcgtaggcaataaaaaaatcgattaattgcttgtcaaattgctcaatatcctctttgtaaagggagctaggaatcacaaaggtttgctctagggtgcctgctagataatcgccatctaaactttgggcgacaactaaaaattcttgttcgcgccaatgttccacatctgtttcagaaatggtttctggagaggctaaaaatttacaattttcgacaaactgttcatcaatttcttcactgaaagttaattcagcatcctcttcttgaggttgagagaggattgcttgcaaaaatgtttgtggttttgcatcgggtaatgtttcttttagctgttcaaaatccaatgaaagttcctccttattgtttgtttaaaatagttactgaaaaatcaatgggtgaatttgttttaaggcttttggcttctaagatgattttttcagccaacaaatcgtttccgttatatacaggtgtcacgcgatagcgaacggtttcgccgcgattaagagctgcccgaatctgattttcatatttcgtcatataaggagtgttgacaggattctgatacaaggtggttaagttacgtggatcatcaccactgcctcccatttgacggccgattaggtggccacgcgaatgattagcttttcctgaaatgaaaccagctggtcgaatatctttattagcggaagttcctgtattgaccattgcgggttttaatagcgcatcagcgcctgtcgctcgttttagacgatctagagaatgataagtaatccagccgtttgagttatcctttaattcctctgctgaaaatgtggctttaccattttcgatgggtncgggattatctccttttggtgctggtgtgcttgaaaggggtggttgtttgtggttgaacattaaataaatcttgtaaagcatcaggaactttaacgccaaccgcgcctaaaattaaaatgattaatgcgccaatcagcatgatggttgaattaaatggtggtttcttctttctgtttgccataacgtgctcctctaattttatacttgcaatagtccaaatttaagtggaccatcttttctattatacgtaaatttgctaaaaaatcaaaaaaggcttttctttgaaagacttgttttctcagatatgttactattttaatgtagaagggaagggatagtggatggcctatattgaagtcaaaaatgaatacaagcgttaccaaatgggagagacaactattactgcgaatgacggcatttcttttgaagtggaaaaaggagaagtagcggttattttaggccccagcggtgctggaaaatcaactgttttaaatattcttggtggaatggacagctgtgatgaaggggaaattattattgatggcacagatatcgctcagttttcagagaaacaattaaccacttatcgacgaaatgatgtcgggtttgttttccaattttacaatttagtcccaaatttaacggcaaaagaaaatgtcgaattggcttcgcaaatcgttgcggatgcgttggattcgaccaatgttttacaatcggtgggtttaggggaacgtttagataattttccagcgcaactttctggtggtgaacaacaacgagtaaccatcgcccgtgcgattgctaaaaagcccaagttacttttatgtgatgaaccgacaggagcgatggattatgaaacagggaaacaaattttaaccattttgcaaaacactgctcgtgaaactggaacgaccgtcttaattattacccacaattcagccattgcagaaatggccgatcgggtaattcgaattaatgatgcgaaagttcgcgaaatgactgtgaatgatcagcctaaattggttgctgaaattgaatggtaggtgcctaaaatgaagaaaacagcgctaattaaaacaagcttacgtgaaattagacaatctactacacgatttttatcgattatggggattattttccttggtgtaatggtctttgttggtttgaaagctactggaccagatatgattaaaaccgcgaataattattaccagaaagagcagcttccagatgcgcgaataatttctacaatgggactggaaaagaaagatttaacaacactacagtctttaaaagatgtcgaaacagttgtgccgcggtatacaatagatgccacgattgggccgcaaaataatgcagtaaaattgtttggctatcgaaaaaatcaagcaggatcggttaactatcaagtagttgacggtcggttacctaaacaaacaaatgaaattgcattagatacattagcgaaaactagatatgactataaaatgggtgataaaatcactttaaacgatgcagcgattaaagaaaaagggctgaaacaaactcattttactgttgttggatttatcaattcaccagaatatattgataatacatccaggggaaccacaacggtcgggtctggaacgttaaacttttttggcgtggtttcggaaaaagcctttgacagtcaacggtatccagaattgctaatctcatttcgttcattaaaacatcaaaatacgtattcctctgattatgaaaagaaaagagagcaggccttaaatcaagtaaaagaggcactgaaaaatcggccagaagaacaggttgcggctctgcgtgattcggctcagccggacattaaccaaggtcggcaagcgctggaaacgggaaaacaagcacttgcgcagttggagcaacaaccaggaattccagctgagatgcttgaaaagcaaaaagacgaattggctaaacaagaacaactgttggctgaaaaagaaacagagctagccaatttgaaagccccaacgtattattattttactagggaagacaatccaggattttctgaatatcaagataacgctgatcggatttcttctttagccacgctgttcccgttgttctttttcctaattgcggcattagtcagcttaactaccatgacacgtatggttgaagaaaaaagaatggaaattggtagtttgaaagctttaggttatcgtaatcgtgaaattgcttcgatttttattacctatgcaacggttgccagcttaacaggtgcattattaggattggcagttggctattatctattccctaaaataatttttgatgcctacggtcaaatgtacaatattcctgatttagttacaccgtggtacttaaattacagtttatggggcatcattgtagccttagcttgtactgtgggagcggccttagtgacattaagaatcgatttattaagtaccccagctaccttgctaagacccaaagcgccgaaagcaggccaacggattttactagaacgaatccgccctttatggcaacgcatgagctttattcaaaaagtgaccgctagaaatctgttccgctataaacgacggatgctgatgaccgttatcggaatagctggttgtatggggctgttaattgttggttttggtttacgcgattcaattgtggatgtcgctacaattcaatttaataaaatctggcattaccaagcagtcgtgacttttaaagagcaaacaacacctgaagagacaaaagagtatcaagaaacgttgcgcaaaatggatggtttgaataaaacaattccgttatattcagaaatctttaaaacgaagggcaaaggcgcaccaactcaaaatattactctttatgtgccacaagatccttcgaaaatggctgattttcaattatttaatgatcgagtcactggagaaaaatattccctcaacgatgacggtgtaatcattaatgaaaaattagctaaattatttggctataaagtcggagatcaattaaatttagaaaatagtgataatcaaacctatcacgtgaaaattgccgcgattgcagagaactacacgggtcattttgtctatatgacgccgaaactctaccagacgatgacgaaacagaagccggagtataatacagaattcctactttttgacaaaaagttatcctcaaaacaagaaacctcaatcggagaggcgttgacaaaacagccgaaagtgttgaacattacgtttttaactgcgatgaaaggttcgtttgatgatatgctgaaaagccttgatattgtcatttgggtactaattgctgtttctggttctttagcgttaattgtgttatataatttaaccaacattaatgtttctgaacggattcgagaactttccacgattaaggttttagggttttacgatcgtgaagtcaccacctatgtttaccgtgaaaacattattttaacgttcattggtattattgttggctgcttctttgggaaaattttgcatcagtatattttagcaaccgttgaagttgatttaattatgttttcgccaattattcattggccaagttatctgtattccgcagtcatcaccatgtgtttcacgttgtttgtgatggtcattatgcatcggaaattgaagaaaatcaatatgattgaagcgttaaaatcaaatgaatagcacattttaaaaaacgaggagtccgtagaagttcgataattctagggctgctcgtttattgctgcttcttttattaagaaaaaataggtcttaagatgtatcttttgagatttatttggaaattactactctttttatttaaaaattggtacactattactaggttatagcacagaaaggagtgtgggaaaagtgttagaaggtctaccattggaaacggtttatttttatgcattagtggggagcscggtcctcgcttttttactaattatttttggggatgtttttaattttgatggaccggttgacccaatgctgattattccatggattgcttttacctcgctgtttgggtaccttggggaagaattaacagcggtgaatagttggcttattttaattgtcagtggtattctttcaaccattattgttttcttcctaaatttttatgtgttggtccctttgaaaaattcggaggccacaatttctatttcggaaaaagacatggagggtcgtgttgctactgtgattaccccaattcctgtccggggaatgggcgagattcaattgaagagtgtcacaggttcgttaagtcgaccagcagcattttatgtgccacaagaagtggctgcgccaagaggtagtgaggtattgattattgaattgaaagaacgggtttgttatgtcattccttacgaaggcagtctaaaaatatagagtaggagagaagaaaatggggattttgttaccgattattattgcagttttagtattattaatgttattaattgtgtttgtttctaaatatccagacagcccaaacctgatgaagcgttaattatccagcgggagctatctaggctctaaaaatgttcatgtagacgaaggtggcaacaaaattaaaatcgttcgtggcggtggtgcgtttgtcttaccagtgttccaacgttcaaatcgaattagtttgctttcaagtaaattagatgtttccacaccagaagtgtacacagaacaaggggttcctgtgatgtgtgatgggacatcaatcattaaaattggttcgtcagttgaagaaattgcgacagcagcggaacaatttttaggaaaaacaacggaagaattagaaaatgaagcacgtgaagtattagaaggacatttacgttcgattttaggttcaatgacagtggaagaaatttaccaaaatcgtgattaatttagccaaagtgtacaagaagttgccagtgttgacttagctaaaatgggcttagttattgtgtcgttcacaattaaagaagttcgtgataaaaatggatacttggattcattagggaaaccaagaatcgctcaagttaaacgtgatgcagatattgcagaagcagaagccttgaaagaaactcgcatcaaaaaagcagaagcagaaaaagaatcacaacaagcggaattgcaacgtcaaacagaaattgcagaagcttcaaaagaaaaagaattgaaattagcgttatacaaacaagaacaagatattgccaaagcca

SEQ ID NO: 69 - DNA, 5523 bp; double-stranded, linear
tgcaaatgcacgaggaggaacaaaagaatggaacarggaacagtaaaatggtttaacgcagaaaaaggttttgggtttatctcacgcgaagacggaagcgacgtattcgtacacttctcagctatccaaggtgatggtttcaaaactttagaagaaggtcaagcagtgacttttgatgttgaagattcagaccgtggccctcaagcagttaacgtagaaaaaaactaataaaaaataatccaaaaacacctaacatgcgttaggtgtttttttgttagaaaaaatagagaagaaaaatggacaagcatttttcttctctattaaatgagagctttattgatcactaactgtggcagtcataatcattggcagaatcattggatgacgttctgtttgttcaaacaagaaaggctgtaaagcggtcgtcatggcttcgcctaattttgcttcggtacagtttttatctttcattgcttcacgtagagcattgaataaaagacgttggccttcatgaatcatatcaccagactcacgcatgtagacaaaaccacgggaaagaatgtctggaccagccataatttctttatttttaatatcaactgttgctaccgctaaaactaaaccttcttcagataagatacgacgatcccgtaaaacaacattcccgatatcaccgacaccatttccatcaacgtacacgtcattagcgttgaagtgaccagcagggcgtgcgctatcagccgttaaagctaagacatcgccgttgcccatgataaagcaattttcttcaggaacccctgtatcttgagcgagcgaacatggatttttaacattctaaattcaccatgaacaggcatgaaatatttaggcttcatcaaacgaagcattaatttttgctcttcttgtccaccgtgaccagaagtatggatattattgatttttccgtggataacttctgcaccggcttcagataataagttgattaaacggttaacgcttgtcgtattcccaggaattggtgaacttgagaaaacaaccgtatcgcctggttgaatactaatttggcggtgtgtaccgttagcaatccgactaagcgcggccataggttctccttgagagccagtacataaaatcattgtttcatttgctggcaattgattcagttccgccgcatcgacaaacgttccttttggcactttgatgtagcctaagcgttcgccattgacaatggcattttccatgctacgaccaaaaacagcaattttgcgacctgttttcacggctgcatcagcagcttgttgtaaacggaaaatgtttgaagcaaaactggcaaagataatccgaccatcaattttttcaaagatttttaaaatagaggttccaattgttttttcggattttgtaaaggtgggtatttcagcattggtactgtctgaaagaagacaaaggacgccttcttcacctaatttcgccattctgtgtaagttggccggctcaccaacgggtgtaaagtcaaacttaaagtcacctgttgcgacaatgttaccagaaggcgttttaaccacaacgcccaaggcatcaggaatactgtgagtcgtccggaaaaagctaatcgctgtttttctaaaacgaatcaccgtatcttcattaatttcgtgtaattccgcttctcgcaataaaccatgttcatctagtttgttggtaattaaagccaaggctagtggtcccgcatagattgggatattcgcttgacgtaaaagataaggaacgccaccaatatggtcttcgtgaccgtgggtaataacgagtgctttgactttatgcaaattttgaacgatgtagctataatctggaatcacgtagtcaatcccaagtaaatcatcttctgggaatttgatcccagcatcaataatgataatttcatcttggaattgtaccccatatgtgttttttccaatttcgcctaaaccaccgattgcaaaaacgccagtttcgttattttttatgtttactttcatgttaaaactccgttagagtgaagtccgcatgttcttgctcgtaagcaagatgtttttcgtctaataattgaacgtattcaatattgtatggggtattttcttcaactaattggcgcacgattacatcgctatcggcttccatgtaaagagattttgtgtcttctctttttgggtttctgatttttgtttcttgatagtatactttgtaaatcatcgattcatttctccttcagctactaatagtagcaatttatagtttttttcattttaagacagaaaattaaacacaacaaaacgaggtgctgatcacctaaaaaagaatgctcatcaaaaacatctgttaatgatgaaatgaagcctcgactttgcttcattctgggtatttgattttatgtgttctttttcaaccgtcccgtgtgttgtgaataacaacaattaagcttattttatcatagaatgataaggaagtatagaaacactcactggacttttaaaaaaaacaaacttcttgtttcgccttattcttgatcaagttcgagtgccttttttttaggacgccaataccaacttaagccaatcacgtgagctaaataaacaatcgctaaagtcgtagtcatcaacgtatttcggacaattaaacacggaatggcaaataaaagaaacatggaaataaatagtttccatttacctttacgagtaatttttttctcaaagaaggcttcttggatatatttttgataataagaagaagctaaaaatttgttataaagtttatctgaactacgcatccaaaaaaaggccgttaataaataaaaaccagtggtgggtaaaagcggcaaaaagattcctaacgtgcctaaagcaaacgtacaggaaccgagaaaaatgaagaataattttttcattcaaagggtcctttcagtttttcccaattatggcacaatcaaaaggaagtagcaattttaatcgtataagtaaatcattaaaattatctattttttagaaaatctaaaagagaaaggatagaaagagaaaggctgttttttctagccagacagcttgtattaccgatttctttttgatacagtgggagtactagaaaatttaaagtaagataagaaggagatgattaattgaagttaatgtggcgttacacaatgcgttataagaaattacttttcgctgattttatttgtgtgtttggttttattttgattgaattaggcttgccgaccattttagcacgaatgattgacaaaggaattattcctagagatatggactatatttatcagcaagggatttggatggttgtaattacgattagtggcgttgcaatgaatattttgctagggtactttggtgccagaattacaacaaacattgttcgtgatattcgtgatgatttatttgaaaagattcaaactttctcacatagtgaatatgaaagtattggggtttcttccttaattacgcgaactaccaatgatgcataccaaattatgctcttcatgggaaatattttacgtcttggctttatgacgccagtgatgtttattgccagtctttacatggtgatgcgaacgagtccgtcgttaggaatgtacgttttaggtgccttgccttttctgctgctagcagttgtcgggattgctcgtttgtcagaaccgttatctaaaaagcaacaaaagaacttagatggaatcaatgggattttaagagaaaatctttctggattgcgggtaatacgcgcatttgttaatgaaaaatttgaagaatctcgttttaataaagtcaatgaaacttacactaaaagttcaaaaagtctgtttcgtttaatggcagcagcccaaccagggttctttttcttatttaatattgtgatggtcttaatcatttggagcgggactgttcaaatcagccatggggatttagaagttgggaatttaattgcttttattgaatatatttttcatgcgctgttctcgtttatgttatttgccagtgtctttatgatgtatccgcgggctgcggtttcggcttcacggattcaagaagccttagacatggaaccagctattcgtgaagaagaaggcgtaacagaaacagctactaaaggctatctagagtttaaaaatgtaacctttgcctatcctggacatgcggaaagcccagttattcgcaatgtaagttttaaggcgtcacctggtgaaacagtggcctttattgggagcacaggtagtgggaaatcaacattaattcaattgattccacggttttatgatgtatcagaaggtgaaattttaatcgatggagtgaacgtaaaagagtacaaacttagtgcattacgcaataagattggctatattccacaaaaagcgttactttttactggtacaattgctgataaccttcgctacggtaaggaagatgcgacgttagaagaaatggaacgagcaattgacattgctcaagccacagaatttgtttcgcaaaaaccgcaaggctatgatgaacctctttcagaaggtggcacgaacttttctggtggtcaaaaacaacgtttagctatcgcacgggcgattattcgcaatccggaaatttatatatttgatgatagtttttctgcgttagattatcaaacagatgcaaatttacgagcgcgtctgaaaaaagaaacaacagaatctactgttttaattgtggcacaacgtgttggaacaattatgcatgcggaccgcattgttgttttaaacgaaggcgacgtggtcggaattggcacacatcgtgaattacttgagacttgtccaatttactatgatattgcggcttctcaattgtcagaggaggaattagcatgaaacacgccttttcttctatgaaacgaatcggtcgctatattaaaccgtaccgagtgacgttttatttagttattttatttacaatattaaccgttgcctttaatgcagcgttgccttatttgactggattaccgacgacagaaattagccgtaatattgcggccggcgaatccattaattttgattatgtaatccaatgtttaatttggattttagttgtgggaacaggttattgtgtggcacaatttttgtcaggctttttaatgacgaatgtcgttcaacaatccatgcgcgatttgcgtcgcgatattgaagaaaaaatcaatcgtttgccagtttcttattttgataagaaccaacaaggaaatattttgtcacgggtgacgaacgatgtggatgctgtcagcaatgcgatgcaacaaagttttatcaatattgtttcagcagtcttaggtattgtgatggcggtagtgatgatgttcttaatcaatccgctgatggcgattttttcagtgattatgattccgttgtctctgattatttccagaacaattgttaaaatctcccagaaatatttccaaggaatgcaaaattctttaggagaattaaatgttatgtccggggccgagntcgaattttataat

SEQ ID NO: 70 - DNA, 5794 bp; double-stranded, linear
acagtcgatttcgagcaccggcaacttttgctacatcaatgatagacgtcattttttacctccaaagtggaatgtattcttataagaagtatagcatacatttttttgaaaatagtgcttgacatgggaacattcccataatttatcctaaagatgtaaacgataacaatttaatcaaggaggaagaagacggatgacaagaggagcattaaaaattgcaacaattggtggcggttctagttatacacctgaattaattgaaggatacattaaaagaaaagatgaactgccaattaaggaaatttggttagtcgatattgaagctggtaaagaaaaattggaaatcgttggggcaatggcgaagcgcatgattaaagctgctggtttagattgggaagttcatttaacattggaccgtgaagcagccttaaaaggggcggattttgtttcaacacagtttcgtgtaggattattagatgctcgcattaaagatgaacggattcctttgtcccatggagtattaggccaagaaacaaatggcgcgggaggaatgtttaaagcatttcgaacaattcctgtcattttagctattattgacgatatgaaacgcctttgcccagatgcttggttagtgaattttactaatccagctggaatggttacggaagctgcaattaaacatggtggttggaaaaaaacagttggcttatgtaatgtgccgattggtcatagaaaacaagcggccgaaatgctgggaattccagaagaagacttattctttaaatttgctggaattaatcatttccattggcaccgcgtttgggacaaagaaggacaagagcgaacacaagaactcattgatttaatttacggacctaagcaagagcaagaaagtcatttgaaaaatatttttgatgcgccgttccattatgaacagttaaaagatttaggaatgttaccatgtggttatcatcgctattattatattgaagatgagatgttgaagcattccatcgaagagtatgaacggggcgaaacaagagcacaagtggttaaagaaacggaaggtcgtctgtttgaattgtataaagatcccaaactagattacaaaccaaaagaattagaagaacggggcggcacacactatagcgatgcagcttgtgaaatgattgcatcaatttataatgataaacgaacggatatggttgtttctactgaaaataatgggacaattactgatttaccgtatgattgtgttgtagaagtatctggacctgtgacagctcatggccatgaaccttacaactggggggcctttccgccagcagcacgaggaattattcaaaatatgaaagctatggaagaaacggttattcgagcagccatcaatggtgattacggcgcagcattgcatgctttcactattaatccattagttcctggcggcgtcatggcgaagaccttgttggacgaattattaattgcccacaaagcgcatttaccgaattttgcagatgcgattaataaaattgaagaaacacaaccagaaacagtcacatatgtggccgaattaatgaaaagtaattaaaaaatatcgcacgctaaagattcgtttagtgtgcgatactttttttagaataggaagcaaaggattccgtttttttcttgacagtaaaatgataggtttgttgccggaacagccactgaataccagagtaaattaaaatttcagcaataataaacgtcgaaagtttctgtgcggaaaggaataatagcgttaaaattaaaaataagacgacacaggtataaaaaacatgttgcaattttttagaattgataatcgtgatttctttggtatcttcagtaacttcaatgcgccgataaaattggaaccagccttcatagaacgttaaaacatctccaggatcagcctcaatttcaataggtacattagtaaaaagtttcccttgatgcacaccatttttataaaatgtaaaatagcgtaatgcgccccaagctgatgtttttcgtgtcaatgtaatcttcatggttttcacctccgtctttattttgccmtwggtttcggtaaaattggtatcctactaaagtccgattctctcattttagggtcagaattgacaaaagaaagcagaggtgttaatgtgggagtaattaaacgaggaggtataattgtatgttggcatctatcagaatttggattgactttttgacaaaataaattgaataaatcttatcaaaaagtctgaaattaaaattcatgggtggcgtgtgtacttttatacgaaactacaaggatagcgattaggctgtccttttttgcgtacccaagattctttcgtttcagaaatgaaagaagagggcaaaatgaaaaaattaagtattcatctgaaagacgtaagtattcacttttcgggaaaaccaattctagaaattgatgaattatttgtatatgaaaatgaaaaaattgggattattggtaaaaacggcgcaggaaaatcaacactgctcaatttaattatgggtaagattcaatcagataaaggaaaagttcaaagattgaacgactttcattacttggcacaagtagctgaagaaataacgaatgaatcagagaaaactgacaaaaattgtttgctaaatcagaaaaatcaaaaactaagtggtggcgaaaaagtccaaaaacgcttagcaacattattttcagagtatccaaccggggttattttagatgaaccaaccacacatttagataaagaacatcgtcagttgttagtggcagatttaacgtattattatgggaccgttttgtttgttagtcatgatcgctttttcttgaatcaattagcagagaaaatttgggaagtttcggatggacatgtcaaagaatatttagggaactacgatgcgtattgtcgtcaaaaagaattggaacagcaaacacaatataatgtctatcatcagtatcaaaaggaaaagaaaaaattacaggaatcttacgcaaagaaacaagcacaagcgcaaaaatctagtcatgtttcaaaaaaacaaaaacaaaagcaaattaaacctagtcgtttagctggttctaaacaaaaagataccgtacaaaaagcactccaaaaacaagcgaaagsgwttaatgccagaattgacagattacccgatgttgcgcaagcaaaacaagagcgaaaaattatttttcctactaataatcagttctctttatacaatccatatccaattagaattgaaaatttaactttcgcttatgagaatcgaacaattcttaaccaagtgaacgttcaaattcctttaaacgaaaaaatagcactttgtggaaaaaatggtgctgggaagagtaccttccttcaacaaattgaagcccgtcacccggccatttacttttctcccaaagtccggttaggaacgtatcatcaattagattatcgattaaaaaatgatgaaccactgttgacttatttattgaagcggacaaattattctgaaaagattgtgcgttcacttttatatcgactaggttttcaacaagaaaatttacagacaaagatatcttctctaagtggtggcgaacatgaaaaattactttggcgcaattatttatagaaccaaataatatcatcttattggatgaacccaccaattttcttgatttagacacaatccaagcacttgaagaatttataagtgcctatcaaggaacagtaattttcacttcgcatgatgaaacgtttgtggaaaaagtagccacccgcactatttatttagaaaacgggaaaattattgataaataaaaaaagtraacaaaaagtcgctattttagcgactttttgtttagacttcttcaattggtaaataggtgtattctgcaatttctgcggcatgggagccagcaacatgtccagtgacaaatgcagctgtaacattgtagcctccagtatagccattaatatctaaaagttcaccagcaaaaaataaaccattgactaatttgctctccattgttttaggggtcacttctttgagggaaatcccaccgcctgtgacaaaagatttttccaaaggcaatgttttcgtaacagtgaactgaaagtctttcagtagttccacaaaggaaagmcgttgcttttctgttagttgtttggcaggcacttcttcaaaagattttgtcggaaacacatccaaggctaccgtgacaggttgattaccgttgcgagttaattcttggttaataaaactagaacagcggagcgcggcaggtcctgaaatgccaaaatgtgtaaacagcatatccatttgatgattaactaaaggttttcctttttggttcaaaacagttaaattaacatcttgtaaagagagaccttgcaacgttttatccaggataaaaggttcttcagaaataataggtgattcggtagggtagagcgggctgatggtatgccccatttttttggctagtttatagccatcaccagttgctcctgtggaaggataagtgcggccgccagttgttaatacaacacacggtgcataaattttttccagttcggtttcaacgccaattatttgatcgtcttttcgtagtaattttgtgacctgtgtttttgtaaaaacagtgactcctaattcgttaatgcggttaaatagcgcatcaacaattgacttcgatttatctgtaacagggaacatgcgtccgtgatcttcttcttttaagtgaataccattggattcaaaaaagttcatgatatcatagttatcaaattgtgaaaatgcgctgtataaaaattttccattcccaggaataaatgaaatgatttcttctgcgggccgattattggttacattacagcggccgccaccagtcattaataattttttcccaacacggcgatttttttcaatcaataatacttgagcgcctgcttcggcggccgcaatcgtggccatcataccgctcgtcccagcaccgacaataattacatcaaatttcttcatagttctcctccaattcaataggtagtgtaccataattacgggattttttctggatttaaggaaaaaataaacgtttgactatggtaatttttgaattttcagttaaaataaacctataacaatgagaggatgattaaatggacgcaaaacaatatgttaaaaatattcaagaaaaaattcaccaattagaccaaggtcaaacagaatatttacaagcagtcgatgagtttttaccaaccgtagaaggttttttagaaaaaaatcctcaatacattgaagcaaatgttttaggtgtcttgattgaacctgaacgtatttttcaatttcgtgtgccgtggcaagatgaccagggcaattggcatgtgaacagaggctatcgtgtccaatataattcagcgattggaccatacaaaggtggtttgcggtttcatccaagtgtgaatttaagtgtgatgaagtttttggcctttgaacaaatttttaaaaatagtttaactggtttgccaatcggtggcggcaaaggcggtagtgattttgatccaaaaggtaagtcagatgctgaagtgatgcgcttttgtcaaagtttcatgaccgaacttyaaaaacatattggtccaagcacagatgttccagcaggcgatattggcgtaggcgctcgtgaaattggttatttgtttggcatgtataaaygttgcgcaactatgatgcaggagtgttgactggcaaacctttaggatactggggaagccaagcaaga

SEQ ID NO: 71 - DNA, 4232 bp; double-stranded, linear
attcgtatgccaattatngtggctatttggcgaaaaagccancnggagaagtcagrgnaaaatgtggaaaattataggaagctactgggttttatgctatgatttttaataaaacaaaatgaaggggcgggaaaacatgttatttggtacagcaaaaatgaatcgggaaaatcatttagaaatcggtggttgtgacaccgtaaagttggcgcaaaaattcgggacgccgttatttgtctatgatgtcgctcatattcgcgcacaagcacgtggttttaaacaaacgttaaatcaattaggtatcaaaaataaagtggtttatgcaagtaaagcatttagttgtttagctatttatcaagtgttaaaggaagaagatattgcttgtgatgttgtctctggtggagaactattcacagctttaaaagggggcatggagccagcggaaattgagttccatggaaataataaaacccctgaagaattacgttatgctttggataacaaaataggtacaattgtcattgataatttttacgaaattgacttgttggaagaattattagctacacgaaaccaaacacaaaaagttctttttcgagtgagtcctggcgtggatgcagaaacacatgattacattttgacaggccaagaagattcaaaatttggttttgatgttgcaagtggccaggcaacagaagcactcgttcgtcttttatcaaacccctcttttgatgtacaaggggtccattgccatattggctcgcaaatttttgctgtggaaggctttttagctgctgttgaaaaaatgttcactattttagaagactggcggcaagtccatcaatttacagcacgtgttttaaatatgggtggtggttttggtgtgcagtacacgcagcaagatgagccattagcaccagcaacatttgttgaaaaaattgtttattccttgaaaggtcattgtgaacaattagggtatccactgcctgagctttggattgaaccaggccgcagtttaattgccgaagcgggcacaacgatatatacagttggcgcgcaaaaagaggttcctggtgttcgtcattttgtttccgtagatggtggcatgggtgataatatacggcctgctttgtatcaagcagtttatgatggttttctagcgaatcgtgatgggcatgattcagtcaaggaagtcacagtggttggtaaatattgcgaatcaggagatgtcttacttcgagatattttattgccagaagttaaagcaggggatttattggccattagcagtacgggggcttacggttattcaatggcaagtaattacaaccgaaatcctcgaccagcggtggtttttgtcgaagatggacaagcaaaattagttgctcgccgtgagacatatgaagatatgacaacgttggattgttgatagattaaaagtagccgcctctttttgagacggctgttttttttccaaaaaataacmaaatgtaagggtgatttctttcagaaatgaaaaatccatagtatattaaatgaagaaggaaatactttagaagagggtgtgatttgcagatgaaatggctcctcgggttactgatcatttttgcaataattggcgttgttttttctttttacattgccaattattttttgaaaattgcgttgcttaaagacaacccttggtatcataaaaaagggcatcggttattaaatcctgataattttcaagaacgggaaacaagatatacaaaaatagaagaacaacaaaaacaagaaggcgaagctttttggacagagtcttttgctgaagatcgttggttgaaaattaaagatgaaacattgtatgcacggtgctttattccttatccagataaccatcgttgggcgatttgtgtgcatggttatcgttcaaacggaaaacgcgatatggcatatactgcattacgttttgcagaagaaggctacaatgttttagttcccgatttgcgtgcgcacgggaaaagttcagggaataaaattgggatgggatggctggatcggttagatttattaagttggcttagtgaagttcttgccattgatatggaagcagaaattattttagtgggcggttccatgggagcggctactgtcatgatggcaagtggtgaaaagttaccaacgaatgtccgcggattaatagtggattgtggctacacttctgtttatgatgaatttaaatacgtcctacatgaatcttttcatttacccgcttttcctattttaacaattgctaatcaattagcattaaataactatggctttcaattgaaaaccgcttcttccgtgagacaattacacaaaaatacgttgcccacattctttattcacggtacaggtgatcgctttgttccaatgacaatgtttgaagaaaatttagcggcaactcaggggataaaaaaaggcctcattgttgctaaagcaccacatttatcttcaagtgtctacgaacctgaaaattattacagtagtatttttgaatttttggaagaaaactgtcctgcggtaaaaacaatatccgactaaaaaagacatggattttcatgattccatgtcttttttttgtctgactcgtttagttaaatttaaagtgcttaaaaagaaaaataacggcgccaaactaccaaggcaaagaaaccatttcattgaataagttaactcttgctgtaaaagagattctcgtatatagctgaaaccttcgccatggacccgcaaataaatataaatgtaagcaaaaagaatcactaaaggcaaaatacagacttctaatatttccaaaagataaggaaatgttttatttaataatttgaggcgtgtcttattcaatagataagcaaaaatgaaaattgaccataaaaaaccaaaaaaactaatcaaataaaaaatcagattcgcacttcctgcattcataaaagctttcgggaaaagtagtctgccgatgaatgtatttttaattgtaaaaggcacatcaaaaatggaaatataaagacaaaaaagtactaatgttaacaaggcatgccaaatctttttctccatttcatttaaaaaatatctaattacttggtacatttccataaactgtcgctccgtgtttgaaataatcgtagttttgactataccatagctgttctcaattttcttgaaaaaaatacacgcaaccagcctcgactatacgaaacacacagagtgtctaaaaaataagttgccgatcgcattttttcgcatgctagtgttgcacttctgtttcgttggtgttttctaattgctgatttgttgattaaaaaagggaaggagggagcgtttttctagtataataatataaaagaatatagagaaaatcgtaggatgggagttattcaaagtggcggaaattacagttaagacaatttcagagaaagatgatttaaagaagttgtttttgggtcaagagtatgaccaacagcagccagttaaaaatattttaaaagctagaacatcgaatgtccatattgaaaagtacgaggttgtggaggatgtttttttaaagttaactgggaaggcgaccgcgcacaaagatattatgaactcattttggacaacgtataaaattatgttacaacttgtttatcccgatttctttagaccagcggaggtaattggggaaaatcaagaaagctatttagaaaaaccttctgaacagaattttcttgcagtaaatagcaagtatccgcctcatgattccggaccgatatttaacttattttgaccaagtttttcctgactatttaccaaatcctgtaccaaaaaaatatacatggaatgaatttcttctcgacaattttactaaatttgagcgagttcatcmggacccacaattaaagcgttttgccgaacttacccattcaattggaaacattacagtagttccactaggatttaacagcggaagaagtttatcgtttaaagattattgggattattctttagaacaactttcgatatttttagcttcatttcattcatgggaaagctacgttcatacgtatgagatgcaaccatttttaaatgaacagtatcaaccagtagcgctatggaaaaatcatttgaaaaaagactcgtttatcttacctcagaatatagaggagataaatgaatatttagttcaagtaaatcaacgaatagaaaaaagagggcagcgaatagtgaatcgg

SEQ ID NO: 72 - DNA, 24004 bp; double-stranded, linear
tgganttatggttgggttttnaggttggccgnaggttggggccaaaggttacccgttattttccttggaccaanccactttatttcggaccaaaaacccattttaagaaaccatttgtacccaaatggtaaagcagaagatttagatgctgcttccgcagaatatgaaaaaattatcgatgcacatccagtagatatccaaatcttaggtattggtcaaaatggacacattggtttcaacgaaccaggcacacctctagatagcttaacacatgtcgttgagttgactgaatcaacaatcaacgcaaacaaacgttattttgacaaagtagaagatgtcccaacacgtgctgtttctatggggattggctcaatcatgaaaggtaaaaaaatgattttaatggcttatggcgaagcaaaagcagaggccattaaaggaatgattgacggaccagtaacaacagacatgccagcaagtgcattacaaaaccatcaagatgttgttgtaatcattgatgatgcagctgcaagtaaattataatcgttgatgaaaaagaacttgaaacataagaatttccttatgtttcaagttctttttttgttatactggaagtaatagaagaagaggtgaaaaggatgttacagctaacaattccagaaattattttacggttagtcctagcgatggtgatgggtggcgcaattggttttgaaagacaatataagaatcgcccagcagggatgcgcactcacattttagtttgtatgggcgcggctattattgcgttaattcagtcgcaaattgcaatcaatgcattgaaagatgcgttagctaatccggctttgacgggggtcattcgttcagatcaagcaaggttgatcgcacaagttgtaagtggaatcggctttttaggtgctggaaccatcattgtaacgaaacaaagtgtcaccggattgacgacagcagcgtcactatggaccgttgctggtttagggatcgcggtgggcatgggctactatacgattgccttaacaagttttatcggtgtattatttgccttaaccattgtcaaacgaattattcacgtaccaacaatcaaaaaattagaaattcgctatcaacataaacaagaaaccaaagaatttattaatcagtattttgaagaaaaacatattgaaatttatgatgtgaacttcaatgtttcttgggtggatgatacaaaaatctatacgaatatctatactattgatttgcctaaaggcctaacgtatgccgatgttatcgaagatctatctgtttcaaataatgtaacaaaattacgatgattaatgtgtagaaacatctattataattaatgacaaccgctataagttaaaatgcttatggcggttttcttctaggacctaggactgattttttaagtttaatatttcaaaaagattacaaaagagttatgattgtattacgagttagaaagaaaggtgataagtaagatgaataaaaaaaataaatttcttagtattattgttgttgtcattgtgattattggtgcatttgtgatgaaagcttataatcaattgattactttagataataaagtcgaagcagaatggtcacaagtagagaatgtaatgcaaagacgtgctgatttaattcctaatcttgtcagtagtgttcaaggcagtatgactcaagaaaaagaagttttaaaagaaataacggaagcacgtaaagcatacgcaggagcaaaatcttcttctgaaaaagggcaagcaaatgagcaaattgaaaaaggattaggtaattttgttacagtattgaatgaagattacccaaagttagcttcttctgaaaatgtcaaaaccttaatgactcaattagaaggatctgaaaatcgaatttctgttgaacgccgtaactatatacaagccgttgaaacatataaccaacagatttcaaaattccctgataaaataattgcaaaacttttaggatttgagaagaaaactaactatgttgcgacagagcagggaaaagaagtgccgcaagtaaaatttaaataaaaatttatagaaaatttgggttaaaaagaaagaagtgaggaaggttggataaaaaagtcgaaaaaattcaagaaaaagttcgtttgttttataaaaagcatcagcggaatacaacgattgttgtggtaattagtttaagtatgattttaatattaggaatggctgcttggtatgaaggaaagggaatctcttatgaagcaaaacaaactgcactgagagagaagcaacatgccttacaaaaaaagagagacgatatcttagcagggaaaatgactgaagcgtcaacccagacaacaataaataacttttctaaacaagaaataactggtgaaaatgaattagtgacaattactggaacgaatgggcagttgaacattaatgatgctaatatctatgtttcagataatgcaggtattgtctcaaatcaacttaaacagaaaatgtttcaattgaatcaacaattgttggaaaatgcgaatggcgcacaatttatgcttattaccgttcctgcgttacctagtggggaatctgttgaatcttacagcaataagattgctaatcaattaggtgtaggggatcgtgaaaaaaataatggtgtggtttttctaatggcaattgaggatcgcgagtctcgcttggaagttggatatggcttagagagtattttaacggatagctatgcggatgatattattaataatgaagaagtaaaagaggcttttagagacgaggattataatacaggtctcaataaaattattgatcaagtatcggctgcaatcaattcaaaaaccgcacaagtggataatgaattaacaaatatacaaacagagttaaacactaacacaacgaaaagaaatgttcttttaatggcaagtattgctgggatgctcatttgtgctgtttatattttacaaattttaagaacaagaaaacttgttaaaaaaatgtatcaagattatttgaattgtttaccaacaaaggctgtcctaaataactcagaacagacaaagaaagtattaaataagatgaaaaagacttctttttattgtttatatcttaatggagcaacgttatttgccacgaaagggaaaataagacgtgccactaagcgtggttctttactaagtatatatccaaatgcaaaaaaacaatcttttgggcgtttattagtaggagatactttatatagttatgatggtagtgttttgacgtatgcttatttaaactcacaatacaatccgtctaatcatagtagttctggtagcggcagtggtggttcattcggtggcggctcattcggcggtggcggcgcctcaggaagttggtaaaataaaaagctagaaacgttgatcgtttctagctttttgctatttatctaaaccgtaaagatagtcatcatctttcatggcttcaactgttcctagtaaatagccatttcctacttgggagaagaagtcatggttgctagttcctgtcgaaataccattcattacaatcgggttcacatcattggctgtatccgcaaataagggatccatacctaagttcattaaagctttgttggcgttgtaacgtaaaaaggtttttacttcttcggtccaacctaagtcatcatataattcttctgtataacgttcttcgttttcgtacaattcgtaaagtaaattatacatccagtcttttagtttatcttgctcatcttctggtaattcattaaatcctaattggaatttatagccaatatacgtgccgtgcactgattcatcacggataatcaatttaataatttcagcgacgttcgctagtttattgtttcctaaatagtaaagaggagtgtaaaacccagaatagaataaaaacgtttctaaaaatacactagcaatttttttctctaacggagtaccgtttttataaatttcgttaatccgttctgctttatattgcaggtgtttgttggtatttgtccactcaaaaatatcatcaatctctttttttgtatttaatgtactgaagatagaagaataacttttggcatggacagattccatgaattggatgttatttaagacggcttcttcatgaggcgtccgcacatcatttctcagttgatccatgccgctttctgattgaacagtatctaataaagttaaaccgccgaaaacgtagccgacagtagttttttctaaatcggaaagagtccgccaatcatctaagtcattggataacggaatccgtgtatctaaccaaaattgttcggttaatttttcccaagtggatttatcaatgacgtcttcaatggcgttccagttaattgcttcataatacgttgccatggttattcctcctgtatgctgggacagcagtctgtttgactagttgtctcgtttcttcgcttaaaacgttctacagagtccaaataggagtgtgcagccgttcttctttgtccagtatatctgaaaatgtcctgtttaaaaagagaacattcctaaaaaataagacgctcaagcagaacgccttatttaagtgcttttcattaaatcacgcaagactcacattgattgctgccaatttcttcagcatcatctgtaaatgtacgaatatagtaaattgatttaatccctttgttgaacgcataatgacgtaaaatgttcaagtcacgggttgtttgttttggtgtttctttccattcatacaagccttcagggatttctgaacgcataaacaaggttaaactcattccttgatcaacgtgttgttgcgctgttgcgtagacatcaatcactttgcgcatatccatgtcgtaagcagaagtatagtaagggattgtatcattagctaaataaggcgctggatagtaaatcttaccaattttcttctcttgacgttcttcaatcatacgagtaattggatgaatgctggcactagtatcattaatatatgaaattgaaccatttggcgctacggctaaacgattttgatgataaagaccatcttttttcacagcatcgcgtaacgcagcccaatcttcagccgttggaatctgaatgtctttgaaaatttctttcactttatcaaattttggtgtaaagttgccttcaatatatttatcgaagtaagcaccagaagcataatctgatttttcaaaattatggaagacttggttacgttctttcgcaatttggttactttccattaaagtccagtaatttaataacatgaaataaatgtctgtaaagtctaatgattcttcagagccgtattccatatgatttttagcgaagaaggtgtgtaagcccattgcgcctagtccgattgtatggcttaaacgatttccattttggatagttggcacgacatcaatttcagaagcatctgttacaaaagttaacgcacgcgtcatagcgcggacagattttccaaagtcaggactttccattaaattaacaatgttagttgaacctaagttacaactaatatctgttcctaaaacttcatattcttgtttcccattaataacagaaggcgtttgaacttgaagaatttcagaacataagttactcatgataatcttgccatcaatcggattgtttttgttagctgtatcaatattgatgatataaggatagccagattcttgttgtaatttagaaatttcattttctaagtcacgggctttaattttacgtttacgtatgtttggattggccactaggttatcatattctttggtaatatctacataggaataaggcacaccatattcacgttccacactataaggactaaataaatacatatcttcgttgttacgtgttaattcgtaaaatttatctggaacaataacaccaagagacaacgtttttacacggattttttcatcagcgttttcttttttagcagataagaacatttcaatatctggatggaagacatttagataaaccacaccagcaccttgacgttgacctagttggttagagtagctaaagctatcttcaaataatttcataacagggacaacaccacttgctgcgccatcataacctttgattggtgcgcccgcttcacgtaagttggaaagagtaattcctacgccgccgccgattcgtgataattgaagggcagaattaattgaacgcccaatgctgttcatatcatctgttacttgaactaagaaacaagaaaccaattcacctcgacgtttacgcccagcgtttaagaaagaaggtgtggctggttgataccgttgatggatcatttcatccgccaatgttaaagccaactcttcatcgccatccgcaaaatacaaggcattaaaggcaacccgatcttcatatgtttctaaatactctgttccggcgttgttctttaaagcgtattgagaataaaatttataagccgccatgaaagacttgaattggaaatgttgttcatctaagaaagcatataatttttcaataaagtccattgaatatttttcgatgaattcagtttcaataaaatcttctttcattaaaaagttgattttttcttcagcagagctgaatttacgtgtattcggttctacattttctttaaagaaggctgcgagtgcttctttatctttatttaaagggatttgaccatcaacaggacggttaatctcgttattcagtttgaaatagctgacatctttaatttcttttagactcaatttcttccactactttcttaaaggtctccacgtcttcgtctgttccgctaaactcaaaggagtatagaagcggaacgtgataatcgcgggcaatatctttggcggtatagacaaataattcagcaaaattacggttgcccccaccagctacaccaactaacagttcttggttacttttataatcaagaaagtcattcactacctctgtaatttctgcatcataggtaggaatgacaagaataaaaggctcatttatttcaaaaaaaggattcgctggctcaagttcataagcaggcaaatccaattttttaataaagcgccttgtttgaccggtgactgaaaaataaacaagtttcatcttagctagccaattgttttaattggtctggacggaagccaacaacggttgttgcttcagatgtgattaccggtacgctttggaacccttgttcttttaaccagtcgatagcatctggttgtgcgtcgatattgatttcttcaaaagcgatgttattttcacttaggaaacgtttcgccattttacattggatacagttattttttgaaaagatttttacgttcattgaaagttcctcctctttttttctacatagactagtataaatctatgtagaaaaaagtcaacactttaacactatatattgtggtgcgtttttctcataatactagtttttgtgtttttgaaagaaaaatgaaaacacgtgaatcctcgtttttaggagaaaaaacacattggtcagtgtttgacaaacaaaaaaattaaaattttgaaagagaacatttagtgaaaaaacactaaatgttgtgttgacatttgagttaggcacaagaagaaaaaataagcggatttgttattgaatgagtgggattttacagtagctagtaacataaaaaacaagtgctgactttttttcaaaaatagtaacctgaaaaaagtgtctctatatagaaggaaaatagaagaaaacaggagatacatccagaaattcattgactttccgtgtaagcaagcgtattcttttaattgagaacgattctcattttcgtttgaaactttttcacatggaggaaagtaaatgattacgttagcgcaggcagaagttgggaaagtctatacagtcgaaagcgtccaagcagatattcagacaaagaaacatctgaacaatttaggtgtcgttgcaggccaagcagttgtccttgtcaattatcagaatcaaaatggtattgttttattacataatagtcgaattgcgctgacagatacgattttacaagcgattcatgtggaggagcgctcggcgaatgagaaagtttgggtctccttggataccttaaaagttggagaacgcgctacaatagtagggatccacggacaaggagcggtgaaacgtcggttgatggacatgggcttaacaaaaggaacagtaatttttattcgcaaagtagctcctttagctgatccaattgaaatcaatgtacgtggctacgaactaacgttacgaaaaagtgaagcggaactaatcttggttgaaaaggaggaaagcgaatgactcagcaaattgcactagccggcaaccctaatagcggtaaaacgacaacgttcaatatgttaacaggagccaaccaatatgttggaaactggccaggggtgactgtggaacgcaaagagggggtggcaaagaaagataagacactcattattcaagatttgccagggatttactctctttctccttatacgcctgaagaaattgtggcacgagattatcttttggaggaccaaccttcagtgattttgaatattctcgatgtgaccaatttggaacggaatctttatttaacaacacaattaattgaaactggattaccggttgtttgtgcgttaaatatgatggatttgttggaaaaaaacggccaaacattgaatagtgaaaagttaagttatggcttaggcgtgcctgttgttgagattagtgctttgaagaatcgtgggttggatcatgctttaaaacaaagtaagcagcgagcgaatgccatagagacagaggttatttatccttcttatgataatcgcttagaagcagcacttgctgaaattgttgatattttagggaatactgttcctgaaacgcaacagcgttggtatagtttaaaactttttgaacgagatgttcgaaccaaagagcaattattattgagttcttttcaagaaaaagaaattgaagaagtcattcaaattactgaaaaaatctttcaagatgaaagtgaagcgattatcattaatgaacgctatgcctttattgctcgattaattgctttgtgtgcgacgaaaaaaacagaaatgacatttactcacagtgataagattgaccgagtggtaaccaatcggtggttggcgttgccaatctttgcgtttgtgatgtggttggtctattacttatctattcaaacggttggtacaatggggacagactggttaaatgatgtcttttttggggaatgggttcctcaatttgtgggaaattggttggcgcaatggcaagtagcgccatggatgcaaagtttaattttagatgggatcattgcaggtgttggggcggtgttaggatttttaccacaactggccgtcctgtttttatgtttaggtttttagaagattgtggctatatggcccggattgcctttgkcatggatcgcttgtttcggaaattcggcctatctggtaagtcgtttattccaatgttaattgcgacaggttgtggggtcccaggcgtgatggctagtcgaacgattgaaaacgaacgcgatcggcgaatgactattatggtcacgacttttatgccatgttcagcgaagttgccaattatcgctctgattgcaggtgcattttttcctaaccaaagttgggtctcgccctctgcttatttcttaggggttgcttccattgtgttatcaggaattgctttaaaaaagaccaagcatttttcgggagatccagcaccattcattatggaacttcccgcctatcatttgccacagcttagaagtgtggttcggcatgcctatgaacgatgtcgctcatttgtaaaaaaagcaggtacgattatttttgtttccagtattctcatttggttcatgtcacattattctgtgacgtttcaacccgttccagaaagtcaaagtattctagcatttctaggtaaagggttggcggtgctatttatcccattaggctggggtaattggcaaggggcagttgccacaattacaggattgatagcgaaagaaaatattattggtaccttaggtattttatttggcaatgtgaaagatgtttctgaaaacggggtagaagtctggggcgcactgcaacacacctttacgccagtcgcggcctattcgttcttaacttttaacttattatgtgcaccttgttttgctgcaattggcgcaattcgtcgtgaaatgggagacctcaaatggacattaggagccattggttatcaatgcggtttggcttatatggtcagttttgtgatttatcaattaggccatgtgttagtcgaaaaaggcacactaactctggggacttttttagcgatgggtgttgttttagctggattttatttccttataagaaaaccaaagccagacaaagaaagtgtccaagcaatcacttctttagaaagagggtaataacggatggcaacaattattttatccattttaatttttggaacagcaggaatcatcacctatcgacgaatcaaaaaaggggaaagttgtgaagattgtcaaacagcttgtcctgtaaaaaaagaacaatcttcacaagaataacaactgaaaaaaattccctcttgtataaataatagcggagtgctacaatattgaggtagctgaaaagccattttatacaacgggggcatagctcagttggttagagcatctgactcttaaccaaatgctctgcttgtgaaaaaagctttataaaactttataaataggtttttagtttgtgaatttttttattgccaacatactggcaacaaattgccaacgaaaaaaattctaaaaacaagaaacgataccacgaagatattgtttttttgttttttattctttaaacccaaatgcgttttctaatgcttctgctgcacgctcttttactcctgcagttaaatgtgtatataaattagcagttgtcgaatacgatgcatgtcccagccattcttgaatggatttcatattctgtccactatctaacattattgaagcattagaatgacgcaagtcatgaaagcgaatttttttcaatccatttttcttaatcaacttactcaagcgatgtgttacatattgaggcttcatcaaccgtccatcttccatagtaaatacgtactcactatcttttaaaatataatcctctcctaaaagaatacgattatcttgttgccatttagcttgatttactaatgctcgttcaatcgtttcaaccaaaggcaacgtacgatagctggaagagttctttgtttgatctttctttattaactgggacatattctctggattttctatgattacatggtttatcatgatttttttgtttaaaaaatcaatagcagaccattttaatcctaaaacttcacttcttcgcaatccataaaatgctgttaaaagaactaccaaatagagcttttcttctgacaaaatatcaagtaatttcaagatctcgtgttgattataaacttgagaaacaaattgtttcttttttggctttcttactttatctgctacatttgtacttatcaattctgtaataacagcctcttgaagagctttgcgtataaatgcgtgataatgaatgaccgtattagctgtacagtcatcatttaacatatattggtaaaaatcttgtaaatgataaggctttaacctatttagtttaatttttttaggatagaaaaacttgtaaattcgattatggacataatgcttatacccaacatatgtgttaaatgctacttgtttttttgatacttctaaataattaagcaaatagtcataaaacaataaatctggattagcacattcacattccatagctaattgactttccaattctagtaaaaattcatctctaattttttctgctcgttttttatttcctttcttttttaattttgtatctttccacttttgtctaatttttccgttagagtctttataagatacaattacttgtaatgttcctcttttctcaattatgtttgctcttaatttcaattcaatctctcctcttaaactgaaatatcggcaaaaattttgactattctattatagcatgatttttaccttcatcttgtatttttaatatatactcaatgacagcttttttaggtattttgtaccttgctccaatttttatattttctattgatttatctttcagcaaattataagctttattttttccaatatttaacattttagttaaatcagtaattttcaatatcgagggataactttcaaatattttttcataatcttgaaaatccataaaattcactcctacattctgataataagtattgcacttttttattttaggtgttagaataacaaagtattaatttgggctgttagctcagttggtagagcagatgactcttaatcatcgggtcgcgggttcgagcccctcacagcccattgggtgccaaacccttaaatacagtgtaaacgttggtgcttagcatttagaaaacgtatatactgtatttttttgttttaaaaaaagactgtagtaccccgcttttttactaaaagcccactgtagtcattgatatttttgataagaaaggaacataattatgagtaatgaaattgctaatataacaataatccgagaaactttacaaaactatactgcaaatgaaatctctaaacatacaggattaaatttgagtactataaaaaactaaaaagtggagaacgtttaatagaaaaactaaatttacatgatgctatttgtctcactgaatttggttttaaaaataatagaaaaagtgttgaaatcaacatatggaagtaattcttaatcagctgcttttgtcaaaagcacataggaatttcacctctctccaagtttacggagagccttacggaagtatcattatcccaaattcaaatcatcgctttttatgactataaaaattattttagaatgtttatcgctccttctttacgataagaaatcgtggcacaactaaaatatgctccttggagtgttaatgtactgatagaatgtatttaattttcaatgatcaataggttttctacataaaagaatttactaatcttttaaatattagaagattattttaaacagaaaaagtggaaaggggctttttttagttagttaattttaaattttaagatagcttctatcaatttaatttctagctgtcttagcatatactcatctacataggtaataaattgctccgcctcattaaatccatttgtcaaacataacttaactatataactatgataatgtttgagtatcatcttgatcgaaattggatcttcttctagagcagattgaataacggatagcggaactaatggatactgccgtttttttttgttgtctaccataggtcatactccgtttttaattgttcaactgccttttttcgttgataccagataccacttgtactcatgttgagaattttaccgatttcagtattattaaaacctgcaaaataataaagtaggatgacctttcttcttatctctgataaatgatcaatggctgttgataacttttgatctgaaattaatatttccattccaaacaagaaatagacatcttgttcatcaaaatgagtttgagagtacttgccttcagttgaatctgtcaatggttcctcattatactttatgttagkgtttcgttttcgaatagacgtaatttcgtttcgtaatacttttttgcagtaggcatcaaattggtgttgtatagatttctcattataattttgttgcatgataatatgctcctttttcccctttccactaatacaacaatcagagagcccttttttttcgaaaaaactagaaaaaaacaaaagacacgtagtttttatctacgtgtcttccatttttttcagaacaactgcaaagaaaagaaatacatattatacaaaacaaaaaaatattctaatttttttcatatagaaataactcctattttaaaattataaatcgtaacgaatgcgatttatccaatgtaattttacatactttattttatttgtcaacaaaaaatgaacgatcataataacgttttccaaacttatttcgctagatactattttaattattcttcactatgacatcataataaagttttaatcagaaaatttagacgatatgaaacggaataatcaattaaaagctaaatatgctttgagaaaaaataatttgtttttagcggaagacatatagataaaaactatgtgtcttttatttttctagctttttcgaaaaaaaagggctctctgattgttgtattagtggaaaggggaaaaaggagcatattatcatgcaacaaaattataatgagaaatctatacaacaccaatttgatgcctactgcaaaaaagtattacgaaacgmaattacgtctattcgaaaacgaaacmctagaataaaagaaaatgaggaactattgaacgtctcaaatgaagctaagtacccttactcattttgatgaacaagatatctatttcttgtttggaatggagatattaatttcaaataaaaagttatcaatagccaaaccagttattggacataaaaaattttttattttgcaagtttaatgatactgaaatcgataaaattctcaatataagtatgaatggatttaatgaagtggtcaatttattacctatgtagaagagtatacattgagggagttataaattttcagaatctatattgaaatttaaagttaaataattaaaaagtcccctttcaattattttggtagaaaatttatagatcattgaaaattaaatacattctagcagtacgttaacacttcaaggagcatattttagttacgccatgatctcttatcgtaaagaaggagcgataaatattctaaaataatttttatagtcaataaaaagtgatgatgtgaagttgggataatgatacttccgtaaggctcgccgtaaacttggggagaggtgaaattcctatgtgcttttgacaaaagcagctgcttaagaattagttttaagagtaaattaagtaagacaaaaagcatcatgtaagtttagtttttaagcacttaattttgtatatttagagatttcatttgtagtatattttttagtttcttgaattttattatattaactatttcattactcataatcatgttcttttttttaaatctaaatgattatagtttagtaaaaaagagaggatggagtcccttttgagaatataaaatacggtatatacgttttttatgctaagcaccaatgtttactctgtatttaataaactaacataagagactataacctttgacccgataattatgattatagttattagtataaatctttaagtaatagaaaagatgtgttgaatgaagtatacattctgtaattaacaatgaatcatcagtcattggataggaggctttattttaaaagtgttaaacgattcatctttaaggtgtagacaagaataagtaaaaataaaaagctaactatctctcgaaattaaatattctacagaatgttgtttagaaaaaaggactagtaacaaaagctacctacattaggtagcttaaaagagtgaaaagaatatatgttaaattactaattttatagcataaagtaaaatatttgtcaaaaaaaagggggaggggagaaggatgtattgtgcacgtgatccatgcagaaagaatcattgcctataaaatamaaaaatttacgaggagaatgattcttgaagcaacaaatgaaagcaaaaaaacaatataagacatataaagctaagaatcactgggtaactgtccctattctttttctaagtgtgttaggagccgtaggattagctactgataatgtacaagccgcggaattagatacgcaaccagaaacaacgacggttcaacccaataaccccgacctgcagtcagaaaaggaaacacctaaaacggcagtatctgaagaagcaacagtacaaaaagacactacttctcaaccgaccaaagtagaagaagtagcgccagaaaataaaggtactgaacaaagttcagctaccccaaatgataccacaaacgcgcaacaaccaacagtaggagctgaaaaatcagcacaagaacaaccagtagtaagccctgaaacaaccaatgaacctctagggcagccaacagaagttgcaccagctgaaaatgaagtgaataaatcaacgtccattcctaaagaatttgaaacaccagacgttgataaagcagttgatgaagtaaaaaaagatccaaacattaccgttgttgaaaaaccagcagaagacttaggcaacgtttcttctaaagatttagctgcaaaagaaaaagaagtagaccaactacaaaaagaacaagcgaaaaagattgcccaacaagcagctgaattaaaagccaaaaatgaaaaaattgccaaagaaaatgcagaaattgcggcaaaaaacaaagcrgaaaaagagcgytaygaraaagaagtcgckgaatacaacaagcataagaacgaaaacagctatgtcaatgaagcgattagtaaaaacctagtgttcgatcaatctgtcgtgacgaaagacactaaaatttcgtcgattaaaggcggaaaatttatcaaagcaactgattttaataaagtaaatgcaggggattcaaaagatatctttacaaaattacggaaagatatgggygggaaagytactggcaacttccagaattcctttgtaaaagaggcaaatcttgggtctaatggtgggtatgcggttcttttagaaaaaaataaaccagtgacagtgacctatacaggactaaacgctagttatttaggacgtaaaattacaaaagcagaatttgtttatgaactacaatcctcaccaagccaaagtggaacgttaaatgcagtattttcaaacgatccgattatcacrgcttttattggtacaaacagagtcaatggtaaggatgttaaaacacgcttaacgattaagttctttgatgcgtcaggtaaagaagtactaccagataaagatagtccatttgcgtatgcgctgtcttctttaaattcaagtttaacgaataaaggtggccatgcggaatttgtttctgattttggggcsaacaatgcgttcaaatacattaatggytcrtatgtgaaaaaacaagcggatggaaaattttactcaccggaagatattgactatggcacaggaccttctggattgaaaaatagtgattgggacgctgtaggtcacaagaatgcctactttggttcaggtgtaggtctagcyaatggrcgtatttccttttcttttggtatgacaacaaaaggaaaaagtaatgtgcctgtatctagtgcgcaatggtttgcctttagyactaacttaaatgcgcaatcagtgaagcctattttcaattatgggaatccaaaagaaccagaaaaagcaacgattgaattcaatsgatacaaagccaatgtcgttcctgtwcttgtgccraataaagaagtcactgatggycagaaaaatrtcaatgatttaaatgtgaarcgtggcgattctttacaatacattgtgacaggggatacgacagaacttgccaaagtagatccaaaaacagtaacmaaacaagggattcgagatacmtttgatgcagaaaaagtgacgattgatttatccaaagtgaaagtttatcaagcagacgcaagtctraacgaraaagactyaaaagctgttgctgcagcrattaattcaggaaragctaaagacgtgactgcttcttatgayctcaatttagatcaaaacaccgtcacagcaatgatgaaaaccaacgcrgacggytcygttgttttagcaatggggtataaatatttacttgtcttgccgtttgtagtgaaaaatgtagaaggcgattttgaaaatacagctgttcagctgacaaaygatggngaaacggtaacaaatacagtgattaaccatgtgccaggtagtaatccttccaaagatgtaaaagcagataaaaacggtacagttggcagtgtttctctacatgataaagatattccgttacaaacaaaaatttattatgaagtgaaatcttccgaacgtccagcyaactatggcggaatyacmgaagaatggggcatgaatgatgtcttggacacgacccatgatcgtttcacaggkaaatggcacgctattacraaytatgaccttaaagtaggggayaaaacgttaaaagcaggaacagatatttctgcctacattcttttagaaaacaaagacaataaagacttgacgtttacratgaatcaagcattattggcmgcsttaaatgaaggaagcaataaagtaggcaaacaagcttggtctgtgtatctggaagtcgaacggatyaaaacaggtgacgtagaaaacacgcaaacagaaaactacaacaaagagcttgtkcgttctaatacsgtggtgacgcatacrcctgatgatccaaaaccaaccaaagccgttcataacaagaaaggggaagayattaaycatggaaaagtkgctcgtggtgatgttctttcttatgaaatgacntgggacttaaaagggtacgataaagactttgcctttgatacagtcgatcttgcgacaggcgtttctttcttcgatgattacgatgaaacgaargtgacaccaatcaaagacttacttcgtgtcaaagattctaaaggggnagacattacgaaccagttcacgatctcwtgggacgatgccaaaggcacggtgacratytctgccaaagacccacaagcctttattctagcgyatggtgggcaagaattgcgtgtaacrctccctacaaaagtcaaagccgatgtttctggkgatgtttataattcagcggaacaaaatacatttggycaacgaattaaaaccaatacygttgtcaaccatattccaaaagtgaaycctaaaaaagacgtggttattaaagtyggtgacaaacaaagtcaaaatggygccacaatcaaattaggggagaarttcttctatgaatttacaagtagtgacattcctgcagaatacgctggwgttgtggaagaatggtcgattagcgataaactagacgtcaaacatgacaaatttagtggccaatggtctgtgtttgccaattctaattttgttttagcagacggaaccaaagtgaataaaggggacgacatttcgaaactattcacgatgacctttgaacaaggggtagtgaaaatcacggccagtcaagcctttttrgatgcgatgaatctaaaagaaaacaaaaacgttgcacactcatggaaagcgttcattggtgtagaacgaattgcggcaggagacgtttacaacacaatcgaagaatctttcaacaatgagaagattaaaackaatacggtagtgacrcatacgccagaaaaaccacaaacrccaccagaaaaaacagtgattgtaccaccaacaccaaaaacaccgcaagcaccagtagagccattagtggtagaaaaggcaagtgtrgtgccagaattgccgcaaacaggcgaaaaacaaaatgtcttattaacggtagctggtagtttagccgcaatgcttggcttagcaggcttaggctttaaacgtagaaaagaaacaaaataattgaagacgaaaagaaggacgaaytgmttgtccttctttttttagttatggaggggaaamattggaagcagtagtagtagaaagagaggcaaaggggatgaaagaaattgccatccaagaaaaagatttgaccttacagtggagaggaaacacaggtaagttagttaaagttcgattraaraatacacgtgcaatggaaatgtggtacaacaaacaaattaccgaagaaaacattcaagagatcaccacgttgaatatyattaaaaayggaaaatctytggcattagaagtatatccagaaaaaagtatctatgtgaaaccaaatttaggcagaatcaatgtgcctgtcttttttatcaaaacacctattaatagagggatttttgaagagatcttcggcgaaactttaaaatcataaataaaaaattatttggaggaaattacaatgaaaaaaattattttatcaagcttgtttagtgcagtactagtattcggtggcggaagtataacagcattcgctgacgatttaggaccaacagatccagcaactccaccaattaccgaaccaactgattctagtgaacctacgaatcctactgagccggtggatcctgcagaaccgccagtaataccaactgatccaacagaaccaagcaagccaaccgagcctacaacaccgagtgagccagaaaagccaacagaaccaacaacgccaattgatcctggaacgccggttgaaccgactgaaccaagcgagccaacagaacctagtcaaccaaccgagcctacaacaccaagcgaaccagaaaaacctgttactccagaacaaccgaaagaaccaactcaaccagtgattccagaaaaaccagcagaaccagaaacaccaaaaactcctgaacagcccactaaaccaatagacgtagtcgttacacctagtggagaaattgataaaacgaatcaatcggcaggaacacaaccaagtattcctattgaaacaagcaacttagcggaggtaacacatgtaccaagtgaaactactccaattacaacagaagctggggaagaaattgtagcagtagataaaggtgttccgttaaccaaaacaccagaaggattaaaaccaattagcagctcgtataaggttttacctagcggaaacgttgaggtaaaagcaagtgatggaaaaatgaaagtattgccacatacaggagagaaattcacactccttttctctgtattgggaagcttctttgtattaatttcaggattctttttctttaaaaagaataagaaaaaagcttaatcagaaagagtaatttcgataaatttctgtgaggaaaggaggtgctttgcttgtttattttatttactacmaagcnaagtcatgtattactaaatgaattagggtttaatagaaaaattgacctggtacaaggtattgaacagttaacaaaaatcaatgcggatttaaaaaaatcgacggatcgaattctaattacgtatgagatttattacaacgtgacagacgagaaagcttttttaagagaaacaatgactttgccggtagttgaggaaactgtcctccaaaacatggtacagactgtagaaaccaatgaagaagtaagacaagaagatttagaagcgtttctttacctgttcaaaagaaatgtgagtaataagtcgaagagaataggccgttcaacaggttctttaaaaaagaaagcagaaaagcaacaaaaatcaactgtgtttacaacaatttctcgctatagctatttctcagtggctttacttatatttttagcagtaggtgtttttacaggtgcgtcatttggttctcaaagtaaaccaacgagccaaaatgattctaagttagaggaacgattaacacatttacaagaacaagtgcatgagcaaccacaagttgatgttgttgctcggtttttcttatccagtctgtactctggtgaagagagtgacaaagccacgcaaaagcaagttaaaaagtatgtttctgaaggtgtactcaaagagattaaggggtctaaagaacaaataagaacgttatttctttgggaatcaaaaaaagaaggcaaccaatggctccttacgtacgttgttaccttgaaagtggctaaagaagaaactgaaattcgtcaaatgaaagtagctatggaaaagaaaaacaataattatcaagtaacagaacttccagaagaaaaagaatttactattaatgaataataattgaggaggcaattctatgaaatatgaacgtccattaaaaagagagtcacaaatcaaggagtttgagttaggcacgcacgcggcagtaattgaaaaagttcaaaagaaacggtctcaaaaagggaatgatatgtttttactctctcttttgggaaaaagtaacgaaaaaggggtttattttcttaccttcgggaatgattatactgaagataatttacgctatattttagccagtatccaagacaacggtgtagagattccagacgttgactttggctataatcgagaaacttttgaatttctgaaaggtaaagatgtctatattcaggttgaagamcaagagtataaagggaaagttaaacatgcggtaacaaattttttaactcaggatgaatttgaagaaagcgaagaaatggagttttcagaaagcaatactgaagaagattggtaaaataagccatttcttagaatataaaaactgaaggagagacaaaactatggatatagtcacaaaaattattacactaattggaggaatcattggacttgtttcagcagttagtattatgtttggcgtgaaagaaattcgttcaggtatgtcgaatgatgatccacgtacgcttgataaaggaatagaaaaagtagttgttggtggggctgttattttagcaattggtggggtagtcgcctatgttattacacaggtaggagctattcgtttttaaaaggaggaaaaaaatgaagctattagtagaaatgatagtcaacggtcaaactgaatgggaagttgtagaagaagaaaatgcgccacaggcaattattcagagtcgaggaggcttttcatttgatgagaatggagagctcattgtcaatgatgatgaaataagttatacaggcgtgtttgaggtttgcgagactaacttattggatttcactgttaaggaagcagaaatccatagattttatcacaaaaaattagaaaagctagggatagatcctctaacgtttgaaaactcgcmagaaatagctaactgagcggaggggaagcnatgagaaatccaaaaggaacgaccgatcagctatttaaaagtttagctgaatacmatccmacmacgaatgragccatgtctaaaatagcgaaagtcctagtccctttaggaatcgctattttaggcattctttttatgattgaattggcgaatacccaaaagaaatttcaatcagaagacggtggtttgacaatcgagctattaactaacattgcattgaagtatgtaatcgcgtacgtctgtattatgggttctggctacattattgatggcattgtttggtttacaattcaagcagccaaatggattaattccattgtaacagcgacaggaacaagtgaagcgatcccacaaatggaaaaagtttcttggtgggcaaaaccaattgtatttttctttcaaatatttgcatatattgcattaatattatctagtattattgcaaatattcttattttcttacgagggatacaattgtatatgattaaagctcttgcaccgttgtttgtggcgttttttgttcatgatgaattacgttcgattgccatggggtacatgaaacaaatcatggcctatgcgcttcaaggcgttctgttggttctattacttgggttaattccgatattaacagcaaacgattatctatcctttgaatctcttgaaggtggcattttggcaggtgctggagcgatcatcattaatgttatgacgtactttaatttaattttaaaatatgtggcagtgattattcttctagttggttcacaaggatttgccaaacgattagtaggagcgatgtaaaatggcgattagttcagaattctataragatttgtcaaaagtagagaaaaaaatctggggaattacagtcagagaatttaaagcgtatgtttgctttgtttttatagggatatttcttctgttagaagtattttttttgcctgatcttttatttatggtttgtgcgttag

SEQ ID NO: 73 - DNA, 2707 bp; double-stranded, linear
atttgaaacctgttgttgaatccatgaatactactggttggtaatttgganngatatcttgtttcatacgttttttcgctcctttgccctgatccatttgctgtatcagagttattttgtcggtatacaacaatgctatcttaccatgttttcagttggtatgcaattatctttttggatttcttttaatttgtttgccaaacgaaacatcatggaaaacttcaaataattgttgattattttgggtccgtttcaacatttttatgaattgatccgtatattccagcgagtctcctgacatattatttctcaatttccacgtttcttctagttgttctggtgtcattagcaactcttcttttcgcgtacttgattttttaatatcaattgctgggaaaatacggcgttctgctaattcacgagataaatggagctccatgttgcctgtacctttgaattcttcatagatgacatcatccattcggctacctgtatccaccaatgccgtggctaaaatagtcagactgcccccttcttcgatatttctggcagcaccaaaaaatcgtttaggtttgaaaaacgcagctggatctattccgccacttaaggttcgaccactaggcgggaccactaaattataggcccttgctaaacgagtgatgctgtccattaaaataactacgtcccgtttgtcttcaactaagcgcattgctcgatccagaaccaattcagcaactcgcgtatgattttgtggttgttgatcaaaagttgaagaaaccacatcgcctttaacgcttcgctctaaatcagtcacttcttcagggcgctcgtcaattaacaacagaatcaattccacatcaggatgattttctgtaatcccattagcaatttcctttaaaacacttgtttttcccgcttttggcggcgctacaattaaaccacgttgcccaaaaccaattggggcaaatacatcaatcattcgtgttgataatctgccagccgttgtttctaacgttaattgtttttcaggatacaacggtgttagcgctggaaaatgtggccgctctttcgcttcttcaggatctttcccattgacactttcaacatgcatgagtccatagtaacgttctgattcctttggcggacgcgccttgccagctactttgtccccatttctcaatccgaaacgacgaatttgagaagaagaaatataaatgtcttctgcacttggtccataattaattggtcgcaaaaagccataaccatcctgagaaacaatatctaaaattccttccatgaagaaaaacccttgcttctcagcttgtgcacgaatcacagctaaagacaattcttttttggtcatttggcataataaggattttaactctttcgcgtagcataaatatcttttaacgtactgttttccaattcagccatgtaaatagtcgctcattgatccacctcaancggaccttcttgttcttcggtttctagcatttgaatatcagcgcctaaagcagttaacttttcgataatgtggtcgtacccacgtaaaatatattctacattataaatagtggtcgtaccttcagccatcaagccggcagtgactaggcaagcgcctgcccgtaaatcagaggcgactacttctgcaccgtgcaattgatttgggccatttaagataatcatattgccttcaaccgaagcatcagcccccatccgcaccaactcagggatatgcttatttcgttgagcataaatcgtatcaataatttcaccagttccttgtgcttttaaaagtaatggcgttaacggttgttgcaagtctgtggcaaaaccaggatacggataggttttcaccgtcgtcattttcagatcatgtgatggatgaacttcaatcatgtcttcttcaattgtcatcttaacgcccatttcttgcaatttcgcaatgaagctttctaaatgctcataaataacatttcgaaccttgattccttcacccatagctgctgccatagctaaataagtcccagcttcaattcgatctggaataatcgagtgacgacagccatgtaattcttcgactccttcaatccgaataacatccgttccagctcctcgaacttttgcacccatgttatttaataatgtagcaatatcaataatttctggctcacgcgcagcattttcaataatcgttttgcctttggctttaactgcggctaacatgacattgattgtagcgccaatagataccatatccataaaaattcgggttccttgtaagccagcttcgtctgttctcaagtacatcgccccatgttcgttggttacatgagcgcctaatgcttcaaatcctttgatatgtaaatcaattggacgagggcctaagtaacaaccgccaggtaagccgacaacgccttccccaaatcgaccaagaagtgagcccataaaataataggatgcacgtaagctattgatttttccttttggcattggcacagaaacaacttctgttgggtcaataattaatgtattattttcaaaagtaattttagcacccataatttctaaaatttcaattaatgagtgaacatcctgaatgtcaggaacgccatctaaagtcacgggcgaatctgctaaaatagcagctggaattaaagcgaccacactatttttggcgccgctaatggttacttcgcctttt

SEQ ID NO: 74 - DNA, 10636 bp; double-stranded, linear
tcaccttattgatagcgcttccttatattgnaataatgcgattttctaaacaaaaaattataggtggtattgataatgaaaaatccgtatgtccaaataaccgaccaagaacaatataaaaagtcaattcgtcgaattcctccaaaagatcctaatatttttttaattgagagacctacagcaggtgagattattgctctatggtggacaacctcttcccgtggcaaatcaactgataaatatataccaaaatatttcaagcgtatctatcgagtagatatgattaaacaacgtaaactattcatcaaagctaacgttatctccgaagaaaataatacttatgtactgactgaactaggagaaatgttagtacataaatacttttatattattgaagagcataataattcttccaatgattctttcaatactgaacgaagaaagttagctgataaaattctatattcgctaggcggtgaaatataatgcaaacggaagttaaagagtttattgcttttgatattgaaacaacaggtttagacttccatcaggatgctgttattcagatatcagctgcaagatacgttgatggtattgaagttgattattttgatacattggtaaatagtgactacattccagatgaaattaccaaattaacaggaatcactaatgaccaagtactaaatgcgccaactttagatgaagttatgccttatctttttgattatttaggagatacgattctagttggacataatataaaaagttttgactttccttttttaaaagcaaaaggatataatattgcagaaggacatgaaatttatgatactcgctattttgcagccacacgaaagcatggggctgtaaacaatcaattaactacattgaaattactttttggtatcgatgcgatttcacataatgcattgaatgatgttaggatatctgcaattgtatttatggaattattaaagatagaacctcaagaaaaaagctctactcttaagaaaagtagcttggactcttttgaattagatgatgatactacacctttttttgaaggaatgtcttttgtagtaacgggggcatttgatgattctaaatataaccgtaaacaaattgaaacactgataaaacaacatggcggtagggtatcgtcaagtttatctgccaagactgattactttatccaaggtattcaaatttcttcccaacttaaagacggaaagcacagcagtaaagaactaaaatatatagagttacgtgaaaaaggggttgatatttataaatttaatggtaatcagttttatgaactaattacaaactatagaaaattgaggaaaaattaatgacagaactaaagaaaataacttcaaaaaatggacatgtttacctctttaaagatatacaacataaacaacgaaatgagttaggcatagcctctggacaatcagtactgatttcaatttttgaaccggatccattctattttacagaagatattcaacttattcattataaagatatcgttaaaaccgaatccgtttcttcaaaagaaaatgaattttttgaatatgtaaaacaaaattcaccagttgcttataaaaagaaaatctcggatagttatagtatctctgagtatattaattatgctccacaacttaaatttaagtatattataaaagatagtatactaactattacgggggaaattaaagacagaaatgttaactttccaatttctcagccttacgtatatgtcgataaaccagaaaatgaaattccgttagataataatttaaaattccaatatgtagtcaacgatttcgatatacatgctcccgaatacaaaatatcgtttattttaggtacttcaaaagccgagtatggtcgttctttcaatatgaaaaatttcgaaggtgttttacgcaccccatctgaaattagttctatgaaagcaaaaaaaaagaaatagttacttaaataaagcaaaaaagttctacgcctaaaattcgaatttagacgtagaacttatttatttcaatgtccgaaccaaataaacttcttcacaaaagcctttaagtccattataaatccgttgtgctcgtgttttcttttcacataaagcaaagactgtcggtccactgccgctcatcaacgctgcatcagcgccgtacttcagcatgcgatccttgatttgttgcacgattggatgtctggcaatcgtgacactttccaacgcattgccaaccgtttgggtcatcccagtataatccccattttcaatagctattcttagtccagcaatatctggatggtgcaattcatctaccgctaaatcattaaaaacggtactagtggatacactaattcttggtttaactaacacaatccaacattgaggcatggtcggtaatgcttcaattttctccccacgtccgtttgcaaaggctgttccgccccttaaacaataaggaacatccataccaatttggctgccaatttcacagagttcgtccatcgtcaaccccagattccacagtttgttcaagcctcgtaatgctgcggcacagtcactgctcccccctgctaaaccagctgccacggggatacgtttttcaatatatattttaattcctttatgaatattataggtacgctttaataagtcaactgcttgatagacatgattccgtcgatccacgggtaaaaaagagctgtccgtttcaatacgaatgatgtcttcttctagattttcaaaagttaaatgatcggctaaatctacacttgcaaaaatagattcaacttcatgatagccatccacacgtttatgcagaacatctaacccaagattaattttcgcaggagctcgttcgattatttccatcggttccctgattcaccttccttaatcttttgtctaccaacattttaatcttttagattctatcatatgtccatgaagaagtacaccgaagattgctctttctctgacgacagatggctgaaattaaaaagagcttaggaacgaagggctcttccttcactcctaagcggactttctaaattatacggcttgaccgatgaattcgatttcaacggtgcgtgttaaaacatctgaatagctataagatacacgttcaaatgagttctcgtctggatccaagtcaacaacaaaaacagatggataagtctccgttaagattcctttacgttctgtttggcgctttcttccagtctgagcaactaacataatttcactgccgatacggccttccaaatctttcttaattgacgataacgttgttggcattgcattcacctcgagaaacattatatcactttttttaaaaaatttcaagtttatcatactagaagtctgtttgcaactacttttgctcgacaaaccggctgttttgtcgaatttttattcattttctaatgtatatttcatttttgctttggcacgatcataggcacttcggacagctgaaaaagttcccccacgtactttagcaatttcttctaacgtgtagccttttaagtatgcgtttaaaatttgttgttccaacgaggaaagacgtgtcggaaaagctgccaatttttcttgaatcattaattgacctaatgggtcggtagccgctgtccctaaatagtccactaactcttcaccagcgctttctaatcgttgttccagagaaatagacaaggtatctgttcgccgcttataggcgcattgatggcgaattaagctatgtacgtgattttcaaaatttcgtttaaaaaactttcctaatgatgcttgtttttctgaatcaaatcgttctaacgtccgaaagaagacaattcgcccttcttgaagccagtcctcagtatcataatcttttaaatagtattttttcatgcacttataaatcactggctgatattgcccatataaggcttgaaattgttcttggtctcctgctaatgcttgttgaatctgttctaacataaaaagccctccttttcgataaacgtatcgaatgatttaggagagcatagcatgttagaaatttatgacttaagcgaacatttgtttaatcttttttttgagacaattcttctagcttctcagaaagttttgataactgctccacgttccatggagaatttcgacgaaattgctggaaatggatatccgttgcatgaatggcaatcgtcttttctgttttctggacagctttgtaaagttcattggccgaagtccgcaatgcaccttgtgaaaagaccacccattgttcagccaaatcactcgttgcgactgttacttgcgttaaacgatcatttttttcaccagctagacgttcaatataactatctgctgtttcatcttctttggtgaaaaccacggtcaaaaggtactttttgtacgtttgctgaatacctgggactaattgggcatcaaagaccacaatgatttccaacccttcatatttggcgtaattggacagacgactaagaagcagttcacgcgcatcctctaaacgctcttgctttttcaactggaccaattctggccaagcaccaatcatattatagccatcaacgattaacaattgttttttcatacaatcgccttcttctataatgggttgcggccacgatagacttcatacattagcaagcctgcagccacaccagcgtttaagctttgaacgtgtccagtcattggaatcgttaataattcatccacttctttatgaagaccttgactcatgccacgaccttcatttccgatgattaaggcaattgcgccttgtgtattccagcgacgataatccgtcccagacatatctgtaccaaaaatccaaaattgattctcttttagcgttgcaatactttgcgctagattcgttacacgagccactggaatatgttccacggcccctgttgacgctttggttacggttggtgtaattcccactgcacgatgtttcggaatgataataccgtccacgcctgtcgcatcagctgttcgcaaaattgagccaaagttatgtgggtcctctagactgtctaaaattaggaaaaatggtgttgctgtcttttcttttgtttgttccaataattcttctaaagttaaatattgatacgccgtgattgctaaaaccatgccttgatgcacgccgtgatcactcatcgtatctaattttgctttaggcacccatttaactggaacagcctgttctttcgctgcttgttttaattgctcaattttctcgccacgagcatcttcttgtaaaaacaatttattcccgcgtccttgctgcaacgcctcaacagtggcatggaaaccaaagacaaagttatctgctagctcttctgaggttccatcagcacctgctgtcgctggtcgtgggttccgttcttttgaacgcttatctgaacgtttcttaccttttttaaaaggacgagatttttcatttttcattggtttcacctactttcttgatacaccagttaattaattcttctaaacgttctttttgttgtgttaaatgtaaataacccatcaaggattcgaaaccggtcgctacccgataggtcgtcacatcagcatttttggcaaaggtgtgacttttagcattccgaccgcgtttgtacatcacttcttcttcctccgttagcatttctcccgctaacatcgcttgcattaagcttgcttgggcttttgctgacacgtaatgtgtcgccatgcgatgcaaaacattcggtttcgtttgtcccaaggaaactaaataatcacgaatgtaaatttcataaatcgcatcgccaacataggccaaagctaaaccgtttaattgtttgtaatctctcattcacttcttctccatctcgttccttgcggagtatcttctaaaacaatgccttgttcttttaataaatcgcggatttcatcacttcgggcaaaatcacggtctttccgtgcttggttccgttcttcaattaacgcatcgacttgtgcatccactaattcttcgtttttaaagaataaaccaaaaatagctaaccagccactgaaaagcttatccatcgccactagaactggttccgaaactgtcgcttgttcactgtactgattcatcatcttcgctaattcataaacgaccgtaatcccgttagctgcattgaaatcatcgtccatttccgtaataaaacgttgttctaattcgtttaattgagccaaatagtgttcatcctctggcaaacttgcgaccgcatctgcttgtctaaaacgtaaattttcaaacgcatttttcaatttttgataattggctgctgcctcttttagagtgctttcgctataacgaatcgggcgacggtactgggtggtggacataaagaaacgtaaaatttgcggatccactttttgaatcatttcatgaacagtaatgaagttacctagggatttactcattttttcatcgtcttcaccaattgtgacatagccgttatgcatccagtaattggcaaaggtatggcctgttttggcttcgctctgtgcaatttcattctcatgatgtggaaattctaaatcttgtccaccaccgtgaatatcaatcgtctcttccaagtgttttgtcgccatgacagagcattcaatatgccagccgggacgtcctttcccccaaggagaatcccaagaaatttcatcttctttggcacttttccaaagagcaaaatccaatgggtcttcttttaattgttgttcaacgccagttcgttgacttgcccccacttctaattcatcaatcgattgatggcttaatttaccataattagggaatttacgggtgcgataatacacatcacctgcgacctcataagcaaaacctttttcaattaaaacttcgatgaaagctaagatatcaggcatgtggtccatcacccgaggatgtaacgttgctggttggacattcaatgcttgcgtgtcttcttcaaaggctttgataaaacgctccgccacttccggcgcagtaattttcaattctttagctgccttgataattttatcatcgacatctgtaaagttcgagacataattcacttcatacccacgatattcaaaataacgacgaatcgtatcaaaggcgatcgcactgcgcgcattaccgatatggatatagttatacacggttggtccgcagacatacatccgaactttacgcgcctcaattggcgtaaatacttctttttctctggtcaatgtattataaattttaatcatgccctttttccacctttcttccatttagacgaacgactttcgcaggaacacccacagctgtggcatctgctgggatgtctgaaataacaacagcacccgcaccaatttttgaacgttcaccaatcaccactggccctaaaatttgagctcgtgccgaaatcatcgctccttttttcactgttggatggcgtttacccgtatcacgaccggtcccacctaacgtcactccgtgaaacaaaacaacatcttcttctatttccgcggtttccccaatcacaatgcccatgccgtgatcgataaaaactcccgctccaattgtggctccgggatgaatttctacgcccgttatgaaacgccaaaattgtgcatgaatcttcgccaacaaaaacaactgatgcctatataagaaatgagacaagcgatgccaaaacagggcgtgcaagccaggatacgttaaaagaacttctagtgtggtccgcgctgcaggatcgtttcttttaacagctgcgacgctacgtttcaaccaactcatatggtgaactcctttctattatacaaaaataaaaaacgtcttttaagcaacaaaaaaacgttgcttaaaagacncccatgcgtggttccacttttcttcacaagaactagctcttgcctcgatacagttaacgcctgccgacgtcttcggttacttttttcaccaaagccactcatagatgcatttcgacaaaagatgctcgctgttctcaccacccacagcgtctctgaaatccatctgattgtctacttcttctattctttgtgtttttataacactttatttaaatgatctaatgctttttctttgcctaataattcgatggtttcgcctaattcagggccatgcatttgtccagaaacagcaattcgaattggcataaacaagtttttgcctttaacgccggtttctttttggacggctttaatcgctgctttaatacttgggacatcgaaaacgtccaaggcttctaattgttctttaaacgcatgtaacacagttggcactgtttctccttgcaagaattctttcgcagcatcatctaaaactggatgttcattaaagaacaagtttgatagttccacaatttcagctgcataactcatttgtggttgatacaagctaactaattgttttaaccattcgattttttcaggagatggattttcttcaacacgaccgtcagcgactaaataaggaatacacatatctgttagttcacttaagtccatttgtttcatgtattgattgttaatccattctaattttttcgcatcaaaggccgctggtgacttgcttaagcgttgttcatcaaacaatttaatcaagtcttcttgtgagaagatttcttcttcgccaacaggagaccatcctagtaaagcaataaagttgaacatggcttctggtaagtaacctaattcacggtattgttcaataaattgtaaaattgtttcatcacgtttgctcaattttttgccagtttctgaattaatgattaaggtcatatggccaaagacaggtggtgtccattcaaacgcttcgtaaatcattaattgttttggtgtgttcgcaatgtgatcatcgccacgtaaaacatgagaaattttcattaagtgatcatctactgcaacggcaaagttatacgttggcatcccatcgcgtttttggatgacaaaatcgccaccaatgttatctgactcaaaagtaatttcacctttcacgatgtcatcaaatttgtattctgtattacgtggcacacggaaacgaatcactggttctagaccagccgcttctttggctgcttgttcagaaggtgttaaattcgcacaagtgcctgcgtagtgaggcatttccccacgagcttgttgtgcttcacgttctgcttctaattcttctggcgtacaataacacttatacgcacgattgctacttaataattgatcaatcaatggttggtaaatttctttacgttctgattgacgatatggaccatattctcccggatgagcaggtgattcatcccattccatccctaaccatgctaagttttccaactgacttttctcgccgtcttcgatgttccgtttttggtcggtatcctcgatacgaatgataaattctccgtcattgtggcgggcaaataagtagttaaataatgctgttcttgcattcccaatgtgcaagtgtccagttggacttggtgcgtaacgcacacgaactttcgtcatgttcattcctctttccattttttaaaaacagacggtttaacgtcgttttcagttatttttccaataaagcaacggcaattgcgccgattccttcttttttaccaacaaagcccatcgtttccatggtcgttgccttaatgttcacttgtgtgaccgctaagtggcaactcgcggctagattctttttcatctctgccaagtatgggctcatctttggctcttccgctaaaattgtacaatcaatattgccaatagtaaagcccgaccgcccaactttttcatttactttttttaataagtttacagaattcgcatttttgaactgcggatcggtttcgggaaacagttgcccaatatcacccagaccagcggcaccaaggattgcatcaataattgcatgtgttaaaacatcggcatctgagtgacctaacagacctttttcataaggaagagtaaccccaccaataattaaaggtcgttgcggaactaattgatgaacatcaaaaccttgaccgattcgaatcatactaagtcctcactttgcttaatttttatcgtttttaggatggttatccttgcgatcattaatcccgcgacccgcgtgcgccggtttggcaaaaatcatacgcccagctgcggtttgtaaagcacttgtgacgaccacttcgatttgctcattcatgtaatgctggccatcttctaccacaaccattgtgccatcatctaagtaagcgaccccttgttgacgctctgttccggcttttacaaccatcacattcatcgtttcacctggaatcaccactggtttcacagcattagctaaagcattaatgtttaaaacaggcacattttgaaattcagagactttatttaagttgtagtcattggtcacaaccacgccatctaataattttgctaatttgattaatttactgtctacttcagagatatcctcgaaatctccgtcatacatctcaacggagataccttcttctttttgtaaagcatttcaacgctggttccctgccctttaaaactaataatttnaactgtaccgcccatgccgacaacacgtctcggaatattaattaagccataact

SEQ ID NO: 75 - DNA, 6531 bp; double-stranded, linear
gaangggtcttttttcgagtagacgtttgatnttagcgtatccaagaaaggaaaaccctaacataaaaattttttatttacgaaggagaccgatttatatggaaaagaaagaatttcacattgtagcagaaacaggaattcacgcacgtccagctactttattagtacaaactgcaagcaaatttaactcagatattaacttagaatacaaaggtaaatctgttaacttaaaatcaatcatgggcgttatgtctttaggcgttggtcaaggttctgacgtaacaatcactgttgatggtgctgacgaagctgaaggaatggcagcaatcgttgaaacattacaaaaagaaggattggctgaataatgtctgagatgctaaaagggattgccgcaagtgatggcgttgctgttgctaaagcttacctgctagttcaacctgacttgtctttcaacaaaacttccgtagaagatactgatgcagaagcaactcgcttagacgatgctttagcaaaatctactgaagagttgcaagcaattcgcgacaaagcagctcaaagccttggtgaagcagaagcgcaagttttcgatgctcatttaatggttttatctgacccagaaatggttggtcaaatcaaacaaaatatccaagacaacaaagtcaatgcagaagctgccttgaaagaagttacggatatgtatattggtatgtttgaagcaatggacgacaatgcttacatgcaagagcgtgcagcagatattcgtgacgttgccaaacgtatcttagcacatttattaggtgtgactcttccaaatccttcaatgattaacgaagaagtaatcgtggttgcccatgacttaacacctagtgatactgcacaattagaccgtacgtatgttaaagcctttgtgacagacatcggcggacgtacttctcactcagccatcatggctcgttcgttagaaatccctgcaatcgttggtacaaaagaaattactgacaaagtaaaagcaggcgatattttagcagtgaacggaatcattggggatgttattattgacccaacagatgctgaaaaatctgaatttgaagcagaagcaaaagcttatgcagatcaaaaagcagaatgggataaactaaaaaatgcagaaacagtgacagctgacggcaaacatgttgagttagctgcaaacattggtacaccaaaagatttagaaggcgtacacaaaaacggcggcgaactgttggtttatatcgtacagaattcttatacatggattcatctgactttccaactgaagaggaccaataccaagcgtataaagcagttcttgaaggaatggaaggaaaaccagttgtggttcgtacaatggatattggtggggacaaagagcttccttacctaacattaccacacgaaatgaacccattcttaggttaccgtgcattacgtattagcttatcagaactaggtgacggcatgttccgtacacaaatgcgtgcattattacgtgcgtctgttcatggtaacttacgtatcatgttcccaatggttgctactttgaaagaatttagagcagcgaaagcaatctttgaagacgaaaaacaaaaattagtcaacgaaggtgttgaagtttcaaacgatatccaagtaggtattatgattgaaattccagcagctgccgtattagctgataaatttgccaaagaagttgacttctttagtgttggaactaacgacttaatccaatacacaatggcggcagaccgtatgaacgaacgcgtttcttacttataccaaccatacaacccatcaatcttacgtttaattaaaaatgtaattgatgcagcacacgctgaaggtaaatgggctggtatgtgtggtgaaatggcgggcgatcaaacagctgttccattactattgggtatgggcttagatgagttctcaatgagtgctacatctatccttaaaacacgtagcttgatgaaacgtctagacacaactaaaatggctgaacttgctgaccgcgcattaaaagaatgcgacacgatggaagaagtctttgcattagttgaagaatatacaaaataattaagtgattatgaaagcacatcgacaattgtcgatgtgcttttttattgttgcgattcacgtatttttttcttgaaataataaatcgtgcttcccaaaatgaatagaaaaaccagcgtgatgctactcaccagtttccaagggaaattggtgtgtttttcaggtgggaggttgacggcggtagcattgtattttttagcttctttttcttggatgactaagtgtttttcccacgaatagtcttgatagccatcgtttgctttgatttttacagtataatttccaggaacaaaaggttgttcctttaagtcaatccgataattaaaatttgtattaggagccattgttaacgactcttggtgattttcgtagcgaggtttggtttctttttcataatacaaagaggcatcgacttgtaattttttaatcatagccgcttgtttgttttggagattcattaatacgcggttacgaccgttagcttgatcggtttttacttcatttaaagataattctggctgaacaggttcatctgtttcactaagtaagacaccgactacataagaaaaacgattattgatggccacaccgttttctgagtgagcaggttgttcatctgacttttgttcaaagtagagtcctcctaaaacgtacccattaaatggtttttccggtaaagtaagctgacattcaacagtcttggttgagtgtttaggtaggtggatttcttttggcaattgcgcaatctcattaaaagtaaaaggtgcagacggatctttttttgtttcagcatgagaataatctgccaagccattatcattagtaatcgctgcattggctgaagctagcacggtaatgtcgttggctgtttgattcgttagttcgatttgtagcttttgtgtttggtttggagcgacacgtaaatcaaaataacttgtctctttggttcgttgattgtcgggtaaaatggcttttacagaaaaagtcatttcgcttgcttctacagaataagagccaataaaaaataaaaaaatgatgacgctaatagcatggagccatttaaaaagctgctgattcatagtgtgcactcctttttgacaattttttataacaaggtattgcatgaagttgtttcatgcaataccttgtttgttttcttttaaagtggtgtatcatccaaaatccaagtaagcgttgttttatattgtttagctgcaacttttttcgttgtcgcaggaacagttaattgaatgccttgagcagcggtcgstccgctaccaaaagctaatgtccaagtgcccattcctgttgaaagagcggcagtcgccacaggagaagtggcggcaccagttggatccaaggttactgggaccgttaatggcgccaaagaaagtaactgtgttgaattgggtgttgctgctaaaaaggtcaaggatgcattatccaaaacagcgggtgttgaatcacttgtagcaaattgcgcactctgtttaactgataatttccagccaagatttagaccacgtttgtcagttacttgaacatagtttggcacgctaattaaatcgccagtactattttgcacttgatccagttgtgccgaatagatcgctgttccggcttgaatttgttttgatccaaaatggatatttgaaacatagtcaatactaaggggtccggctgtaccaggttgatgaggatcagcaggattaggtgtcacaggctgagaagggttcgtcgggttgacaggtggcgtgacagtattatcaagagcaaacgtaatatcagcgttggattgaatagaagcgacttgagctgcttcaacttttgaactatttaaaagcataagaggcgtagcaacgaacaaaatgcttgaaatgcgcacgatctttttcattttttattccttctttcttgtttatttttaacttttaaaaaagctaaatcctaattagaggggtgtatcagaaagaatccattgtaattcggcagtgtaagattctttgaccgttaaattaaggtcaggagcaacgcttaaaaaaagtccattttgttggttccaaggaatttctacattgttatcgtccgttgcggtgtgttgataaacttcggttgctaaagaggagagaggaaaatcactgccattttttcgataaatgaaagcttgctggatcgttttatttgtagaagttgaatgcatgggctgactctctcttaccaacaaatgccatggtgtttttgcaactcgaccatcggcaatgaggaaaggagcgctgatggtcgatggtgagtatatggttcgtttgctggggaaaggtaaatttttaaaggaaactgtagttggcatctgcacaaaacggagggtaccgtttttgataggtaaagattgttctttagtgattggcgtaattgcgttccgccaccatcattgccagtaaccgtgctagaaaataaaagaaattggtttatccattcttctgtaaccgttgctgtatattgtaaggtgaattgtgtattggcttccgtaaaattatctgctggcagcgaattatgataactccaatacggcaaaccagtggaactatcagttaaaagttgaagcccagctattggcgtacttaaacctgctgctgattgttttgttaatgtagcagctgaaagttgggacagtcctttaggcaccgttgctcgtaattgctgattcatccacgttgctggttgattggttaaacgtgtggttaacgtaaaacgaatgatttgaccacttacgacagagtttgcagcttcccagagcccttgtgcatttttccgctcaatgatttgcgtaaccgttagttgaggcacaggataagcaactgtttgagaaacagtagaactggttaacaaaggcaggccagtgcgattgctgagaccttggacccacaagctgaccgtttctcccccttggaaagtgggtaaattagcaaattgaaaatggccattggaatctaaggacgttgtggaaatagaaccaccatttatttgtactttaacttgataggttccgttagatacttgagaatctttacctgaaagttgagttgagccggcattggcgactacgtttgtgactggttggattgaccaattgacactttggtcagctgaggggctgctttgaatatagtcggttgacgtttttgaacgagcaaagacaattgtagagagcgtgtcgccatattctaatggtgaagctaacgatgtcgagaaatttccggctgcatcgacagaaatccctttcaccacaatgggggtagtggtgccatcatggcggttcaaggttaattgaacagagtagttatagtttgggtcttgtacttgttgaatggtccctgttacagtagtgtccagatgatttggttgagttagtttggctggtgtgacttgaggaacgggataattacctaaactaagttgagctttgctaattatgcctgtttttgtattattcccaatgataatattaattgcgcctaatccagtgccgacatctgtaaaggttcctcgaatcggatagtctttgccgttaagagcaggagggattgaaattcctcgtttataaagtgcgcccacatcaaacgaaatggcggcagaccatttggttccgggaagtaacaccaaggtgctacttggaaaagtcagataaacagaatgataagtgctactataagagagctgacgccgttagttgaactgtgaatatcttgagtggctgttcctggataactgacagtccctgttaaaagagtcagaaaatcttgttgctttagagtgtcgttatctaactggcttgaaatttctgtaggaagttgaatagcaataatcggtcgatcattaattgctaagccgataagtgtcacactgtattcatacgaaagtgtgataatatcttggttatacgttcccgtgcttaaggtactttttaaggtgctattaccaacagaaacactagctggcgtaggtgccataggttcatcgttttcagaggaagcatgggtttgctcggtttcttgttccacgatatcggttgcttgagttgtttgttgttctgttgaaactgaagtaaatgtttcactaaaagtagaggcgtgagttgtagggttcagtgtttcagaatgagctatcaaaggttgagtcagcgataaaaaaagccatgatatgatgcaagaaaagattccccatacgaacttattcaaaaccatcctctccttttttgatattatatgtataatgacgaaaatatataatgtgtaaatattaagtacatacattctataatgggccatncataaagtaaagcgattacatccgatggtgnacaggatattttgttcacaatcttttagtgttttaaagagggaaatttctcgaaattctatgcgttttnaatccgggaaagat

SEQ ID NO: 76 - DNA, 6399 bp; double-stranded, linear
ttttcgggaaagaaacacctaccatttttgatgttttgggcagggaataggaggtaatacatggaatggagttttccttggctatcaatagatggcgacagaatgtacgatgatagcgacttctcgaaattttttgagggtcttttttcttatggcgtttctctaacaacagctaacgcattaaaggttactgccagtcctaatggcgggatgaaagtacaagtagattcaggctatgcatttgtcggtaaagtcttcttgaatagtactacaaaagctttaagtattgatgtagcaagcagtatgcaagacaggacggatagtattgtggttcgcgtggataaaagtgtgcgagatgtatttttagctgttaaaaagaacgatacgacagtaacccgtacatcggacgtttacgagctacagttagcgacaataagagtgccccgaaatgtttctagtattacaggcgatttaatcacagataaacgggcagatacgaaagtatgcgggtattcttcgccgtttcaaaaggttaacgtttcagggttagaagagcaatacggtacaatactaaaaaaaattgcggaagccaacaagacgagttatgaaaaaatcctaaatgattttaaaaactatgttgcaaaagcgcaaaccgatatggattctaatattgaagaaattatccaatcaggtaatggaaaggtaagtgcttttgatgttttaattcacgaatggtttgcagctttaaaaaatgaattagatacaaatcaagcatcaaatttacagaatcaaatcaatgaaatgaaagctactgaagagttaccagctatagaacataatttactcggttatcctaatgtacaagttttgtattgggaatacggtattggcctatcaggattagctaatgagccaacaggtctaggcggtagcaatgtgaaaaagattcctcacagtgtagaatatcttgatttattcagtttcaaagttaaagtgccaatgaactttaaattggtaaatccaacagtaacaaaaatagatagtcgaactattcgctttattgaagcatttaaagttatagaaattaaattttaggaggaaaagaatgtatacatttaaaaaaggtgatgcagactaccaagtcatgctaaatgaaaattttaaagagataactgattctttcgaagatggtttatttgtcagaaaaaattctaaaatattagatttaaacgatgctatattgccaggcatttattcaatcccagctacaggagttgataataaacctttacctaattctggaagtttattcgtttgtaaagacccaggaggggttagacaattatttcagacagaaagaacaatatttattcgacaattagggggagtaccttcatcttggacggattggaaaaaagtagcttttgaaaaagaacaaccttttgaagcttggtattcaccaggaactaaccatgctggattcaaaaataaggcaagatataatttagggccagaatttagcaacataggccagcgacttgggttgcctatgaaaagtgaaccgttggagtggaatagtgggcgatggcaagcaaaagttcttagagactgcaagctaaatataagcggaactgtaaaataccatgttggtagttcgagaggtgttctctatgcttatactcatatagacaaaggccttgatgaaggcgtaggtgacttaggtattggatcagcagtcggagctgttggcggcttggattataaaaatgtcgcagcttttgatttaaacgttacactaaaaaaaggtgagtatcttgcgtttcgcttagaattagcagcagataagcaacttgattatactcaattatcttctatgcatatcacagaattagtataggaactgaattttaaaataaaaaccgtttagcaaaaaagctaagcggtttttatttatagagagaaggaactttatgtgaaggatgaactgattcaagatgttgtagagcgtttagtgcgtattgagacaaagctcgataactacgaagtgttaagagaaaagacagaagatgctaaggaaaaggctgattatgctttctctattgctaaaaataatgaagaagatatcaaagaaataaaggaaaatcagaaatggtcttggcggacaattgcgggcataggggtgtcagtagttgtctatttatttacaaaatatttaggaggtgtataagaatgattctaccagataagtactacaaaattatcaaatggggcgtgctaacagtgctacctgcaagttctgttttggttgccacactaggtaaagcttatggatggcagcaaacagatatgactgttttaactattaatgccatagcaacttttttaggagtggtaacaggagtatcagcatataatttaaaagacaaggagaaataaaaatgaaaaagaaaattttagcaggagcgcttgtcgctctgttttttatgcctacagctatgtttgccgcaaaaggagaccaaggtgtggattgggcgatttatcaaggtgaacaaggtcgctttggctatgcacatgataaattcgctattgcccagattggaggctacaatgctagcggtatttatgaacaatacacatataaaacgcaagtggcaagtgctattgcccaaggtaaacgtgcgcatacctatatttggtatgacacttggggaaacatggacattgcgaaaacaacaatggattactttttgccacgtattcaaacgcctaaaaattccatcgttgcattagattttgaacatggagcgttggctagtgttccagatggatatggaggatatgtaagttcagatgccgaaaaagcagcaaatacagagacaattttgtacggtatgcgcagaatcaaacaggctggctatactccaatgtattacagctataagccatttacactaaatcatgtaaactatcaacaaatcatcaaagagtttcctaactctttatggattgctgcgtatcctatcgatggtgtgtcaccatatccattgtatgcttatttcccaagcatggatggtattggtatttggcaattcacatccgcttatattgcaggtggtttagatggtaacgtagatttaacaggaattacggatagtggttatacagataccaataaaccagaaacggatacgccagcaacagatgcaggcgaagaaattgaaaaaatacctaattctgatgttaaagttggcgataccgtcaaagtgaaatttaatgtagatgcttgggcaactggggaagctattccgcaatgggtaaaaggaaacagctacaaagtgcaagaagtaactggaagcagagtattgcttgaaggtatcttgtcatggattagcaaaggtgatattgaattattgccagacgcaacagtcgtccctgataagcaaccagaagcgactcatgtggtacaatacggagaaacattatcaagtattgcttatcaatatggaacagactatcaaacgttggcggcattaaatggattggctaatccaaatcttatttatcctggtcaagttttgaaagtcaatggatcggcaacaagtaatgtctacacggttaaatacggcgataatttatctagtattgcagcaaaacttggcactacttatcaagctttagctgcattaaacggattagcaaatcctaacttgatttatccaggtcaaacattgaattattaatagctttaatataaaataaggatacacttatttaaatttctctcgagtcgccgtccccaaggcggctcttttcaggaccattagctcagttggttagagcaaacggctcataaccgttcggtcacaggttcgagccctgtatggtccatagctaaaaagggcacgaaaagggcaaaagtagtaatactttgtcagattatgttgttttttataaattttattagtattatatagcattataaatgcctgttttacgggcttttacaatttttgtgaaaattggaccaaatccttgggatccaatgggcgcattagcataaaacagaaaaagaaggcccccgccgtcagggcgggggccttctttttacgttgggcggcgaacttcacggatttcgcccaatgttgtataatcattgcctgctaaacgagcaatcggttggagtttttcaggtaaaatgtactgatgttcttcatcgaaaacggctgaatcaaaatagaaatcggtaatttctacaatgaataaatccgtaataatttgaccttcatggttagcaataggtacatattgatgtaagcgagcttccatccgaatcggcgcggctttgattgctggaacagcaacagtctggctggcaatggtttcaataccaaatgtgtcaatttcactgatctctgctgctaaagacgccgaagtctgattcatttgagtaagaacgtcttcgttaacgaaatggatgacaagttctttagtagccaagatgtttcgtgccgtatctttaggctcttcgtctggtcgtaaaatggacaacgttgctaaaggaatttcagctgccgccgcattaaagaaactaaagggagcagcgttgacgacacctgtagctgtatcttgtgttgtaacccaagcgattggccgaggaataatacttcctgataaaaatttatacgctgtttttgcagataactcgttactattgtaatgaatcataggagcctcctagaaaaaatactaatttctttgaacattcgcatctgaagtatcgaaaggacgcacaaattcttcaatccctgcccgttttggttctaaaaatggcggtaatgataatttttcgccagcgtgttcataggtttcatcctctaaaaatccaggaccatcggttgccagttcaaataaaacatgtgttgctgccaagaaatattcagatttaaagtaaaaacgttccacaaagccagaattaggaaattccaaacgattaattttttcaatccagaaacgtagtgcttcctcatcggcaacgcgcaaggctaagtgatggacattgccgtagccttcttgagccgctggcaaatcttcccgatgctctacgatgatgctggcaccattcccaccttcgccaacttcaaataaatgaaaactaccttcagcatcaatcaatttgaaccctaaaacttcagttaaaactagttgcagatgttcgtaattttcgacagttacaaaggctggtcctaagccgattaaagcatgttcactagggacgttagattttttccaaggcgtgccggctgcaacacattggttcttttcatcagaaataagttggtaacgttgattgtcaaagtcttcaaattctaaatactttttaccaaaacgttcttgaatttctccatgatcaattgcatattcattaaagcgtgatacccagtaatccaaagtagcatcatcttttacacgaaaggaagtacgagaaattgtattggttcctttggttcctttrggtaagcctgggaagtcaaagaaagtcatatctgttccgggagagccggcatcatcagcaaaaawtaaatgatakgtttcaatatcgtcttggttgacagtcttcttaattaaacgtagacctaaaatatcggtgaaaaagtgataaattttttcggcacttgaagtcatggcagtgacgtggtgtaaacctaaaatttgtgtattcataataaaaatcctcctaaaagaaaaataattttttgattaattaacttactaaaagtaagtttaaatgattagtcctaaaaatgcaaaagaaatgtctcgaattcgaactattattttttagttgattttttaaaaaaataagaatataatagcctgagatattttaatacataaactttcgtaaacatcgccggatgcttgcgactaaagtgttaatgaacagttcttaggccatagctgaactgtttgttggcactttttttgtttggaagggaagggaaacaagatgagtaaagcttggttaaaagttatttttggcgctttttgtgaagtgatttgggtcattggcatgaagcatagcacaacatggtgggagattttagggacagtaatcgcaatctttatcagtttctatgcgctgattaaagcaggagaagaattgccagtcggtacagcctatgctgtatttgttggcttaggtagtgctggaactattgtgacagatcattttttattccacacaccattgggcataggaaaagttctttttctgttgctgttattaataggtataattggcttaaaaatggtaactggraataaagaggaggaaacaagatgagttggttatacttagttattgcaggctgttttgaaatttttggcgtaggttcaatt

SEQ ID NO: 77 - DNA, 3956 bp; double-stranded, linear
aacaggaggaaaacttgatgggcattccaatcaccattgtttctggctttttaggcgcaggaaaaacaaccttaattaaccatgcgcttgcgcaatcaccgtttcctaaagaagaaattattattattgaaaatgaatttggtcaaacaggcgttgaccacgcattacttttacaaaccacggaacgaattattcaattaaataacggttgcatgtgctgcagcttacgaggagatcttcttgcctctttatcagcaatcttagaagtgtatcaagaagaacaacaacccattgcccaagtcattttagaaacaacgggcattgctgatccgcaaccaatcattcaaacaattttaacgaccccgcacatcaaaaatcatttctatatagacagtctcttaacggtcgttgatgggcatcattggcaacaacagcttcaagaagccgaagccatcaaacaactggccttagcagatcgcctctttttttctgtcaaggaaccagcagacagcactcagctaccaacgttccaagaaacccttcgtaccattaatccttttgctgatattttatcctttcaagccaacgagcctcttttggctagtgacttttttcaattaaataagtttacggcaacacttacagaacacgaaatgactcattccccgcatgagcacgcccacgagcatcatcaccatacctttcactccctcacgctaacggcgtcctcagccatcaacgaacctcttttcactcgttggcttgattggttaatgtatacgcatcaggaaaagttataccgtttcaaagggattctcgccttacaggagcatgacttggccattgccatgcaaggcgtcaaccagcaagtggcctttcaaatgacgaatcaaccccctcaagaaacgacaattgttctgattggcaaagaattagagacaaaaaaaattcaagaaacctttcaaaccctcaacaaaatagctactccgtaaattaattttttacgaaatggaggtcctatatataatggaaaaaactgacttatctagcgcttatcgtcgactgaaaagtcccaacatcaaaacacgaaaacgcgcacttaaaatcattaaagaacataagcgcaataaacaaaagaaaattgcgtaattcactaaaggagcacacctatgaaaaaatttactcttcccctgttagccgccttatcgctaatccttttcggcgcttgcggcaaaacaaacacctctgataaaaccgctgacggtaaagaaaaactatccattgtcacgactttttatcctatgtacgatttcactaaaaatattgtaggcgatgaaggagacgtcaaattgttaatccctgctggttctgaaccacacgattatgaaccatccgccaaagatatggctaccatccatgatgcggatgttttcgtttaccacaatgaaaatatggaatcttgggtaccaaaagctgctaaaggttggaaaaaaggagccccgaacgtcattaaaggtaccgaaaacatggtcttacttcccggcagtgacgaagacggacacgaccatgaccacgaacatggcgaagaaggccaccaccatgaattagacccgcatacttgggtttcgcctcatcgtgccatccaagaagtcacaaacatcaaagaacaattagtcaaactttaccctaaaaaagccaaaacatttgaaacaaacgcagaaaaatacttaacaaaattaacagccttagacaaagagttccaaacagctttgaaagacgctaagcaaaaaagttttgttacccaacatgctgcatttggttatcttgccttagattacggcttaaaacaagtgccaatagctggtttaacacctgaacaagagccaaccgcaggcgcttggcagagttgaaaaaatatgtcacagacaaccaaattcgctatatttattttgaaaaaaatgccaacgataaaattgctaaaacgttagctgacgaagcgaatgttcaattggaagtcctaaacccgctagaaagtttgacacaaaaacaaatggacaatggcgaagattatctttctgtaatgaaagaaaacttaactgctttgaaaaaaacaacagatacagccgggaaagaggttcagccagaaacctctgaaaaaacagaaaaaaccgtggctaacggatatttcaaagacagtgaggtggctgagagaacactgacagattacgctggaaattggcaatccgtctatcctttattaaaagatggcacattagaccaagtcttcgattacaaagcgaaactgaaaaaagataaaacaccagccgaatacaaaacctactatgatgccggctatcaaaccgatgtcgaccacatcaacatcactgattccaccattgaatttctggtcaatggcaaaccacaaaaattcacctataaagcagccggttataaaattttaaactatgcaaaaggcaaccgtggcgtccgtttcctttttgaaacagacgatgccaatgctgggcggtttaaatacgtccaatttagcgaccacaacatcgcaccaacgaaagccgctcatttccacatcttcttcggcggcgatagccaagaaagtctgttcaatgaaatggacaactggccaacgtattatccaagcgacttaagcaaacaagaaattgcccaagaaatgattgcgcattaagcattcaaaagagaggaggtcgggacagaagtgtttaactccgagaaataagaagaaatttccgaaaattgttctttaatttttggagaatttcggcttatttccgaaggagttgcttctgttcccgccgtttatcagtttttgagcgtggagcaaaaatccaaagtgatttttgtcccacgctcctctctttttttatttagtcaagcacacctgktctgtttcaaacgtcgctaacamtggcgcacttcatccgttgatttkgtattcattaattgtgctcttaaatcactggcacctggaaagcctttgacataaattttaaagaagcgatgcagcccaacgatggagcgaggcaccaattccgcatatttgtcttgcaaatccaattgtaaacgtagcaagcccagcaattcttgtggcgtatgtgttttgggttctttttcaaaggcataaggatttttaaaaatcccccgaccaatcatgatgccatctacaccatattgttctgctaattctaggcccttttgacgatcgggaatatccccattaatcgtaattgtcgtttgcggtgcgacacggtcccgaatagccataatttgcggaatgacctcccaatgggcatccactttgctcatctcttttcgtgttcgcaaatgaatggatagattcgcaatgtcttgctctaataaatgcgtgatccacgcctccatttccgccatttcagtaaacccaatgcgtgttttgacactaacaggtaagccacctgctttggcagcgtcaatcaattcagccgcgacttctgggcgcaaaattagcccgctgccttttccacgctcagccacgttaggcacaggacagcccatatttatgtctaacccttgaaagcccatctccgctacgccgatactcatttcacggaaaaattccggtttatccccccaaatatgtgccaccatcggctgttcatcttctgtaaaaacgaggcgcccgcgtacactatcttttccttcaggatgacaataactatccgaattagtaaattctgtaaaaaacacatctggtgccccagcttctttcacgacatgacgaaagaccacatcagtgacatcttccatcggtgctaaaacaaaaaagggctttggcaatgttgcccaaaaattcttgctcatcttcatatactccgtttctgattttttcyttawtttcaacgacaawtgtcgacataatctggggcgaaacaatgctaatt

SEQ ID NO: 78 - DNA, 7053 bp; double-stranded, linear
aancaatttttggattagcygctgggttttccaangngtttttagckgctaaaagcgcttttggtaactctgtaacgaggaggcagtaaantggtgcccttcacttggagtgaacttnygcgctcgtttgactacttcttgtaattggtctttatttacaaggggtacttcttttaattgagccattgcagtttccaatgcgtttagagcctctgagacttcttcttttgtcgccgtttctttcgctacgattgcttcagccgcttgaattgcttcttgcaattgtttttctgtttcttttgtaaattggtatccttcttccggctttcttcctcgggcttgagcgatttgctcttttaaggtttccttatcaacggcgacgggttgttcttttaattgtgcaattgcttcacgcaatgttttagtcgcttggtctatttcttcttgagtaactttttcttgagcaaatactttttgagctgctgctaatgactcttcgagaacttttttagtttcttcggtgaattcttgcccatcacttggtttcttcgctagcccctcttgaattgctttttctaaatcagctttattcgctacatcaggcattttttccaactgacttgcagccttttctaggttttccgcggcagcagaaacgtctgtctgtgtggcttgttcattggctagaacagctactgcctcatctaagattggtttaaagattgcccaagtttcaggcgtatattctttttcgacacgtgcttgatttagcgtaattagcgcttgtaataactctttatctactagctctgtgggcttcactgttacagaaaaatctgaaagtgtggcttgttggaatccttggcctactaataagccttgactcatatcaaattgtaatggctgctcaacagttgtcgcacgttttacgcgagttgtttcttttactttaactttaaaggtaactaagtccattgaaccatttaacaattgtttatttccttgattactaagaactaaatatagattctccacatcatttgaatgtttccgatatttagaataattttccatttgttgtgtattattcgtggttgcaggctgaccgacaagttcaaatttgctagaatcaaaggacatttttgtgcttaacgcattaatgttttttaagtcttgacctttaagtataaaggttaatgtatcgccaggaagataagtatccttgccattttcattaaccacagcaagggataaaccgcccgcaatttcttcgacatcaggtatctcaatcccaccatctaattgtcgtaaaacataactgatatcataagcatcaattaccccatttttatttaaatcacctttttcaacatagccattaaagtcactgtccacagattctaagcctgtatagtttcgataactcattgcatcattttcatcaatcgttccatcgttagtaatgtctccatgtaagattccttctgttcctggttgtttgtaaaagagcatctcacgaccagagccaaaattacccaccgattttaataccttcatttcaacaaaacgatacgcttggtccttcgtttcaakggtttttgtcaaagcatcttgcttccagttaataggttctgaaaactctgtccaattagctccatctttcgacgtccgatactggagctgcaaaatatttccgttgccggcattgtctcttggcaagtattcaattttatccatttgatactccgcaccaagatcaaattttaaagacaagaaatttccatcacttggattagcgatgcctgttgaccagttcgtatgccaacctgtactcaaatctttatctgttaatttcttcaattctgcgcctggttgttctggtaaattacttgttgctttgacttgattaattgtttctttatagggatcatcttgtgtttttcctttaatcggttcactccattcagagaccccgttttttccaacagctcgaactcgaaaagtatgttcgcttaggaaggaaaatccatcaaatgttgctgtattcgtttgaatatttccgraaacagtcccgtcacgctctacttcatagcttgttgcctcagttacttgatcccattgaagagtcaaagaagatggcgttgttttttcttcattgattgcgacatttgccggaatagttaactggtcatcgaccgttgtatttcctccgtcaaccgttcctttattaatgaaacctttgacagttatttgaacatctttggcggtcacagattgtttcgctagttttactgataacgctgattggttcagtttttctcctgaagcttcagaaagatactgattcacttggaattctttatcaaaataatatagatttgtgccagctaaaaattcttctttattagctgcttgtttcaaggttacttctgtcccccccaccattgctgttacgctttcggscgcttctgaagctagcaawtcaagcgtggtgcttcgttcatcaacaaagnctttataacttccttttgtcggttcgatagtaacggtcagatcccttttcgtttgatttagggccttgactatttattttagtcgtagctgattgcccagcttcataactagttgaaattccgtcatcttcatacatattaaaagaagtggtgccatttggataaatcaagaaagatcgttgatctcgttggatttcctttggattgttgtttggattcgtcattgggataatactgccatctttgacgaaaacgggcaccttccacagcggtgtttttactccatttaagacacggccaccttgatatttttcgcctgtaaataagtcaacccagacttgtttttcatctggtaagtagattccatcacggattgaatttcctgcctcatcttgattgccattataaattggggcaacgagtaaatttggtccccacatatattggtattgagaatcttttgtatatgctgttccttcattaggaaattctaaagccatggcccgtaccattggtagtccatcaactgattccttggcaatactgtagttataaggcatcatcattgattttaattttagatacgctcggttcaaatctgtggcttcttgatcaaaagcaaatggcgtttttggattggagccccagccgtccatatttagctgcactggtgtaaaagttttccattggaaatcacgtatgttgatctctttattttttccaccaaaaattccatccatatctgaaccgacatttggttgtccagacaacgaagtcccgatatatgttgggatatggaagcgaatatattcccattgaccacccgtttgatcgcctgtccaaataccagcgtgccgttgggttccggcccaaccatctaatgaaacaatcatcggacgaactgcgccgtctgtttcttttacaaaaacattcgcggcatcttctacaccatttaagccaaaggaatacccatacccgacccacgccacgtcagttttgagagctttaacaccagcgacactaacttctttcgcaatatcccgttctccttttttaggatttttaggatccgctggatggagattagattgagtccacagccccacttcaacaccattggcttgagcatactctgtaaattcttttaagttttgtacatcgccgtccaatgaatctgtttggccatagccagcaccgtagccgtcatttggcaagaaccaccctaacggcatatcgtttttcttatatcgatcaataactgcgcgtgcagaaaattgataattctctttttctccatttaaagattctagcgtgccatttaagtttcctagatcgcctggttggtattctttgtaaaaattaccatcttcaaacttaactgctcccgcggttccttctgctactttcacccaatagtcccgattatacgcgtttaaatgcgcttcatagaacccgtattctggcatcaaagctggtttcccagttaattcatagtaatcttttaaaatacctgctgaggaatcattaaagaaataaaaagcatcaaaatctgttccttcgtgcgttgttgtggttttttgtggatcatgacttccaaaatcatagttgccaggtttccatgtatttcgaacaacgccataccctgcagttgaccaataaaatgggttaggcgatgctactccgccatctacccaattgttcgtattgacaatctggatagctgttcctttatgcgtaaatcgaccattttgagttcctccgccaaaataattttcttgactactttgttttaacgtttgtgtagctttatcatttttaaaggatagcggagcggtttcttctaaaataacttgattctttttcttgtctagaaccttcattaaagcgctttctttttcgaacataatttttaaaccattattttctagaataaattggtttcctgaatctgtgacgttcgtttgctcaaaggcttgtgtaccatagtcggccattgttttagccgtaattttcgcaacatgctttggatcatttggcgttggatattcttcaaatttaccagttggatctagatgatagcgaaaaagatggtcgtttaaaatactaatttgtgctttttttccagaagcatacgtaatgacaaagtttttctccgctttttcaatcgacacaattgctccgactgacgttgctgaatcagctacgtcttcttttgctgtttgctcttgcgcatcaaccacttgagaatccatcgtaacaaacgaatggaacgccaatacagacgaactcactaataaaaatgtcaaccagtgctttttaccgtaaatttttttaccctgatactctttgttcattttttcctccttaaaattgctccccatagaatagttccgacaaaattactcacaaaatccaaaacccaacaaagttttatccagatgaaaagtcataacgattttcttagtttactgagactgttagaaagtcagtttcagtaaccccttcataaacacatcctttcaataaaatattaaatgaaaacaatctattttcatcttatataaaaattttagtacagaatcataatttcctaatgaatgcgttttcatttgttgactaccaatttttcacttttttaataacataattatcgtatgatggtttttttgtgtttgtcaacggttaattatagcagccaccattaacaagtattaacccttgataaacctgttaattcacttataatgatgattttattgcgaaaatatctacatcagaaaaagaaagactttttcaaaaatctaatacctgttgctcaaatctagtctatttaaaaataatcaacaccctcctgctcagcaagagggtgttaattactcgttttttagtgattgatttgacttgctggtgtgaaaagcaaactaatgatgatgccaactatcagtaccgctagcaatataaaaattaactttccaaaccggtgatagggattgatcgaaagcccaatcccataaactttcggaacccacaaaggaggcgttggattatctttttgatctttataggctatctttaaaatctgccacgcaaaatacaacaatggtaaaaccataattaccccaactatacctagccattttgctaataagtcactagtatgcaaaagaatgattgtcagaattggtacaaacaaaagaataaagctaattgtggctcccacttgtgcttgcttaagcagtcgtctctcacggagagtaagatttgcaaacattccatccatcctttcatggttttcagattaaatcaacgaatcactaaaaaactaaattaactgcgaaaatcaatgaccatgcgcccgcgaatttttccttgttccatttcttcaaaaatagcattaatttcttctggttgacgtgtttgacaaacaggaacaacttttccttctgcaccgaattggaaagcttctcttaaatcttgacgggttccaactaacgatccgactacgtgaatgccatcaagaacaagacgtggaatagataaatccattgtctcaacaggcaatccaacggcgacaaccgttcctcccgcacggactgcatcgactgcgccattaaatgctgatttagctaccgcagtgactactgctgcatggacaccgccaatttctttttgaagttgtgcagcaaaatcaggatctttaactggattaattaaaagatcagcacccatttctttcgcaaaagctaactgattatcattcacatcaacagctactacttttgcattaaagacatgcttggcatattgtaaagctagattacctagcccacctaatcctgaaatcattagccattgacctggacgaatcccagattcttttatcgctttgtaggttgttacccctgcacaagtaatagaggaagctggctctgatgctaaattttctggcactttcactgcataaccgtctgtgacgatgcattcttcggccatggcaccatcaactgtatatccagcattttttactgaacgacaaagcgtttctcgaccagaagtacaatattcgcaatgcccgcagccttcataaaaccatgcaacagatgcacgatcaccaatttttaaactagtaacgtcttttccaacctccgtcacaatcccaattccttcgtgacctaaggtacaaccgctaacatcgccaaaatctgcattcttaacgtgtaaatccgtatgacagacaccacagacttccattttcaaccgcgcttcattatctttcaatggacgcgattctttttcaacaatttttgttgtttttccttttgctgcgacaattgctttatacatggttctttcctccttgtttctattgtgaatcattgaacaataatagtataatactactttccaaaataaggracaccaatgacttgcgtaaattaacgctaatttgacaatttatcctkgctagacagctatcttcccttatgtcatagataattcatactggcatgantttctctgcataattgncaactatttt

SEQ ID NO: 79 - DNA, 2213 bp; double-stranded, linear
acttattttactaacgtcgtgacgctaagtttaggtggacttgtagcgatagtgatgtatatcgatcgaatttatacgccgatagccatatttaatgttttatttgttcaatataatttggnataaagtagcctatcagcgcttggaagatttttataaaaaagaagatgatcctgacttagcggtttccggcaaagcgttacctgaaattcaaacaatttcattaaaagatgtgtgttttagcgtagatagtcaaacgattatgtcccaacaaaatcgacaattttcaatgaataaaacctatggcttgattggaaaaagtgggacaggtaaatctaccctgattaaattgattttaggattattgaagccgacagaggggacagtttatgtgaatcaatttcctctaacacaatttaatttggaagattattatgaaaaagttttttatttatctcaagatgtgccaatatttcaaggaacgttaaaagaaaatattgtatttaatcaagaaatttctgatgaacaagtaattgaagctatgtatcgttttcagttgggggaactttatgaacggttgccggaagtttaaacactattgtgagtgaaaaaggatgaatttttctggtggtgaaaaacaacggattgcttcacacgcttagcatttacacaagcagagatccttattttagatgaggcgacttctgcattggacgaaaagnccgaagaaaaagtgttacaagaagtacaaaaatttacccacaataagttgactattttggttactcatcgacctaaaaccctgcgatttgtagatgaaattattgatttaaatgagtgaacttgttagctctttggcgcttcttttgctacactttttataagaattgagagaaaggggcaactgttgatgaataataatgagcaagaattagcggaattttgggatgaatttgcagaagaatatgaagaaattcaacaagaatcgccatttccaattgctcgagaattacgtgatttcttggtccaagaaggcatttttccgtgtcagacatttctggatatcgcaggtgggacgggacgatacttacctttttttcaagagcaagtcacggagtatacgctagccgatatttctcagagaatgttggagattgcggaagcaaaagcacaaagcaacgttgtttttcttcaccaaagccaagaaagactgattgagactgggaaaaaatttcaagtcgttttttcagcgatgaaccctgctttggatacgccggaaaaagttaatgcattgtgccaattaagtgaagaatggtgtcttatatttcggctagtggaagagcaagattcgttgttttctccttttgagcaagagagcaacccgcagttaaaatggatggcacaatacaaagcatttctaaaaaaagaacagcgaccttttttcacaaaaaaatttttctttgaagcatcagaagctatttcaaaagactttttccgcagctattttgaagaacaatggtcagttccaattttagaacaacgcgtacaagaaatttttggttctcatgaaattaagcaaaatcagcgtaccattatttatgaattaattgcgattccatgtaaaaaaacaaccagcgatgactaattatcgctggttgtttttcggttatttaattgtgcgaaagctttttctggaatctcttttttatcaattttgacaggagattggatgattctttttttactaatggttgcttctatgtaagcatttggttccaaaggttgaggatttttgtctgtccgttcgtagtccataacttgcgtttttccattacttttaacaaaagttagtcgatagtgtaaagaatattggccatctatgcttttttgattgtcatctactgtttgttttcgttcaggaatttctagaggaacttgtgcataggctttttcacccttatatgtatctgcataataacgatagcctgtataaccaccaacaatgaataagccaataaataaaatagcgccgatttttttcattttttctcctcctaacaatttacaaaaatagcatagcaaaagaagaaggagatggaacatcgaaaaaacgaacagttatcttacaaaactgttcgttttttttggtctatttagctttcatcagagagtagaaaggaatcattttcttacgataactaaagaaaataacn

SEQ ID NO: 80 - DNA, 4808 bp; double-stranded, linear
acgttcaggaactgataccctagatttgcgcaagttgcatcgtccgcaaagatatcatcaatcaccaccaacgccgtggcattattttgatgaagaatgtcatcaaaagccatgtaatcttcaggtttttctaacgcaacgcttggtaaaacagttaatccttgcatcatcattgctttttgataaccaaagtaacgttcaaagtacaaactttcatgcgttgtattggtcacaaataaaatatttttatggccgttttcaattaaaaattccgtcgcttgtttccctaataattgattatcattatccacgtaaactatttccgtttcatgttggtaaggttgaccgattaaagtaaagggaatgttgttttcgtctaagtaatcaatgacggggtccttactatctgaatacacaagaataaaaccgtccacttgtttttgaagatgcattcttttaacgttttccaatagtacatcaaaacttttggcagttgcaatagcagtagtcatatcgtaaagacgggcttcctcgttgatggcttccataatttctaaataaaatggattccctaaccgttctttcgaatctaaaggaggtaaaattacgccaatggcacttgaaattcgtttacccaaattccgtgccgtcatatttggcacatagcctaagtcatccatgacttttcgaactttcttttttgtcgattcagaaatacttggatgatcgttaatgacacgcgaaacggttgaagttgcaacccccgctttcttagcgacatcttttactgtaattgccatttttgccacgcctttcttagtaattatagaaggttaaattgataaaccgtttggtaggtttgctttttattagctggtaataaaatagagccccactgaggatgatgaacaatgtctggatactcttgtggttcaattgctaagccatagtttgaatgcatcgcttgtccattaatagaaaatggagcctcaaaaccagtcgtagaaaataataccatactttggttcgttgttgctatcgtcatttttcttccagaagtaggctcttgtaagcataattgtggctgtcttaagtcagagccaactaaggagaaaacatcatctaacccagttggatagcgttggaggattgtttcgataggtgtcagttcattaaaacgtatggatagttcagaagctggtaaaatccgtccagtaggcagcttattatcgtctaattctaacataccttgacagttcaaagatagcaaatgtgacagaatgtctaactttccatcgccagataaattaaagtaggcgtggttcgtaggattaaaaagtgtttcctgtttactccgtccagtactgatcattcgtaaatgattatcctctagctgataagtgatggtggcctcaattggtccaggatagccagaaatggtgtcggttaaatgaaaagcaacgccaatgatatcctttttttcaaagggctcgactgtccaatattgaaaagaccacccctttgagccaccatggatatgatgaccgtcgctgttttgttctaatattccattttgccaatggccattacgtatgcgtccagcaactggtccaacagtggcaccaaaaaagctttgatcctttaatacatcttgatacgaatcatacgataaaaggatattttcccaatgattatttttgtttggcatcaaaagttgatggaggcgcgcgccataattgagaagaacgacttctaaaaagtcgttcttcaaagtaattttttttaagtttgtgtttggaatatcggttacggtgatacgattatccttcatgatcaagccacactttttttaagtaatcaaacgttaaagcgctcgtctctggcacgataggcaacccttcgcctaactcttctttgcggccaacgccaacaggttgcgctccactagcaagaatcgcttgaatcccagctttggcatcttcaatgccaagacattctgctggtgtcaaatcaatttctttcgcagctaaaatgaaaatatctggagcgggtttacctgcctggacgtctgctggattagcaatggcatcaaaaaggggcgtcaattgcattttttctaaaagaaaaggcccatttttacttgcagaagccaaggcgattttaatattggcttcacgtaattccgttaataaagaaagaattcctgggtagacatcttcaggcgtaatcgcttggatcatttccaagtaataatcgtttttccgttgcgctaactgggcaaattcttcagaagaaaacgtgccttctttttttccgtattttaacagtaactgcagagaatcttcacggcttacacctttcagttgttcgttgaaaacacggtcaatggaaattccaatttcgttccctaattttttccaagcgtggtaatgaaattctgctgtatcagtaataacgccatctaaatcaaacaaaacgcctttaaacatgaacttcttcctttctgatcggtaaaactaatcgatcttttaacgtgtatttttgatcgtaaacagttaatggaattgcaggaccgtcgagtaaagtgaaggccacttggtctgctgcaacttcaacaaatagtaaacgattccgataattaatgtggaatgagtaggctgtccatgtcgctggtaaaaagggtgcaaattttagttgttgatggtccgttttcatttgggcaaaaccttgaacaatcgctagccaactaccagtcattgaggtaatgtgtaagccatcttctgtatcattattgtaattatctaagtcaaggcgcgctgttcgttgatacatttccactgctttttcttccatgcctaattcagcagctaacacagcatgaatgcttggtgaaagagaagattcatggacagtcattggttcgtaaaagttaaagttccggcgtttttcttctaaagaaaaggcatcattgaagaaataaattccttgaagaacatcggcttgtttaatgaaacaagaccgtaaaattttatcccatgaccaatgttgatttaaaggcagctcactaagtggtaaatcagaaacaggcattaaatctttatctaagaaagtgtcatgttgtacaaaaatgcctaattcgttatccactgggaagtacatattttctacaatgtctgcccatttagctaattcgtcgtctgcaattttgagcgttgtttcttcttggaattttaaataagactcacgggtgtaacgtagaacccacgcagcgatggtattggtataccagttattattgatattattttcatattcatttggccccgttacgccatgaatcatatattgtttgtgacgttgggaaaagtggacccgatctgcccaaaaacgagcgattgctacaagtacttctagaccagcatcttttagataatcttcgtctcctgtatagttgacataattataaatcgcataagcaatcgcaccatttctgtgaatctcttcaaaagtgatttcccactcattatgacattcgacaccagtaaaagtaaccattgggtaaagcgcaccctttaacccttgttgttgggcattatgaatggcttgaggcaattgattgtggcgatatttcagtagatttttagtaacttcgggcttagccaacgccaagtaaagtgggacagcatatgcttctgtatcccaatatgtggcacctccatatttttcgcccgtaaagccttttggtccgatgtttaaacgatcgtcttctccatagtaggttgagaaaagttggaacagattaaaacgaatgccttgttgggcttcgtcatctccttcaataacaacatcagctaattgccaacgttttgcccaagcggcagcttgcccagcttttgcttcagggtacaaggtagtcatttctgcaaataattcgtttactcgtgtgatttgttgcgtttctggcacatcacgactggtaacgacaagcacttcttttgtgatggcggtcgtttcgccttcgtttaaagacactgtcaattctgcggttaaagccaagggctgttgtgtatatgtaggcacaacagaggctccatcgatgaaatggcgcatgcctgcagtcactgtaaaacgctctatttcaaagttgttaggaatggtcttagtcgtaacaaagccaagtgtttcttgtgtttcaatagctctttcttcccaaaaatgttcttcataattgctgtcttcattttgaacatcgccatccaattttgagtgaagagtgattgtgcctgtaccttccagcatttcaattgttaagtggatgtaagctgcctcttttttttctaagcttaaaaaacgttcaaaagagaagcgcactttattcttcggtgtttggatggtgaattgccgagaaagaaccccgttttgcatgtctaattctaaagaaaaatcttcgtaaggtgtagtggctaaatcaattgtttgtccatcaatttgtaagtccattgcgatgaaattaattgcgttaatcactttaccaaaatattcaggataaccatttttccaccaaccaacacgtgttttgtctggataccaaacacctgctaaataggttccttgatggtggtcgccagaatagtgttcttcaaaatttccccgcatccccatatagccgttgccaatgcttgttaatgattcttgtaaacgtaaattttctttatctaagtgtgtagtacggattttccaaggatcaatttggaataaacgtttgatttgtttcatgagaatccccctcagtgattttattgataggt

SEQ ID NO: 81 - DNA, 15747 bp; double-stranded, linear
gagtaggaaacagatatacttaatatagaaaattcagatgcacttattgggaggttattttatgcaacgaaaagatgttacacctaattcagataaaaaaagtttattgcaaaaatttgggattggtttagctggcggcttacttggtggcgcccttattctaggaggcgcttattctgggattattcccacacccaacggcggaaataatgcggcgacgacgacatccactaatcacggcgacacaaaagtcagcaatgtaagttacaatgtgtctagcgatgtcacaaaagccgtgaaaaaagttcaaaattctgtggtttctgtcattaatatgcaaagtgctagcaacaattcttcggcagatgatccttttgggggattgttcggtgggaatgaaggtactcaagactcttccggcaacaatggtaacgatttagaagcagccagtgaaggtagtggggttatttataagaaagatggtaaaacggcttatgtcgtgacaaataaccacgtcgtagataaagcgcaaggattggaagttgttttatctgatggtaccaaagtgaaaggcgaattagtcggaaccgatgcttacacggatttagccgtgattaaaatttcttccgacaaagttgatcaagtcgctgagtttggaaattctagtaaaatcacagtcggtgagcctgctattgcaattggttcccctctaggctctgattatgctaactctgtcacacaaggaatcatctcttctgtgaatagaaatattaccaataaaaacgagtctggtgaaccatcaatattaatgctattcaaaccgatgctgccatcaatccaggaaactctggtggtccactaatcaatattgaaggacaagtcattggaattaactcagtaaaaattgtgcaatcaactagtcaagtgagcgttgaagggatgggctttgccattccaagtaatgacgtagtcaacattatcaaccaattagaaaaagatggtaaagtgacgcggccagctctcgggattacgatgtctgatttaacaggtatctcttcacaacaacaagaacaaattttaaaaattccaacttctgtaaaaactggcgtagtggttcgtggtgttgaagcagcgacccctgctgaaaaggctggattggaaaaatacgatgttatcacgaaagttgacggccaagacgtaagctctactacagatttacaaagcgcgctttacaagaaaaaagttggcgacaaaatggaagtgacttattatcgtggttctaaagaaatgaaagcaactatcgatttaaccattgataaatcagctttaacacaacaaaataatcgcagcaatcaataaaagaaagaaacgacctgttgttcaaacaacaggtcgtttctttcttttattctcctaccgcaaatgcagaaccaacttctgcatcaaaaggcaattctaagattccttttttagctggtgcatttggtaaacgtaattcttttgctgaacaaatcattccaaaactttcttcaccacgtaaaacccctggccaaatcattaaaccatcaggcatcattgcgcctggtttggccacaactactttttgtcctgctttgatgttcggtgcgccacaaacaatttgtaagatttcgccgttgtctacttctgtttgtgtgatagataaatgatctgaatctgggtgttttttacatgatttgacaaagccaaccacaattttaggggtgtcgtctttttcaagggtttctgaaaatcccgcatctttaatcgctgtattgactttttcgatttgttcgtctgttaaagtcacttggccggtgccattaatgtcacctagaagcgctgaagcattgaaaatattccaagctaccactgtttctggcgcctcaactaaacttacacgtgccacatcgccgacacgttttacttggttttccgccccttgatcgtccgcaacgatgacaagtaagacatcgccaacgtgttctttgttatatgcaaaaatcatttctgttcctcctaaatttgaaagctataggctggatagctaaattctctcctgtcctatagtaacaaaaaaagtggaaagttgcacttacaattattgaattttaggcaatccctaatgctgccaaaaaaatagataatagaataaccccaactaaaagtgtcgttgttttcacttttttccctaataaccagtaaataactaagaagaataaagccgggaaaaaacctaacatgatttggtcgatatattcttgtaatggcgtggcgatttttccagagccaactttggcagttaactcaaacacgacattagaagccgtcatcccaccaataaccattaaccctaaaatagaggcagctgtggtaactttttcgattacgccgctatcttcaacatcactaaaaaatttagcacctaatttaaaccctttatccaaacagatataccgtaaagcaaaatgcggaatattgataatcagtaaaaaggcaatcggaccaaaaatatttccttgtttagacaatgaaatagctacacctgttgcgataacttttaaggtcccccaaaagaaagaatccccaatcccagacattggtcccattaaactagttttcactgcattaatactagctgagttaaattcatgatttttagcattttcttcttccattgctccagaaattcctaataataaggtagagatatgcggggtgacagacataaactctaaatgtcgttctaaggccgctttcttctcttcattatttttatacaacctacgtataattggagccattgcataagcataagctaaattttgcatccgctcataattccatgatgcatctaacgttaaagagcgaaaaaatacagaccaaaaatcttttttagtaatgacagattttgtgtttttagaattcattgtcatcgacaacagcctcccttgtttgaccatcactcatattcatatatagtaggacaatcacgatgccaaacaaagcaatccccactactgaaatttttaaataagcagcgaataaaaagcctaataatagaaatggaatcatcttttttgttaccatcattcttgctaacatcgcaaaaccaattgctggaataatacctgccgcaatatctaatccatgcgtaataaagtctgggacataagacaataccttttcaataaacggcacgcctaagtaaaagcctaatgccacaattagagctaacaaaactttattgccaactcctgcaattagttgaattcgctctaccccttgaatattgcctcgttttgcttccttatcagctaaatggctagcgcctgtaagtaaaaatgtcatctgaagattatcgattaaaagtactaatgtagcgattggaacagctaaaacaaccgcactagaaattgattgcccactcataattacataagctgttgcaataatcgttcctgaaacaaaatctggtggattacttgcgccaacaggaaatgcacccataaataccaactctaatgttgcgccaagcttaattcccgtatctaagtctcctaaagctaaccctactagcggagcgacaacaattggacggttccacatcgttgaaccaaaccagctatgcatgtaggcaaaaaaggcaattaaaaacattaatagaaccttgataaatgtcacttccatctatttgaccctcctatttatttaatttaataacttgtttatagcaaccttttgatcgtcagggactaattgaacggttaattcgattccttcattagttagttctttaatttgtgcaatgtcagtttctgataaatgaacagcttttgaaatttgtttgcgcgtttccccatttttcattccacctaaattaacttccttaattgttggcacttctttgaccaattgatacatatcagcaactgattcacataaaataaatagtttatatttatctgtcaccccagaatttaacgccttaattgaatcatcaatcgttttcataactaatttaacacctgaaggttttgccattttcatagcgctcattcttaatggatcctcaaccaacgtattactagcaatcaaaatacaatctgcttctaaaaattttgtccaagtaaacccgacctgaccatgaatcaaccgatggtccactcttgtcattttaatcatccttattcacctctcagttctttcacaattttcataaacgaatcaacataaggagcataaatatctcccgtatcttttcttgtatctttgaagttactccctacaattgctgcatcgcaaatcgccaattgttctttcacactcttgtcatttaaccccgctgcgacaattaatggaaactcaggtaattgttttctaaacaacttaatcttttctagtgatgtctcttcacccgttgcatttyctgtcactgcaatagcatcacaacgttgctgtgcaattttcaaatcttcttcgactgatttttcagacaacattggttgatatttgaagcgcacgccaccaattaattttgctgttgtttttgcacgatataaatcaaaaaaagcttgtaaggatgcttcatcccgcggtttcacatgaccaaccacagaatcaatctgtaaaaattgtaaatgatatttattggctaaatgaaaacctaatgggtcaacatttaacacatttacaccaataggaatcggtaaatctaatgaagtaacatattggagcgctttttctagctgaacataatccccataatagttctccatcaaaatkgcatctaccccatgttcactgtaaatttgaatctctttttttgctcgctcttgaatctcttgatctgttttaccttttaaatgaatcaccccaataattggtttttcaacagcaaacagctctaaaaaatcagcttttttcttcattaatacccctcctagaaatcatcattttctatctcttcgatatgaacgcgttgaattccttgtcgtgcatttcgaataattacctgaatcttttcatctgttaatttttctgaacctgctagcataagctctagtgccaaattcaaattaacgtcagagaaaacgattacattttcaagtacagttagccccatcatagctgtaaccacacttgcaccaaataaatcacccatgaggataaattcatcttctggcgcttgttcggctttcttttttaactctccaaaaaaatcaactgcactttcacctggatacagactatatgtatgaacggcagctgcagagtgtcccgcaatcatttctaacgagtgtttaatccccttagaaaaatcaccatgtgaagcaatgtaaaaccttctcatttcataaacctcctttatttattatatgaacgaatggctactttgtaggattcgctaaggatatattgctcattaaaatataaaatttgattatcattatccacaactgtttgattaattttgaccaacgcttcttcttcactaatcgctaatgcttctgccaacttttcatcggccaaggcaatttcaatgatattatcaaaatagctagcaattactcctctatattgccgtaaaatatctaataatgaagtatctgttaattctaagtccaacataaactgatcttcttttctaaaataatcaatctcgaaaattgcaggcatgttatctaacgaacggaggcgctcaataacaataacttctgtcgctttttcaacacccaatgcttctgcaacatgccctgttgcttttttcaaacaaattgatatgatcttagttgttggtttacgattcatttttaaacctgactcagtaaaactcccaccagctgtcatgctctcaacataggatggcattgaaacaaatgtcccttttccatgccgtttaattaaaatattttcatcaactaattgtttaatcgcattacgaacggttactcggctcactccgtaaatggtcatcaattgttcttctgaagggattttttctcctacttgatattcaccacttctaactttatttaaaatagcatcgtataattgttgataaagcggtgcttttttatttgattctaatttatccattaatcatacacctcattttaatacgtcttaatacgtcttaaaaatagcaaataaaaaagagaatgtcaagaaagagtttcctttcttgacattctctttttgcttatttttcttcagagtgaacaattaagacatcgcaaggggcttgacgaataatgtagctactgacgcttcccatgaccacacgttcgantgcgtttaatcctgattgtcccaccataattaaatcaacattgtatttttcaggtaattcatgactcatgacttctttgggtgaaccaaacatggtaactgtttcaacattatgaaaatcaacgctttcagcatactttttacaatcggccattaattcttccgcagcggctgtttcttgatcaattaattgatcatttaacgtcgaataccccatcattgtatacacttgattttctaaaatatttgcaacaatgactcggcttccgtttcgacgagcaacctcaattgcacgttcataagctaaattggcttgatcactaccgtctacgccgacaagaatatttttatacatttgttcttccattttcgtcaccttcccgatggaggctgatctaaaaggcttctttgactaagaaactagagtcaaaaatgaatttaggacccttgcgcagaacgcccttttgtccagctgattctctcttaatttaatggttcctctggttcatgaaaattagcctaagctagttaaaaatgcactgatttcttcttttgtttttcggtctttatttactaagcgtcctaactcttgaccgttttcaattacgacaaaactcggaataccaaaaatattccactcggcagccacgtcaataaactgatcacggtcgacttcgataaattgaaacgctggaaatgcttcttcaatttcaggcatgactggtttaatgaaacgacagtctccgcaccaatcagcagtaaagaagaaaacatttttacctttttcaacataagttgctagttcttctaatgaattgggataaatcatttaaacatcctctactttccgtaaacaattgtattaactgttgatttatccaagccacgtaatgcttgtaacaacatttcccgcgctgcttcataatccgcaatactaaacattgtttgatgcgtatggatgtaacgaccacaaacgccgatgactgtacttggtacaccgttattagttgtgtgcgctgccccagcatccgttccgcctttagaaacaaaatattgatacggaatattgtgtgtcgctgctgtatctaataaatattcacgtaagcgaggcaatgtgatcaaacctgggtcgaaaatccgtaataacgttccttcacctaaatgaccatacgtcccttttttcgtgtgaatatcatctgccgctgaacaatccaccgcaaagaagatatctggattaaatttatgaacagatggtttagaaccacgtaaaccaacttcttcttgtacgtttgctccagcaattaatgtgtggcctaattcttcattttgtaacgtttccaatgcatctaataccaacgtacaaccatagcggttatcccatgatttactgataatatttttgccattggctgttttaatcgtttctgtttgtggaacaatggaatcccctggacgaacgccaaagctttcagcttcttcttttgaagagaatcctgcatcaaataacacatcagagacttctaattgtttttgaccactcgtaccacgcaacaagtgtggcggaatagatgaagaaatacatggatagttccctttacttgtttttaacgtaaaacgttgtgctgaaacaacatagggattccagccacctaaaggaaccacttggaataaaccattatcgttaatttgagttaacatgaagccaacttcgtccatgtgagctgctaccattacgcgtggcgctgcttccacttttgaacgtttaatcccaaaaataccacctaaaccatcatattggacatcgtccactaatggggtgatatgttctttcatgtacgcgcgaatgtcgtcttcaaatccgctggttccttgtaattcagttaattccttgattcgttgaaatgttttttcttccatagatgtatgtcctattgcttttgatttgttggaaattacgccaaccaagcgtcactttttctctaaaaagtcactttatcctgtcgataaaaataggtactcctttcatatgatttcactcttattataacgcaaatactagaaaatgcacatcgctttctctttttaaacgtgacaatgagaatgccctaaaagaatgattgaaaaactttttttatttctcagcggccccttctctatggtaaaataagagtgatactgacaaaagtaatagtaagcagaaaccgaccaagggaggtcatacaaatgaacgaagaaaatgagttgacatactttaaaggcggcttagcgctaggcgttggtcttggtttagtaggcggcattgcctcaaccttgttctaccataagaaaaaaacaatctccgctgatctcgtcttagaaaatgtaaaagctgcttttttaaaagaaggaccgattgaaggttcgtggattgagtttgagaaaaagcccttgcggaaattcgccatccactccaaaacgtatactggaggaatttgccgcattgaagacgacggcattgttcaatacgaattcactgcagatgcctacacaggaactatcattgacattcaacgattaaaagattaaaaagattgttacaaaagcacttatttgcttttgtaacaatctttttttcttctcatttgttttttgtaaaagggatgtttattttatgtcaaaaaaatcaaatcaatgatgaataaatactcaaaaatcgaatgctttctgcatggaaatcagcttaaatctttacttatcaacgtttgtccacttttttcataaaaaagattagacattttttaaaaattgataaaagaataatcatttctaacgattttttaatttctccttttcatttttacattatactgagagtattgctaaaaatgaaaaggagcgtgtcaaatgaagaaatctgttttatttacttcattacttgtattatcaagcttagctttagcngcctgcggcggtggcagtgacgataaaggagctagcaacggcggcagcgacaaccaagtatacacaatggttgaatcccaagaaatgcctagtgccgatccgtcccttgcgacagatgaagtgagttttaccactttaaataatgtctacgaaggaatctatcgtttagataaagacaacaaacccgcgcctgctggtgcagccgaaaaagcgactgtttcagaagacggtttagtttacaaagttaaattacgtgaagaatcaaaatggtctgatggcaaaccagttactgctgcagattacgtttacggttggcaacgaacagtggatcctgccactgcttcagaatatgcctacatgtttgaaccagtaaaaaatgctgaaaaaatttctaaaggggaactacctaaagaagaattgggcattaaagcaatcaatgatcatgaattagaaatcactctagaaacagcaacaccatattttgacgatttattggctttcccttctttcttgccgcaacgtcaagatatcgttgaacgttttggtaaagattatacaaagagtagcgataaagcagtctacaatggtccctttacgctaactgagtttgatggtcccggaacagatactaaatggtctctaactaaaaatgaagaatattgggacaaagagacggtcaagttagataaagtcgctatcaacgtggtgaaagaagccccaactgccttaaatctttatgaaactggtgaagtggatgatacgtatttatctggcgaactggctcaacaaatgcaaaactcgcctgacttggtccaattaaaagccgcttcttctttctatttagaaatgaatcaagcagatgaaaaatcaccattgactaatgcaaacttacgtcgtgctatgtcttatgccatcgatcgcgattcattagctaaaaatattttagctaatggctctcttccttcacaaggcttcgttcctgtggatgtcgcgaaatcaccaaaaacgggtgaagactttgttaaagaagccggcagcgacaaattagtcaaatacgacaagaaaaaagctgtggaatactggaacaaagcgaaacaagaacttggtgtttccaacttaacggttgatttaatggtagacgactctgaaggcgctaaaaaaatgggcgaatatcttcaaggatcactatctgatactttggaaggcttaaaagtaactgtgacgcctgtccctatggctgttcgcttagatcgtaccttaaaaggggatttccaaatcgctgttcgtggttggagtgccgactattcagacccaattaacttcttagatttattagaaagctcaacttctaataaccgtggacgttacagcaatcctgaatacgataaattcattgctgcgtccaaaaccacagatgttaacgatcctgaaaaacgctgggaagatctaatcaacgctgaaaaaacagtaattgctgatatgggtgttgtgccaatttaccaaaaagcagaatcacacttacgtgcaccaaacgtgaaagaaattatttatcatccaacaggtgctaaatacgacttcaagtgggcgtataaagaataatcactcgattaaatttagaaaaagatttggaacaatagcgattttggctattgttccaaatcttttttatataatcccgattaaagaacctaacaacccaaaaatcacagtaaaaataattaaagcaatcggcgtgcgtccttttttcaacataataaaacaaaacagcgtaaacactaaaggtaataaattgggcatgattgtatcaaacaattgtgtttgaaggtctaacttagtgtctttcaagcgaaaaacaaaagttgtcgttaattgtacactcttcggaatcaacgcgcccaccacggaaattcctacaattgttgctgaacgagataattttttagtactttcgcttaaaactgaaattgctttgacacccattttataacctagattaattaacccaattttggcagccatatacggaatattaaataacaacaagaaaacaattggtcctaagatattgccttctaatgatagttgtgaaccaatcgctgctgcaatcggcaaaacggttaaataaaatagcgcatccccaattccgcctaacgggcccatcaacgctgttttaatcgcttgaatggattttggtgattcttttgactcttccattgcaataatcacaccatgcatgaacgtcactaattgtggattcgtgttcataaattgtaaatgattttccaaagaaagagctaagtcttctttatcacgatgaatctttttcaatcctggaattaatgagtaggtccagccgcctgcttgcattctttcataattaaatgaagattgtagcagatacgaacggaacattattttttttaactctttttttgttattactttttcggatatcatatcattatatgtttcttcagatgccatcttcttcaaaccctccattattatttgatgcagtgactgtattatttctttgtgcgtaaaattcatataaagcaattgcgacagctaaacctgcaaccgctaatgtatctaaccctaaataggcagccataacaaacccaaaaataaagaacggcacgtaggatgtttcccacatcgtttttaataacatggcgaaacctactgctggcatcatcccacctgcaacgctcaagccatgaatactccattcgggtagaatagaaatgaaactagaggctttatcagcaccaaagaaaatacataaaaatactacaaaaaaataacaaatgaataaaacgattggtaaaaaactagacattctttcgatgccccttgtatctgctttttttgcataaacatcaaatttatgcataattggtgacatcgctgtatataacaaggtaattaacgcttgcgctgcaactgcgaaaggaacagccaaacctacggtcacttgtgggtcagattttgtgataattgctaacgctgttccaataactcccccaattactacgttaggtggttgtgcaccgccgattgctactgcaccaatccaaactaactctagcgttgctccagtgattaaccctgtgttgacatctcccaatattaaaccaacaatcagccctgtaacaatcggacgatgaatatgtgtctgtaagacaagcttatcaacccctgctatcccagcccaaattcctaccaaaattgcctgtactaacatttttttcctcctattaacttcgtctactttttataaactgtttcaccatttactaaggtttctagcacttcatatttctcatcaataattgtaaaattacctaaaagccctagtttgatttctcccatagattcgttcacattcaacaaacgagctggatttttcgtgactgaattaatagcaatcacttctggaagtaatgctttttcaacaaggttgcgaaccatattatttaaatggttcgtacttccagctaacttgccattggctaaacggaccacattttgttcatcaataaccatttcgatccctttttctggttttggataaacgcctggttgacaccctttggcccagatagaatctgtcacagcaattaaatagtccttgccttttagtttggctaacacacgtactaatgaataatcaacatgtaccccatcagcaataatttcagcaaacgtttcttcactatccaaagcagcaactactgcggttggtttccggtgactgatatcttccattccattaaacgtatgggtaaaactttttgcacctgcttcgacagctgccattgcttgttcataggttgcagccgtatggccaattgaaatgactacatcatgttcatgacaatatgtagtcaaggcattctctacatcattttctggtgccaacgtcattaattttatgtgcccttttgctaactcttgccattttttaaatgtctcaacggatggttttactaataactctggattatgagagccacgaaattcttcagaaatcattggtccttccgcatgaatccctaagatttgtgctccgttggttccttggtcttcctcaataaatgaaccaatcacttcaaatgaatgttccaagtcttttggaaatgttgttgacgttgttggcaaaaaagctgtaatcccttcttctggaaggtaagcttgccactctttgataaattcatgattggcatgattggcatccccaccatgccaaccatgatcgtgaatatcaataaatcctggaagaatgcgcttttctccgtattctttgtcgacagctttttcattgtacggtagaattgcaacaattcgttgttctgacacttcaacttgagctggttgaaattgttcgttaatccatacgtttttactttgaataatcattcttcccacttcttctcttcaaaattattgtccaacattacttttttatgaaaataatgcatctaaactttcttctggtgttgacggtacacgttgaatcgaaagtttaacacctaattcttgtagctttttaaaggcgtctacatctgttttattaacggcaacagcggtagctacttgtttttgccttcttccatatgcatattaccaatgtttaatttttcaattggcacaccaccttctaccaagcgcaatgcatcaacaggattatcaactaacagaaaaatcttttgtctttctgaggctttatgaatgacctcaatcgttttcttaatggaaaaaaaacgggtttgtacttctgcaggggccgccatgtttaacaattgttggcgcagtgtatcctcagaaattgcatcatttgcgactaaaattaagttggcgcctaaagaaccgttccattgtgttgcgacttgaccatgaatcaagcgattatcaattcttgttaataaaatattcggcatagtgcttcctcctcttttctaattggttagattccgtctgcttcttcttgagtatttgcttgtggttgttctagttttttatgaacaatcccatctctggctgaatctgtgaccattgaaacaaaatcttctacgttcgtgctgattgtgcgtaatgcaagcccttcaagaaccatcggtaaatttgttcctgctaacacttcgacatttggataattacttgcgacagtcattgaaattctaaacggtgtgccacctaaaaggtcagttaaaatgaccactgctggacacgtctccagcatagagtcaacggctttacgaatgtttgactctaatacatcaagccctgtatcattgaaaaaagggactgcctgaacatttgcttgctctcctgcaatcatactaactgattgatgcattccagttgaaaataccccatgccccgttaaaataagacctatcatttattctttctcccctaactatttastrmgcttactatatattggataagcagaacttatttctcaaagagtgtaacaattcttgtgacaattgagtatgctttcccatgattttggacgatgatttctatttaagaacatgtccctatacagatacaaggcgtcccaacttaaagatgcttttgaaaaaatgctcgactacaaccgtgagtccaaacgagccaacaaatgtacccatatacaacacaagaataaccaagctgactggttgattggttaaaaacgggtggaccagtttcaagaccacttgaaaaataaaaacattcgctaaataactgcgatacgcataagtggctatccatttaaccattggtaaaagacgaatctttttggctattccttgcgttcccaaataaaaaaccaacccgataatcaataaactataggcactttgaagaggatccaaataaggtagatcgttcggagtcatctgtgttccatcaaataaattcccttggactgcctgccaaaaaataaaaagaaacaacagaaatagtgccactctcgtctttttcaagaaagtaaaaattttcccttgatacttcgctgcgatgaccccgaaaataccataaatgagataactaagccctgaacgatctattaagtaccaaagagaagtttctacatatggaaaaatcattttctggtaccagaagcaccaaaggatatgcgcaccgattgtaaaaaagacaattggtaaaatcacttttttgttttttgtaattctggttgccaaccaaataaaatacggcataaataattggaattgcaacatcattacggcataccatagatgtgccgcgccatcaccactgagaacttttcctagaaatcctagggacgtttcatagggcattcgttgttgtaaactaggaaaagcgtatagatagagactggaccagaccacgtaaggaagcaccaattcataaaatttttcctttaaaaattcaagatacgattcagcttgactctttaacaccatgttgtaaataattgcaaaaataaacatgggtgccgaatatttagacatt

SEQ ID NO: 82 - DNA, 1536 bp; double-stranded, linear
tgcgtgaaaagtataaagcttttgaactgccanataaggtaggaacttcccagcaaaataacctngtaattgaccataagcaaacaatggcgaaacatttcttgaaaaaaattgtaacttgtaaaattcttcataaggatccccaaaatcccatcgattaaaatcaatcacaccgacctgcctagttggcaagtaaataaaatttcccacatggaaatctccatgctgataaaccacaggccgttgttgcaataacggtaattgtttttctaaatatgaaattattggctgctggtacggcatacaaaattgagattccttatacttatttagttggctctgctttttttcgtataaattttgcgcaatctctctttgactaatcctttcaggcaacaaaagcttatggattttgtttaaatagcggcctgcctctacgcctaagttcagttgtcttttgggagaaagagcgggtaaaacatcgcttaagtcttcaccttctagatacgttaataacatgtatccttgttcactttcaggaataggtgcacataaaaaaggtttagaactgggaaatcctaacgccgctacttttttgataaattgatattcttgttgtttggctaataactcttcttgttgaaaaattcgcaataaaaaggtttcttgatttttggtaactttaaactttaaatcagttgaccaaccacggtgaatagcttcaactttttgccattgctgaaacgctggaatcttctcaaacgccctcattactttcgcctccatttccctattggttttagtataccaaagaaaaaaggctggagacaattggggataaattgtctctagccttcactggttatcattttctagttttccttatataaatcgttccactcgttactaagaaagctcctcctaaaacaacccagaaagtactaggtacttctgcacctgcttttggtaatacttttttgggaagctgttcttttttcccaatcatatttttatcagaaaaagcatgagtactttctgttgatttggttccctgatttgctgatgaattcagcgaattatctaaggatgactcactagtagtttttccagatttgtctgggttttggttttggttttggttttgatcttttccttcgattggtccttcacttgtttttgtttctttgtctttatctggttcgccacttgtatctagttctttatctttatctggttcgccacttgcatctgggtctttatctttgtctggttcgccacttgcatctgggtctttatctttatccagttcgccacttgcatttggttctttgtctttgtctggttcgccacttgtatctggttctttgtctttgtctggktcttctacatgtggttgatttatcttgtggttattttcaaataaagcacctaattgtagcaatgttcggtcttcatttaatgcactattaaattgaatccccaaaggcagtccttcttttgaaacgtaagttggtacacttaatgctggatgtccaa

SEQ ID NO: 83 - DNA, 17250 bp; double-stranded, linear
gccaaatttggtggatcgtgtccgcttggganngccttatgggtggaccctacgtgccatttgggtgaaaactaggccatattttaaanggaatatccgtgctttccttggccaccgttcataatccatttccactgaaccgcaaaaagaatcgtatccagagagatggcaaggccanacagagaaattttycttkggaacaacttcaagaaacaattcttgaaaaagccaatcaacaagtaggcagtcgccggacgactaaagaagtcattaaatttactactaaaaataaaattggagataaaatgactcttggtacgaagagcttgttaattttgctactttgtatgattttttatgtaagtcttacctttgtaaagggtatttcattaacaacagctttcattcatccagcggaaacaattcaacgtatatttgttcctgagaaagtagcagggaaggatacaaatgctgtgaaaacgactaaaactaaaccagcttcaacaaaagaatctaggcagcaggaggaagttcagcctagcccaacgaacgtaccagaaaataataatagcgaacaagctgtgtcaacgtatactgtggaagttggagattcagtcagtttgattgctgaaaatcacggactcactatagaacaacttcaaactttgaatccagaaatcattgaggtacctatttatcctggacaagtgttgaaattgaaagaggtgactgaataatgcgcgaggtaaaattaattttagctgaacagttttcatacttaggcsttgcacaacgaattgctaaatacagtaataaagcattatatcaaagccacatcttaggaaatttatggcaaattttaagtcctttaattcagttaggtgtctattattttgcttttgggattgcccttggtggtgctcgaaccgtaaaaggaggagtatcctatattgcttggttgatggtaggattaagtacatggatttttttaagtacagtaacaaaacaagcttctagttctgtttatatgcaagttggcatggtctctagaatgaagtttccaataagtattttgccaatggttaaaatattttctgagttaccaagttattttgcattcactacgttagcagcgattgtgtcaatctcgacaggtgaaaagatttctatttattggattcagctaccttactatattgtagcgatgattatctttttatatagttttagtctaattaattcaactattgctgcattaattagggattatcaaattttcttgaattctattatccaagtattaatgtatatgtcaggggtcttttgggatttgagtacaaagaatttaccgtcttggttatcaaaaattcttatgttgaatccttacgcatatattattaatggatttcgagatacatttttctataaaagatggttttttgaagataagccccagcttgttgttttttggctaacaacattagtaatatttatcgtaggagctcatttacatgttaagttcagaagtaaatttgttgattatatgtaacatgtgaagaagtaaaaccaccgtatactgacaagaatacggtggttttactctttaattgacaatagccttctctttaaagagaaggctatctaacgaatcaatattattattttaaagttggatcagactatttctagtattcaagtatttttcatttaagcgatgtattccctacctctaatacatccttgtatctctctagacacgccagttttgaataaaatcatcaaaacaaytgaatggttcgtttaaaaatatttttcgtgttctaattattataacataaaactcgtcaactgaccactagctggacgagttcataatttktccagataaatagacagccgttttccgccgactgtctaagattaagatagatttgtaaagaagtggaataaatggcttcctactatctctttataacakgaggraaagaaaackgcaaaagatagctgtgttttttgaaaaaaagatcagctggtttccgccagctgatcatccgttgaaaagagatataaagaagtgaataaagcttgctttacctctattttataccatgttttgattcaaataactattcagtattagttatacttaaataataaatatgtatacggatgtattgttttgaggtatagtcatagagaaaagagggaacgtttatgaaaaaattttgtttaagttatagctctggtaaagattgtttattggcgatggatcgattggtacaagcaggaaatcagccagttgcgttagtgacaacattaagtgatgaaattaatcgttcttggtttcacggcataccaatctccgtcttagaagcagcagccgaagcgttagatttaccacttgttatatcacataacaatgaaacaaattacacagaaaaagtggttgaggcactgcaggaaaccaaaaaattaggtgcagaaacggtttgttttggcgatatagatattgaacaaaatggtgcttgggatcgccaagttgcgttaagtgctggacttgaaccacaattacctctttggcaggaaaatcgcgaacacttgtgaaagaattcttggcaaaagggtacacagcaattatcaaaacggtcagcaaagaggcaggcattccaataaaatttttaggagaaccgttaaatgaaacatttatcacgtaccttaaagagcatcaattagatatttgcggagaaaacggggagtaccatacgttggtaattgacggcccgctatttaaaaagaggcycattattatmctcaggaattatgaagccttatgctatycttgattattgatgcttaaatgaaagtaaaaggacacaagctgccactttttctagggatatgctataattgmcttaagaaaagtagagaaagtgagtggttaattatggaagaaactgtcttttttaatttaggaaatgcccttgcttcaaaaagagatcaaaaagaattaattaaagaagcccaaattgcgaaagatactcgaaagattccaggaaaactgattatcgttgaagatgaagaaaatggtacccatattttatttgaattagctgatcaaacagaaccgtctgctgaaacaaaagaattcaaagtgaaaaaagtgattgattaataaaaaagcaacgaatttttctaaattcgttgcttttttatatttttttacacaaatgatacaaaaagaatatcaaaatcaaataaatgattagtatacttgaagaaacaaataggaagcaaagcaaacgttttgaggtgttctttcatggaaaatcgaggaattttatttgataaagatggtacgtgtattcgttttgacactctttggcaagcaggtttgcaagcttgttttgaaacactaagtatgttagcccctcatcattcagcagaaataaaaaagatattagctattcaggagcaacgttttttgcaaaaacatttacttgatgaagtcctttatcaggaactttatcaggaattggcgcaatttgaggaattagtcgaacagggaatcagcagtcgatggctggagcaatttttttatgattatttacgaaaaaatctgaaaaagatcgaaccgattggtgatttaaaacagttatttcttgagctgaaacggaagaactataaaattggattagcaacttcagatactttgccagcgactatgttgattatggaatatcttggtttaacagaaatgtttgattttattgcgacaggagatcgttacttaccgaaaccagatgcggacatgctccaagccttttgtcagtcatgtcaattgaaggcgacagaagtaattatggtaggtgattcgctcgtggatgtttttatgggaacgtgtcatggcaaagcaggaattggtgttttaaccggcaactgccagtcaactgattttgaaaagtttgaagtagcctatttccgtgatatccatgaaataccttatcaagaattatgggaaaataccaagaagaaaaaaatctattatttttgatatatgtattgtgaaaaacgtttcttttattcgagtatctaagcaagcatactagtgtatttcaataaaataccatgatgttcataggttttataatttcagctcacagatttttgttcaataagaaaaaaattacaactaaaatagaaaacgggcgtgggacaaaaatcactttggatttttgtcccacgctcaaaaactgataaacggcgggaacagaagcaacactttcggaaataagccgaaagtgactttctcacacaagtgttcgggatatcttaatccttacctacgtggtgctcggagttaaacacttctgtcctgacttcgttgttaatattttacaatgacaagtttttcttattttaatcctgaacttgatttagaaattgcacttccattagaaaaagaaacagtaacagtagcacctaaatcaccatctaagtttttcatccagattaaagtatcatttttttcaccattgatatttgtagaagtaatccctgttgggtctcctaaatcttttctagcttgttcttcagaatatgaaccatcagtagcaatgttatttacttggtctgcagtaactttatcatgttttgcaaccttcaagccacttacagatttgctcgctgctttgccatcagagaatgaaacagtaatagatgcaagaagatcaccacccttgacatttgtccaagatagagtagtggtagagatgccttggatatctgttgtagaagaagaggctggttcacctaaaattgcttttacttcatcttctgtagaaccgccttcgctgctgttcataatatcaccgacattaattttatcgtaagtkgcttttaaatcagagttatctttcgatttatcttctgrtttcttttcagagctttctttttttgtatcattttttgaactattcgtagcttttgaagaagaggcttctgttttcacttctttggtatcattgcttgcttttttatcctctttgccaagaccactaccagcaatccccagtacaataactactacaacccaaaaccaaattttcttataaaatggtttttttacttttccttcatttgaatcattttttttcattttcactttccctcccatagtttagttaatgatttgtagcgcttactaaatagttgaaaacaatccccaattaaataactttggactacaaatcacttagtttaaatgaaaataagtataccgccatgtgtaaaaataacacaccacagtatacttattttatcattatttcataaaaataacaccattatttttatgaaataattaaaaaagataaaaaatctaaaaacttcgaccgccgccaccgaatgtgccgccgccagttgagtgggtggtgctaccaccaccgcccattccgccactgccgccattgtttttaggaatacgacgcgtagtgatgaaagagttggttaactgatctgtgcgggaggttaagtttaaagttgttttttccctaaagggatattgataacttgaaaattttaattgatatttagaaatattaatgcctaagaagaccaaactgagtatcagcgcagcagcaaaagcaattaccatttccagcggggtaatgactttataacgagtgattttacctgtttcgctgtccacacgatagtgccccccaggaacccctttattaacaaatgcttgagtttcctgaacaaaggtttgagcagccgcgaaataatttccttgactcatattatcccatattttatctaaggtatcatcaattcgtgcatctgtcatataatcaatcatgtttccagaagtagagatgtagattttccgtaagtccatatcaatgagaaaaagaatcgcattttggtccttgccaactttatttaaaagataatgatctgcatattcttgttcatcgccataggtattattatttgtggttacaataaagacagaggcttttgttttttcttctaaaggttgtatctcttgctttagttggttgatttgatcaggtgtcagtaattgtgcgccatcatcaattgaattttcagccgccgaaacgggtagggcaaggccaaaggtaagaagtattaggaaaaaaataggtaaaagtcgttttttcataggaaataacctcctaataaaaagagtgctaagagtccagcgaaaatgcctaacgttgctagccctaaacgagtgtaactaattggaagtacaccgcttactttacctgtttgtccattcatggcataataataaactttttttgattgttcctgactgcgataggtgactaaccaaattggcaaaagcatatagtgattattttcttggtttagagaaatatccgtgcgaacatttgtcaacgtagtataaccagaagcagagtcccgtaacaatgattccgaataatcttgtaattcttgttggacgtgttttttgattgcttcatattcaatatcgcgtttttctgcttggaaacctgctaggtattggcttttgaaaggcaccgcttgatcaattaaaaatggttgaacgccttccaccattttttgttggacgttttttgacaaggcatttttaactaattctttaaacgataattttcctgaacgtcccacattgaaacgttttgtttcggtgtattcaatatcacctacgcgccaaatgcgaatacttgtgccagtagcttgcagttgtccgtcgacttctgcatcaacgacccaataggggaagtaaaccccagttaatttatcgatttgatttttgctgaaaaaatctcggggaatgaaccattttttcttggtccaagcgagaaatttttcaatcgcttcgtctttttcaattgtaaagggtaagacattttctggtaaaaattcgccacttaatcgaccagccaagacaactggattatggcaataataacagtatgtggcagccgttgttgcatcggtgacaatttgagcgccacagcttggacaattaaaaatttccattgtgcctacatctgcagttgtttcattctcagtggtctctgtttgttgcgtacggaggattcttcttccgctgtgaaagtcaaattttcctcggcagtcgttgttgagggattctctaaatgcgcctcatgttgctgttgctcataacgagtcacttcttcttccgtgtaaatatttaaacaatattcacaatgaaatttttgatctttgggattaaataagagcgggccgccacagttggggcatttatgggtaaatgttgtttccattgcaaccgtcctttctaatagagtgagtaaataacaggaatctgattcaaagaaaaagggtagacttgtgcctgacccttttctttaattgttcactacttgcttataaaggaaccccttggaatggtttaccacaatgtggacagaacttaggaataccattacttaagtcaacaatttcgctacattcactacatttcatttctaattttggtttctcgtttgttggttttggtgtaccacagtttgaacaaaacttcccagtgttttcagtcccacattgtgggcaagtccaagtgtctgtagccccttgtgcgttttgctggttttgtttttcttgcatttgttgttggtttgtttgagacgcttgcgcaaagtagttgccattcgcattcatgcccataccaacgcccataaagccgctcatagcgccaccttcatttttaccagcagcctccataccacgagccaaggaaccttgaacatagccttcgcgaacacctggatcgctgagcatagcaccttcatttcgcatgttgattaattttgttgaatcatctgtataagaaatgctcgcaactgctacagaaacaatttccatgccgcgattggtgcgccaatcctcatcaagcgcagtttgcatatatttgcttaattcaacactttttgagggaacataagaaatacgttgcccatcagcagacatttgattgattgctgcttgcaatgctgtaatgaactctgccaaatattgttcattaatatcattaatatctacttgcgtttggtttttaggaatcgcattagtataaaatagcaaaggatctgtaattttaattgagtaatttccgtgtgcacgtaagaaaagttcggcattataaaaattatcaaaatagtttaatggcgcaggtgttccaaatttaatgcctttaatttcttgcaaattaatataaaaaacttgttgtttttgtggagttacgccaccaaatttgaaacgactgaaggtctctgcaatcgcatcttttaaagaaccgttaaacattgaaggcgcagaatcatttttgactgtataatagccttcttcagcagtgtaatcgatgattttgccaccatcgacaagaagcatcatcatgttgggatagacatgtacaacagaaccatctgttaaaacatcgtccgttcctttacgattagaaccacgtttatcatctttacgtacaaaaacaccttttgtcatgacggttgtgtcccccatattatcaggttcaataacctctagccattgatcggccaagccaccgccaactgaacttgttgctgctttaataagtcccatgttcattcctcctaataaaaaactaattgttaaagctagtataccacacaatgaatgcagagaaatccaacgaaagcctgatgaaatggaaaaaattgatcaaactttattaagaaattaaaaaaagtataggtgaaacacaagcattttaaaaaaagttacgtataatagaagaaaagacatattatatagttaggggattattgaatggaacgaagcaatcgtaataaaaaatcttcaaaaaaaccacttattcttggtgtttctgccttggttctaatcgctgctgccggtggcgggtattatgcttatagtcaatggcaagccaaacaagaattagccgaagcgaagaaaacagctactacatttttaaacgtattgtcaaaacaggaatttgataagttaccgtccgttgttcaagaagctagcttaaagaaaaatggctatgatactaaatctgttgttgaaaaataccaagcaatttattcagggattcaagcagaaggagtcaaagctagtgatgttcaagtcaaaaaggcgaaagacaatcaatacacatttacctataaattatcgatgagcacgcctttaggcgaaatgaaagatttgtcttatcaatcaagtatcgccaaaaaaggcgatacctaccaaatcgcttggaagccatctttaatttttccagatatgtcaggaaatgataaaatttcgattcaagtagataatgccaaacgtggagaaattgtcgatcgtaatggtagtgggctagcaattaacaaagtgtttgacgaagtgggcgtagtgcctggcaaactcggttctggcgcagaaaaaacagccaatatcaaagcttttagtgataaattcggcgtttctgttgatgaaatcaatcaaaagttaagccaaggatgggtccaagcagactcctttgtaccaatcacagtcgcttctgaaccagtgacagaattaccaacaggggctgcgacaaaagatacagagtcacgttattatccgctgggggaagcastgcgcaattaatcgggtatacgggcaccattactgcagaagatattgaaaaaaatccagagttaagtagtacgggcgtaattggtaaaactggcttagaacgagcgtttgataaagaattaagagggcaagatggtggctcactagttattttagatgacaaagagaatgtcaaaaaagctttacaaaccaaagagaaaaaagatggtcaaacgattaaattaacgattgacagtggcgtacaacaacaagcttttgctatatttgacaaacgccctggtagtgcggtcattaccgatcctcaaaaaggcgatttattagcaacggttagttcaccttcgtatgatcctaataaaatggccaatggcatttctcaaaaagaatatgatgcttacaataacaacaaagatttaccattcacagcacgttttgcgacaggctatgcaccaggctctacctttaaaacaattaccggtgccattggtttagatgcagggacattgaagccagatgaagagctagaaattaatggtttgaaatggcaaaaagataaatcttggggcggctattttgcgacacgtgtaaaagaagcaagtccagtcaatctgcgtaccgctttagttaattcagataatatttattttgcccaacaaacattacggatgggagaagacaaatttagagcgggtcttaataaattcattttcggtgaggaactagatttaccaattgccatgacgcctgctcaaatttcaaatgaagataaatttaattctgaaattcttttagcagatacgggctacggtcaaggtcaattgttaatttcgccaatccagcaagctaccatgtatagtgttttccaaaataatggaacattagtctatccaaaactagttttagacaaagaaacgaagaaaaaagacaatgtaatcagcgccaacgcagcgaatacaattgccacagatcttttaggtagtgtggaagatccttcaggttatgtttataatatgtacaatccgaacttctcattggctgctaaaacaggaacagctgaaataaaagataaacaagatacagatggcaaagaaaacagtttccttctaacgttagatcgtagtaacaataaattcttaacaatgattatggttgaaaattcaggagaaaatggttctgcaacagatatcagtaaaccattaattgattacttagaagcaaccattaaataaaaagagaaaatgaacgaacgaggtttctgtaaaaagaacctcgttttccctttttagaaaaaggaaagtgtgctacaatgaagcgactaaattgtagaaggaaagggattcgtgtgcgaattttagcaatagatacatctaaccaaacattgagtattgctgtgtgtgaaaatcaaaaaattctgggaagttatacagcaacggttaaaagaaatcatagcttaacattaatgccggcaattgactatttgatgagccaattgaacttggcgccaacggcaattgatcgttttgtcgtagcagaaggacctggatcatacactggcttacgtttaggcgtgacgactgccaaaacattggcctatactttaaagaaagagctagtaggcatttccagtctacaaacgttagctgccaattgtgttggacaaactggtttaattgtgcctctttttgatgcgcgtcgtaaaaacgtctatgctggtgcttatcggtttgtcaatggcgtgtggcaaaatgagttaccggaccaacatatttccctgcgggagttattagaacaactaaaaaatgaaccaaatcttttttttgttggtgaagatgttgaaaaattcactgaagaaatagctcaaatcattcctcatggagaaatttgtgatgttccacaatggcaaattcctaatgccgcagttttggctgcgttaggtagtgtggctgaacctgttgagaatgttcatgggttcttacctgcgtatttgaaaaaagtagaagcggaagaaaattggttgaagacacacacgcctaatggagaaagctatgtggaaaaactttaattttgtgacaaaatactttacaaaaagacggcaacggtatataactaaaaccattgcaatgaaccagcaagaatttcaattgcgtgaaatcacctaccaagatattaaggatttactagcaattgaacgtgaagtttatgctggggaacttccttggacgatgtctgctttcatggcagaacttggctcaaaagcgccgcatctctatttgttagcggcaattaacggaaaaacagttggctttattggttgtcggattcaaggaacggatgcacacattacgaatgtcgctgttcacacagcataccaaggcttaggtttaggtcgttctttaatagaagaaacgcgaatttttgccaagaaaaatcggtgtgaaaccttatcgctagaagtacgaatgagtaatgttaaagcccaacgtttatatcgaaaaattggctttgtctcacagacggtgaaaaaaggctattatgacgaaaataatgaagacgcactagaaatgataattgatttaaaagaagagtgaagaaaaaatgttagtaacaaaaaaagaaatatctgtagcaaatattggtgaagaattatggcgttttagtaattcttcttatacaactggctccccttggacagaaacacaattcgcggaagattttgctcaggaaaatagcgaatatctttttttagttgaaaatggccagtggttaggctatattgcctatcattttattttagatgaagcagaaattagtcacgttgttgtgaatggtcagaaacaacaccaaggaattggttgtccagttaatgaaagcttttaaagaatatgttaaaagtcgtgacattacacaaattttcttagaggtcagagaaycgaatatactagcycmaaaactttakgrgaaaacaggttttcggaaagtagctgttcganaaaattattataaagaaccgcaagaaaatgcctttgtaatgtgtgcgaaattaaggaaggaagcccaatgacaatttttacaaaagaacgtaaattattattagctgtggaaagtagctgtgatgaaacaagtgtggctgtcattgaagatggcgacaaaattctttccaatatcgtagcttcgcaaattaagagccatcaacgttttggcggagtcgttccggaagttgcgagtcgtcatcatgttgaacaagtgacgatctgtattgaagaagcattaacagaagcaaaagtcacaccagaagaactcagtggcgttgctgtgacctatgggcctgggttagtcggtgctttattaataggactttctgcagcaaaagcatttgcttgggcgcaccaattaccacttattccagtcaatcatatggctgggcacatttatgctgcccgttttgtggcaccgctcgaatttccattgatggccttactcgttagtggaggacatacggaattggtctacatgaaagaagatggctctttcgaaattgttggtgaaacacgtgatgatgcagctggtgaagcgtatgataaagtcggacgtgtgttagggttgccttatcctagtggcaaagagattgatgctttggcccatgaaggcacagatacctatcaatttccacgggcgatgctaaaagaggataactatgactttagctttagtggtttgaaaagtgcgtttattaacacggttcataatgcagagcaacgtggtgaagcactgtctacaaaggatttagccgcaagtttycaggcgagtgtggtagaagtattagtgactaaaaccattcgtgcttgtcaagaatatcctgttaagcaattgctaatcgctgggggcgttgctgcgaatcaaggattacgagaagcaatgagacatgcaatcagtgaacaattaccagcagtgacattacttattccgccattaaaactttgtggggataacgcggcgatgattggcgctgccgcctttatcgaagctgcaaaagaatcactttgcttcgtataacttaaatgcagaacctggcgttagttttatgacaattagtgaagaaggctagccagctagacaaaaatttgctataatgaagccagtttaacaatgacattcgatgataaagagagtacttatttcaacgtcagcttagcgatcttgggaaggtgggagccaagagtgatcggaatgaggaagcgcacttttagaattctgctgaaagcagacggcaatcaccgttatcgatgaagcaggtctatccaagtagtatagacaattagagtggtaccgcgggtaaattckgggntctgacaaaacaaattattttgttttgtcagagacgtttttgtttttttaatacttacaaattantcaggagggttcttatgaacaacaaagaaatcgtagcaaaagcgttacatgatgttttaaatgaagaattaacgatggatcaaatcgaacaattattggaaaatcctaaatctgttgatcatggagatgttgcttttccagccttttcattagctaaaatttatcgtaaagcaccacaacaaattgcagcagaattagcagaaaaaattgatggcacaaattttgaaaaaattgaagtggtgggaccttatttaaacttcttcatgaataaagaagcagtcagtcaagctgtcattggcgaagtagtcaaagaaaaaaataactacggaaacagtacctttggcaataatggcaatgttcctattgatatgtcttcaccaaacattgctaaaccaatttctatggggcacttacgttctacggtaatcgggaattcaattgcctttattttagaaaaaattgggtatcagccaattcggattaaccacttaggtgactggggtacacagtttggtaagttaattgtagcttataaaaaatggggttctgaagaagcagtccgccaacaaccaattaatgaattattgcgcttatatgtgcaatttcatgaagaagcagaagaaaaaccagaattagaagacgaagcacgtgcatggtttaaaaaattagaagaaggagaccaagaagctaatgaattatggaaatggttccgtagcgagtctctaaaagaatttgataaaatctattccatgttagaagttgaatttgattcttataatggcgaagcyttttataatgataaaatggatgaaattgttactttattagaagaaaaacatttattaacagaaaatcaaggtgcagaaattgttgatttgacagaatataatttaaatccagcacttattcgtaaatcagatggtgcgacgttatatatcacacgggatttagctgctgcgctttaccgtaaacggacgtatgattttgccaaatcgctttatgtagtcggcaacgaacaaagcaatcacttcaaacaattaaaagcagtcttgaaagaactagggtttgactggtcagatgatatggaacacattccgtttggtttaattactcaaggcggtaaaaaattatccacacgtaaagggaaaatcgttttattagaagaagtattgaatgaagctgttactttagcaggaaatcaaattaacgagaaaaacccagacttagcaaatcgtgaagaagtggcgaaacaagtaggtgtaggtgcagttattttccatgaccttaaaaatgatcgtctaaataatttcgattttgtattagatgaagttgttcgttttgaaggagaaactgggccatatgttcaatatacacatgctcgtgcgatgagtattttacgtaaagcaaactttacaccagacgctacacaacgttatgcactaaatgacaaggatagctgggaagtcgtgaagttgttacaaaaattccctgaaactgtgatgcaagctgctgaaaaatatgaaccatctgttattgcgaaacatagcattcatttagcacaagcgttcaataaatattatgcccatgttcggattttggatgaagatgctcaaaaagaggcacgcttagcgttagtttatgcagtagctactgttctaaaagaagatttacgtttactagggttacatgcaccagaagaaatgtagaagtttttgtgaaaattttactgcgttgaacgctaaacttattaagcaaatattaaagttaagttacagattgagaaattcatagtaattaaatagctggggtgctatactcgagtcaagttataaaaggattagaaaaggtggcacccaattatatgacagaaaaatggcgtgaagacgaagaatatctttcttatgtagaagatttattagcaaccgaagaagtccaaaaattagcagaatacacacaacatatgcattcaactcgtttagaacattcaattagtgtttcctatcatagctataaattagcaaagcgttggaacggcaatgctcgtgcaacagctcgtgctggtttattgcatgatttgttttactatgattggcgcacaacaaagtttgacgaaggctctcatgcctatgttcatccacgaattgcagccaaaaatgctgaaaaaattacagagttgtctgatttagaacgagacattattattaaacatatgtggggcgcaactattgcaccaccaaaatacaaagaaagctacattgtaacctttgttgacaaatattgtgctgtcaaagaagcggcgttgccgatgacgacagccatgaaaaccaaatggcgtcagtattttggtcaacagtcaatctaaaaaaagcttatccgtaaggataagctttttttgtttgacgttgactaaaaagtctagcattcatctatttaaaataaatattaaaagtaattttgttctgttaatttcttttgagcgtatcgaaagactgcttcttgattttcagttgttaactgtttgtaaatgttcataatattggttgggacaacaaatggcgtttcttccgtttcaggaatacctaagatttcaagaggtgatacatctaaaattttagataaggcgacaattttatccctccccatattttcaatcattccagtttcccatttcctgacggtactttttccaacaccaacaaaatttccaacttgttctaatgtaagatttttctccatccttttttgcttcaaaaaattttctttcaaaaaaaccacctccgtaaaaacattctagcacaaaaagtgtcgcaaaagaaacatgtttttttcaaaatgaaagtaacgaatataatagnaaaatcagcattttttaatgatattgacgtttttttcacaaaatgatataattttaagtgtcttattagacactgaaamgggggagagtaaaatggaatcaaatttaattcactcaaaattgaaaatgaaaggaaaaaatgttgagtggttggcaaatgaaatgactgcatacgggcaaccaatatccgcttcaacgatttacaaaaaattaaaaggagaagttgttttcaaagcatcggatattaaattgatttcacaattgttggatttgaataatgaagaaattatggactatntttt

SEQ ID NO: 84 - DNA, 7947 bp; double-stranded, linear
agattancggaanctacctatctgaacgtacagataataatattacmatgcaagcaattcgtgatcattatgaagtatccaatcgatttggcgcaaaagaagtcttggctttttcttctgaacgaaaatggggagctattgaatttccagaaattgggacagtttatttaggggctcctgagcgtttggtagacgatagtcggttgccagaagctgtttttacagcacaagagaatgggtatcgcgtcttgatgttagctattgcggagcaacaaccgttaaacgaaaccaaaatgccttatttagagccattagcaattctagaaattgatgatccaattcgccaaaatgccaaagaaacactggcttatctaaaagaagaaggaatcgacttaaaagtaatttctggtgataatccggtgactgtttcaaatattgctcgtcgtgctgggctacccggttatgagtcttatattgatttgtcgaccaaaacgacagaagcagaagtgcgtgaagcagttcagcaatacacagtgttcggacgtgtatcgcctcagcaaaaacgaaccattgtgcgtgagttgaaagacacagagcatgtggtggcgatgaccggcgatggcgttaacgatgttttagcgttacgagaagcggattgtagtatcgccatggcagagggagatggcgctactcggcaaatttctaatctagttttgctagattctgattttacaacgttaccagatgtcttgtttgaaggacgacgtgtggtaaataatgtaacccgagtttccagcgttttcttcattaaaacgatttattcgtttattctctcaatcatttgtgccttaacggccattgcgttcccgttcattccgattcaagtgaccttgattgatttagcaattgaaggatatccagccttcttcttatctttcgaaggggacaaacgaaaagttgtcgggaagtttttaccaacagctttgaaaaatgcgtctgttaatgcgcttttagttgtagcgaatatcattgctgtttatctgattggacaaaatcaaggattttcttctttagacaccacgacgttaatgtattatttattagttggaattagctgtatggctgttgttcgagcatgtctgcctttaaatccactacgcattttcttggttttcagtaccattattggtatttatgtagcagctatgttattccacaacattttagaaattggtttcttaacttcgcaaacaatgggtctcttctttattatgatggccattaatattgtggtgcgtgtaacaattggtttcgtacaaatgaaacgtgctggaaaaacaattaaagatttataaaaagcagaggttgagctaaaagcattcgtctccagaaatgcagttcttctttaaatcttgaaggaagtcggagcaagcttgatgtttaactgattattttaagagttagtgtctggggcaggagtcaggaagacttttgtcctagatactttctttttttgttgagttgaaacaagatacttgaaaaacagcgattatgtgatacaataaatcatgtgtaaatgtgtccattggaattcgcactgaaatgacagtgcgttttttaaacggtcaatcacatgagttagcacaatgctattcttaggaggtgaggacaatggcacaacgcattcctcaggaagtcattgaggaagttcgtcaccgaacgaatatagtagatattattgggcagtatgtccagttaaaaaaatccggtaaaaattatatgggtttatgtccgtttcacgaagaacgttccccttcattttcagtagcagaagacaaacaaatttttcactgttttggctgcgggaaaggtggaactgtttttaatttcttgcaagaaattgaaggcattagttttccagaatccgtgaaacgtgttgcagatttggaacatttatctgtggactttgattggtcagagccgcgtgaagtagcggataccccagaaaaccaacaaagacggagtttgttacaactgcatagtaaagccgcagaactttaccatcatattttagtgaatactaaaattggcgaacccgcattaaactatttattagagcgggggttaacacaagaactaattgagacctttcaaattggatttgcgccgcaaaaacgtgatttcttaagtcaagtttttaaaaacgaacaactggatgaaacgctttttgagccttctgggctgtttgtccaaagagataacggtacgtttttggatcgtttctatcaacgaatcatgtttccaattaatgatccccaaggcaatgtcatcgccttttctggtcgcttgttaaaaacagctgattttccaggggatgagatgcctaaatacttgaatagtcctgaaacaacactttttaataagcgagaaacgctgtttaactttgatagagccagaaaagaaattcgtaaagaaaatacggtcttgctttttgaaggattcatggatgttatcgctgcttggcaatcaggcgtaaaaagtggggtggcttcaatggggactagcttgaccaatgaacaaattcggcgtttggaacgggtcgctaaggaagtagttatttgttacgatggcgataatgccggtgttcaagccacaaaccgtgcgattcaattattgcaagaaaacagtcattttgacttgagtattgtcagcatccctgaaaagctggatcctgatgaatatgtgcggaaatatggcgcagaagcttttcaaaatttagccaatcatggccgagaaacagtttttagttttaaaatgaattatcatcggttaactagaaacatgaataacgaaaaagaacaattggattatgtgaacgaattgttacgggagttaaccaatgttcaatctcccttggaacgtgatcgttatttaaaccaaattgctcaggaatttcaactttctgttcatagtttggaagagcaattcaatcaattgaagcaagagcaacgttcagtccaacggcaagaaaggcaacaattttatcaagatgaaatgatgccaccaccaatggaagaacctgtttttgaagagaatcacgtccagaacaagttaccgttaacccaagttcaaaaagcagaacgttctttattatttcgtttaatgaatgaacaaggagtacggcaaaccattcaacaattgccagatttttcattcgctcatgatgaataccaagaattatatttcttgctagaaagttatgcgacactgcatcaaagtttcgacattgccgattttattaatttcttgcaagataatcaaaccaaacaattagcaattgaaattgcgtatcagaatttatcggaagaaagctctgagcgagaagttgccgatttattacatgtaattgccttatcaagtattgcagaggcaattgagcagaaaaagattcaacagcaagaagcaaaacgagtgggcaaccaacagcttgaagccgaattaacaatggagattatccaattggctcgacagcttaaagctcaacgaacatttacttaagcaatataatgaatagaactaagcgttttgttcattttattttgataagtcccagtgatttatcagttatttcaagcgtgaaccgaaaaatgaagggggccttctttcatggaaaaagaaacaagtaaaaaatatgaagctgcagtggcagcatttatcaaagaaaacaagcctaaaggaacagtggtttatgatgatttagcgaatcaattagccacaccgtatactttggatgcagaagctatggaaaaattgatccaaaaagttgaagatgctggtatcagcgtggtcgatgaaaatggagacccaagtgaacatagcttgaaaaaagatgaaaaagaagcggaaaaggcccaagcagaagacttatctgcgccaacaggtgttaaaattaatgatcccgtgcgtatgtacctaaaagaaattgggcgcgttcaattattaactgccgcagaagaagttgaattggcacttaaaattgaagaaggcgatcaagaagcaaaacaacgtttagcagaagctaacttacgtttggttgtttcaattgccaaacgatatgtaggtcgtggtatgcaattcttggatttaattcaagaaggtaatatgggcttaatgaaagctgttgaaaaatttgactaccgtaaaggattcaaattctctacgtatgctacttggtggattcgtcaagcgattacgcgggcaattgcggaccaagctagaacgattcgaattcctgttcacatggttgaaacaatcaataaattgattcggattcaacgccaactattgcaagatttaggtagagaaccaacgccagaagaaattggtgcggaaatggatttaccaacagaaaaagttcgtgaaatcctaaaaatcgcacaagagccagtctctttagaaacaccaattggtgaagaagatgattcacatttaggtgatttcattgaagaccaagatgctaccagtcctgctgaacatgcagcttacgaattgttaaaagaacaactagaagatgttctggatactttaacagaccgtgaagaaaatgttttacgtttacgttttggtttagatgatggtcggacacgtacgctagaagaagtcggaaaagttttcggtgtcactcgcgaacgtattcgtcaaattgaagcaaaagcgttaagaaaactaagacatccttctcgttcaaaacaattaaaagactttttagaataaacataccgtttaggggctcttttcgtgcatgcgagaagagccgcttttgatttttaaaaagtctctaaatgtcattgctagttattggaagaaggcgcaagttgtggtaaattagaagtaatggaatattagcagaatgtgaggcggaagaatgacaaaaaaatgtccgaagtgcgggaacgaattcgatgcagaattaacgacctgcccaacatgtggctattcactaactgacacaacagttgataaagaagaagcggaaacgacttcaacaaatatagattttgaaacacaggaaaatgaagaacacgaagatcaattaaatgagaatattgagtggtctgagttaaaagatatgagcttaggccatgtgatggaactgtttggcgaatcaccagaagaagaaagtaatgatgacaaaaaagaagagtcgacagaagataacttaatagtctctgattcagaggatgtttctggtctagaagcatcgcttcaagaaggggctagtgaggagactcatgattcggtggaggagtcgataccagcgacagaagagacgcctactcattcaacagaagaaaaactagcaacggacgaagcagttaatttagaggaaacaacagaagaaacaacggaagaaacaactactgttgaagcagaaacagctgaggtatctgagacggtgaagtcagaagaggaagctttaacagagatttcaggaactgaagttatctctaccacttctgaagaagaaattttttcacaaccaccgatagaagatcaagatgtaacaccaaacgaaactttgcaagcttatattcaagcgcatcgagcagatacagaaatgtctgaaaatccatcagaagaaacagcagagacccaagagttagaaaacagcggtgaggcagtattaacccaagccgaaacaccaactgaatccatttcagattctgaagaagggttaacaagtgcagcgtcgctagaggcaccgagcgacgctgatgcaaccgagggaaaagtttcagattcaggtgtgataccaccgatgaatgaaactgggaatgctcaaccagcgcctgctccgaagaaaccatcaaaaaaagtagttttcgttgcgcttgcggttgttttattagctggaggtagtgcttgggcgtatcatgatcaaacgcaaaaagctgccgcgcaagaggcggcggcactaaccaagaaaacagatacgctgaaagatgaactagcagccttttataccacgaaggagcaagtttttattaaacccgatatggtgactgttagtccagaaaaactctcaaaacaagtcgcggaaattaaagattcagaagagtattctcaattaaataaacaaattcaaacattgaaagagaagcaacaaaccattcaacaaatcaaccaattatttgaggcgccgattgtcaatggcaatgagttgaaaccggcgattctagctgctgatcaaccaatttccgtaaagaaattaacaggaaatgatccatttgaccaattgatgaaccaagcaatcgatcaagcgaaccaacaatacaaccaattacaaaaagctaaaaaagcggttgaggtcatttataaagatggaaaaactaccaatcagctgaatcgagacacgtatcaagctgctaaggcagaagtagataaagtaacaagtgataagctgaaaaaagaactggtcaaacaagtcacgacagctgaccaagcgttaaccaaggttgaagaagaacagaaaagaattgcagaagaacaagctgccgcagagcaagcaaaacaagcagaagaacaagcgaaacaagctgctgccgcaaaaaaagaggacgctaagaaggaagaaacagcaaaaacagaagcgaatggctacacggcgccgaatagtgacggggtttacactagtccgctttatgcgccagatgctgccgatatcgctgatagtagcaatccagcgtggacatgggcaccaggtgtgaaagaaaaagtcttagacacagtgattgctcgtggctatgtggttcctggcggatattctttagaacctgccaaaattgtgaatggcgaaggttactacaatctttatgcaacaaacaatcaatcaaaattattagaaggcactacagagaaaaatgttcacatgtatttagttacaatcaatgctaaaacaggttggttcaaagggaacgcttctcgtaatgcagggcaataaaagaaaatagaaacaatcgaacaaaagcggaaatcttttgttcgattgattttccttgaggagttaatgataaatgagagaattactagcaacaacatttaccggcattgtggtcgatgaaaatgaacaattttattttgttcaaaaaaatggcatcacattccgtttaaaaaaagaagaaggtacgcatgctataggggaggctgtagaagggtttggttatttaaatcaaaaacaagagccagcactgacaactacaattcctactgtgcgcattggtagctatggctttggtactgtcacaggaacgagacgtgatttaggtgtctttgtagacgttggcttaccagataaagatgtcgttatttcgttggatgaattaccaactatgcgggaactttggcctaaaaaagaagaccgagtaatggttactttaaaagtggacagtaaagaccgcatttggggcgaattagcagntganaaagtctttaaagcaatggcaaaacgtgggaatgctgaaatgcaaaaccaaaacttaaccgggcatgtgtatcgtctgaaacttgcaggaacgtatattttaactgatgatttatacattggatttatccatccttctgaacgattccaggaaccacgtttaggtgaaaaagtagtggggcgtgtgattggcgtgcggccggacggcgtattgaatctttcattaaaaccaagaagtcatgaagtaatcagcgatgatgcgttaatgattctaactttcttagaaagagcaaacgatcaccaaattcctttcaccgataaatcaagccctgatgaaattaaacaaacctttggcattagtaaagctcaatttaaacgcgccttaggccatttaatgaaacaaaaattaattaaacaagaagatggtaaaacaattctaattggctcgttggracaatcmaaagaaa

SEQ ID NO: 85 - DNA, 7865 bp; double-stranded, linear
gcaccagcgtggttggatcattctgatcacccgtttcattggcccgatactggtgtttatttatatgaacctggccaagaagttgtttttcaattcgatcaattggtaacagatattcgtgaatgacccagaaaccagttaaaaagcaattgcgtttagggttaactactttatttgctgtacaatttatgmaagaaatttcacgatttttaacaacccatccacatgtgaatttaatattacagcargacggctcgccaaaattacaaacgatgttagcaaataaagaaattgatatgggactaatttctttcccaaataccttacctgaaattattcatattgaacctttagaaacgactaccaaaggctaccatgtttatgtcgtagttccagaatcaaatcctctctcccaatatgaaaaattaacttttaaagatttgaaagatcaacgattttcatcgttaagtgataattttatgattggtcgcctactactagatcggactcggagcttcggttatgagccgaatatcattttgcataacgatgatttacaagtacttctttatagtttgcaaaaaaataattcgatttgtttgctgccgattgaatattatgaagtgggaaaaagtcagggactgaaatggattcctttaaaagataagtttgactatttccccatcggcattgctttgcgccgcgattttagtctgacagaagatgttagagattttatccaaatcattaaagaaaattaatggataatctagccttgataagcaaagacgattttactatcataaattttcaacactttttcaaataagaattttgagaataaacccgcgacaattggaacaacaaaccaagaaaagagtaagggtaagatccctaagcccgcatccaatgaagcaagtggtcccacgagtccaaccaagccaaatccagccgattgtggggttcctgaaatgttgaatagaaccacaggaattgctgaaatagttgctgtaaataaacaaggaattaaaataattgggtatttaaataagttaggcatcatcattttcatgccgcccaaagagacagccagtgtcactcccgattggttgacattccaagaattaatcacaagaacaacagttgtggctgcaattcccattgcagcagcacctgcagacaagccattcaactgaatcgccaaaccaattgccacagtagtgattggcgaaataatcagtgcagcaaatgaacaagcaattaaaatactcatgataattggctgaaaatcagtaaaattgttaatcactttcccgatggcaaccgtaatttgtgtcacatatggataaatcaacatgccaaacaaacctgcacctactccaacaacgatcggtaaagcaatgatttccactgaaccgaattttttatcgatgactaataaaagtaagactgcaacagaagcggtaatcataatattaatgatgtcaccagtgcctgcaccaataaagcctttcacttctgaattaaatttaatcacgccagagccagcaaatgctgcaccgccagcaatcatcattttctgtggcgttaagccaaattgaaaagcmatcagtccaccaataattaaaggggtggctagttggaaaatttgcgccgcatgaataatcatttcgataatcttgtattctgcaaaatattttaaaatggctcctaatacagcattgggaattaaggcgataatggtgccggaagctgttccagctaacactttgttaaaaaatattcttggggttaattgagcatccagtttatcagtgggcattttcaacactcctattgattatttttgtttttttagaacaagtttgagaatgattgaactttctattagataaagagcggcctcaaagaagagcgcttatttctttgaggcgctttttttttaactaaagcaaggaacgatttttaatatatatccgtatccgcattatatttcgctaaattatctttaacatctcgcaagaacttacctgcttgttgtccatctaaaattcgatgatcaatagaaagacataaattaaccatatctgccactttaaagcctccatctgcggttggcacaaggcgtttattaattgactctacttgtaatatcgcagcttgtggatggttaataattcccatcgattggacggaacctagtgttccagtattattaagagtaaaggtccctccttgcatttctttgcttgctagcgttccttgtcggacttcttgtgccaagcgattgatttctttggctagccctgcaatcgaatagttatccgcttgttgaatcactggcacataaagatgctcgtctgtcgttacagctatggataaattaacatctttatgataaataattgagccatcatcccaagatgtattgatttttggatttttctttaacgcttgaatgactgctttggcaaaaaatgggaagaagcttagagataggccctcttgttgtttaaattcatcttttaatgaatttctaagttggactaagttggtcacatccgcttccaccattaaccaagcgtgagggatttcgttgacgctttggaccatttttttagcaattgctttacgtacaggatctgcagagacaattttatctgtgcttgtttcagttggactagctgttgcggcgctttcattttgcgaagcaactggctcctctgaaattgaagggctagttcctggactcactgttttctcaggtgttcttgcctgtgttggtgtaaagtttgtaacatcttttctagtaattcgaccatcacgacctgtccctgtaacttgtgttaaatcaatctttttttcttgggcaattttaaggactgctggggaataacgaccattatttttttgatgggacgtcgcagtgcttgttgtttcagccgtttcatgttcttgcgcttgttccgcacttgcttctttcactggtgctaaagtagctacttctgtttcttctgttgtttcttctgtctctaacgtcatcaccgctgttccgatgggcacatctgtatctagagaaatcagaaattcttttactacaccatcaaaatctgatgggacttccgtggtgactttatcagaaacgacttccattaagggatcatagcgtttcactgaatctcctggtttaactaaccattggacaatggctgcctctgtgacactttcgcctagatgaggcattttgatttcttttgtggccatttattttttcctccttgcttcaattaaaattctgctaattctttcattgctgctaatacttgctcttcattgattaaaaattctctttctaaaggtaatgcataaggcatgcttggacaatcaggtcctgcaagtcgttgaatcggtgcatctaaatcaaagagagcatcttctgaaatcattgccgcaatttcactcatcacgctgccttctttattgtcttctgttacgagtaagaccttccctgttttcttagctgcagccactaatgtttcgcgatctaaaggatataatgagcgaacatcgacgatttcggcatcaattccttcagcggctagtttttccgccgcagctaaagctaattgcaaggtcatgccgtaactaatcacggttaaatcactacccgttctaacgacattggctttgtcaattggtacgatataatcatctgcaggcacttcatcttttagtaaacgatataaacgcttatgttcgtaaaaaatgactggatcatcggaacgaatcgctgctttaatcatcccttttgcatcataaggattagaaggggtcaccactctcaatcctggttgtccacaaaagactttttctgtagactgagaatgatacagcccaccacgaacaccgccgccataaggggtccgataaacgattggcgcagtccaatcgccttttgttctatagcgcattgtccgagcctctgataacaattgattggttgcaggcaaaatgtaatccgcaaattgaaattcaccaattgcgcgatagcccattaaacctaagccgacagctaaaccaccaattaagccttctgttaacggtgtattaaaacaacgctcgtcaccgtatttagcagccaagccctttgttacaccgaacacgccgcctttgtcgccgccgacatcttctccaaaaataactactttttcatcacgagccatttcttcagaaattcctaagttaattgcttctaaataagtcatctcagccattatatttcttctcctcttctcttattttgcatacacttcttctaaaattgatgtcggtacaggatctggcattgcttctgcttcatccgttgcttgattgatttctgcacgaatttcttcatcaattttggcaatgtcttcgtctgttaaatagccctcttctaataattgtttttcaaaaagcttcactgcatcgttctttttcatttcttcaatttcttcttttgaacgataaacagattgatcatcgtcagcggaatgagacgtcaagcgcgaaaccattaattcaatcaattttggtccttttttcccgcgagccgcttttactgcttctttaaatgctagatagacttcagtaaaatcactaccatcaacggttacaccttcaaagccataagctttcgcgcgatcggccattcgtttattggcatactgttcttcaattgggacagaaatcgcatattcattattttcaacaacaaaaataactggtaatttttttacgcctgcaaagttcatagcttcttggacttctccttgattggcagagccttccccagtggtggttaatgcaacaaaatcagctttttgaagttgcgctgcataaccaacacctgtcgctaatggcatttgtgtacttactgttgaagagaaggaaacaatattatgctcttttgaaccataatgattcggcatttgacgaccatgggaagaaggatccgcttcttttccaaaagaacccattaaaatatctttggaggtcatgccccaaaccaagcacgcggtcatatcacgataatacggtaaaaaataatctttttgaggatcaaaagccatcgccatcgctacttgtgcaacttctgccccttgaccagaaatattgaaagaggtcttaccaatccttgttaattgccacaaccgttcgtctaaacgacgtcctcttagtacttcacgatatgcctgaatcaattcttcttttgataaacctgattttttaagcgctttcattttcatcaacctttctctatttgtgaatcgctaagccataagtatctaaggctgcttcttgcaatacttctgtcattgttggatgcgcatggattgcttcaccaatttcaatgggcgcggcatctaaatacatggcagtacttgcttcggcaattaaatccgtgacatgtgggccaatcatagaaacccctaataaatcatcggtcttcttgtcacgaattacttctataaagccatctgtttctccataaacaagtgatttaccattaccattaaaattaaaggtgccaattactacttctttttctgctggtaaagtttctctagtatagccgacacttgctatttcaggatttgtataaacacctcgaggtacgtttgtataatttaaaggttcaactgtctcgcctaaaagatgctgaacagctaactctccttctttcatagccacatgtgctagttggagtgtatcgatacaatcaccaatcgcataaatatgtccttctgtggtttgataaaattcatttacttcaatgcctttgtcagtatatttcactgaggtattctgtaaccctaacttattgatattgggctgacgtccaattgctaccatgactttgtcaacggtgagggtttcttgtcctgcaacttctacttgaaccttttgtccagtaactttcgcttcttggactttgcttcctaataaaatgttaattcctcgttgctctaaacgtttctttaattctttagaaattgttgcactctcatttataagtaaacgatccaaaaattcaatgatagttacgttgacacctaaactatttaataaagaagcccactcgacaccaataacgccaccaccaataattgcaattgattctggtagctcttctaattcaagcatcccatcagaagataagataaattcttcatccaatggcaaattaggtaacgttttagaactagagcctgtcgcaataatgacatttttaggacgataatttcttcttctcgtgttggancattaaacgtaactgccactgcgccagagactggtgaaaaaatggagggacctaaaatcgcaccttcgcctgctaaaattgattytatttttcttgcataagccttcaacacctttgtgtaactgctcaataattccttctttccgttgttgtattttagaaaaatcaatggacgctgcctctgtttcaatcccaaaagaagccgcttgttttaaggtatcaaaaacctctgcgcttcttaataaagcttttgtagggatacagcctttgtgcaaacaagtgccacctaatttgtatttttcaacaattgtgacgtttagccctttttgtgcagctcgaattgctgctacatagcctcctgttccgccacctaaaatcagtaaatctgtttgttccgccattttgatcactcctgctcaatttttgcttcactataatttaaagcttgttcttcccctgttaatactcgattgacgccttcatataaagcagccatctccatttcacctgggtaaaccttaattggtgcaatccaagtgactttttgactaatttcttgaacaacggtttgcgaatagctgcgccccctgttaaaataattgcatcaattgtgccttcaagaaccacggccatctcgccaatactttyygcgatttggtaacacattccttttaaatagtaatttgctgtttgatcacctgcagctatttgtgcttggatatgccgtaaatctgtttcacctaggtatgatttaagaccgctattccccgcaattagctttttcacttggctaatcgttaactcctgttcaagtatccattgcgcaaattcaacgagcggtaaggcaccactgcgttctggcgtataaggacttcaccatcagcccatttaccacatccacawgcgnccttttgatgcgcccccnagctaatgcccccacctaaatgaacaacgataaaattgctttgctcatatgttttccctaaatcctcagcgatttttcgagcgaccgctttttgatttaaggcgtgacccaaackacgccgctgaatgccttttaatccagaaatcctggctaatggctgtagctcatctacaacaacaggatcgacaataaaggctggcacgtgatatttttctgcaaactcattagctaaaatcgcccctaaatttgaagcatgggtattaaagcgttctgtccgcaagtcttctagcatttgttggtcgacaagatacgtaccgccaggaataggcttaagcaaaccaccacgccctacaacagcggctaattgtatgatgttatgtgtttctaaaaattccgcgatcatttgttttcgaaatgatgtttgactgacaacattttcaaaaggtgccaattcttggacgctatgtctaagcgtttcttctgccaagcaatcatgattagcaaaaagcgctaacttcgtggaggtcgagccaggattaataaccaatactgtttccattgttttctgctccttkttttaaacttgtctcatggcaaatcttaatgaatggaatttgctttctgtcgaatcgcttc

SEQ ID NO: 86 - DNA, 4023 bp; double-stranded, linear
tgctccngntgtgctcgatgtattacaagaaagattccaaattcttcgcaatatttattggatgcaacctattggacgtagaagtttatcagaaacgatgggaattacagagcgagtcttgcgtacagaaacagatgttttaaagcaactcaacctgattgaaccttcaaaaagcgggatgacattaacagaacgcggtttggaagtctaccaaggcttagaattagtcatgaatcaattgcttggcatgcaccaaatcgaaaaagaaatgacacagtactttggcattcaacgttgtatcgttgttgcaggagatagtgatatccaaaagaaagttctttcggactttggagatgtcttaaccaatacgctgaatttactcttaccaaatggtgagaatacaattgcggttatgggtgggacaacaatggccatggtggccgaaaatatgggatcactagaaactgaaaaacgtcataatttgtttgttccagccagaggagggattggtgaagcagtttctgtccaagccaattcaattagtgctgtaatggccaacaaaacgggtggtaactaccgggcgttatatgtcccagaacaattgagtcgtgaaacgtataatagtttattacaagaaccctcgattcaagaagttcttacgttaattagtcatgccaactgtgtggtgcacagtattggtcgagcgttgcacatggcggcacgccgaaaaatgtctgatgacgaaatggttatgctcaaacaaaaaaatgccgtggcagaatcgtttggttatttctttgatgaagaaggaaaagtggtctataaaattccacgaattggccttcaattaaaaaacttacaagaaattccctatgtcgtcgcaattgcgggcggcaaaacgaaagccaaagccattcgcgcatatatgaaaaatgcaccaaaacaaacgtggctcatcacagatgaagctgccgcaaacgagattttaaaaggggtaaccctttaaaataaaaaatttttgattttcataaggaggaaatctttaatgacagttaaagtaggtattaatggatttggacgtatcggacgcttagctttccgtcgtatccaagatgtagaaggaatcgaagtagttgcaatcaacgacttaacagatgctaaaatgttagcacacttgttaaaatatgacacaactcaaggccgtttcaacggtacagttgaagttcacgaaggttcattcaacgttaacggcaaagaaatcaaagttttagctaaccgtaaccctgaagaattaccatggggcgaattaggcgtagacatcgttttagaatgtactggtttctttacttctaaagaagctgctgaaaaacatttaactgctggtgcaaaacgtgtagttatttcagctcctggtggtaacgatgtaccaacaatcgtttacaacacaaaccatgaaacattaactggagaagaaactgtaatttcaggcgcttcttgtactacaaactgcttagctccaatggctaaagctttacatgacaactttggtgttgttgaaggtttaatgacaactatccacgcttacacaggtgaccaaatgacattagacggaccacatcctaaaggcgacttccgtcgtgcgcgcgctgctgctgcaaacatcgtacctaactcaactggtgctgctaaagcaatcggcttagtaatcccagaattgaacggtaaattagatggcgctgctcaacgtgttcctgtagcaactggttcattaactgaattagttactgtattagacaaagaagttactgttgatgaagtaaatgcagtaatggaaaaagctgctaacgaatcttatggttataacacagacgaaatcgtttcttctgatatcgtaggtatgacttacggttcattattcgatgcaactcaaacaaaagtgatgacagttggcgacaaacaattagttaaaactgttgcttggtatgacaacgaaatgtcatacactgctcaattagttcgtactttagaatacttcgctaacttataagattcattcttatcattagtgaaatttgaacaattgtgaaataataagcggggaagcaacgcgcttctccgctttctttttttaaaaaagaaaaatcctaaaattgacaatacaggaggtctactcatggctaaaaagacaattaaagatgtagatttaaaagacaaaaaagtccttgtccgtgttgactttaacgttccgttaaaagatggcgtgatcacaaacgataatcgtatcgtagcggctttaccaacaatcaaatacgtgattgaaaatggcggaaaagcaattcttttctctcatttaggtcgtgtaaaaacagaagaagacaaagctggcaaatcattaaaaccagtggctgaacgtttaagcgaattactaggtcaaccagttacttttgttccagaaacacgtggtaaagaattagaagacgctgttaacaatatgaaagatggcgacgttttagtatttgaaaacactcgttttgaagatgttgacggcaaaaaagaaagcggcaatgacgctgaattgggtaaatactgggcttctttaggcgatgtatttgtcaatgatgcttttggtactgcacaccgtgcacatgcctcaaacgttggaattgcttcaactggtatcccaacagttgctggtttcttaatggaaaaagaaattaaattcatcggcgaagctgttgaaaatccaaaacgtccattcgtagcaatcttgggtggcgcaaaagtttctgacaaaatcgctgtcattgaaaacctaattgaaaaagccgataaaattttaatcggtggcggtatggcttacacattcatgaaagcacaaggctatagtgttggtttatctttacttgaagaagataaagtggacttagcgaaaagcttaatggaaaaagctggcgacaaattagttttaccggttgatacagttgtctctaaagagttcagcaatgacgctcctttccacacggttccttcaactgaaatcccagatgatgaagaaggcttggatattggtgaaaaaacaattgaattattcgctaacgaattacaaggtgcgaaaacagttgtttggaatggaccaatgggcgtatttgaaatgagtaactttgccaaaggaacaattggtgtttgtgaagcgattgctaatttagaagacgcaacaacaatcatcggtggcggggactctgctgctgcagcaattcaattaggctacgaaaacaaattctctcacatctcaacaggtggcggagcaagtttagaattattagaaggcaaaactttaccaggtttagcttctattaacgataaataatcagtttaaaagacaatatttttaaaaaaagaaaaggatgtgcttttcatgcgcaaaccaattatcgctggtaactggaaaatgaacaaaactttaagcgaagcacaaagctttgcagaagcagtaaaaaatgctgttccatcaaacgacgttgttgacgctgtgattggatctccagcattattcttagctcctttagcttggaacctaaaagattctgaagtgaaattagctgcacaaaactgctactgggaaaacgctggtgccttcactggtgaaaactcaccagctgcaattgcagatttaggtgtagactatgtgattatcggacactctgaacgtcgcgaatatttccacgaaacagatgaagatatcaataaaaaagccaaagcaatctttgcaaatggtatgacaccaatcttctgttgtggtgaaactttagaaacgtatnaagctggtaaaacagcggaatggatcgaaggtcaaatcactaaaggcttagttggtttatcaaacgaacaagttgcttcaatggttatcgcttacgaaccaatttgggcaatcggaactggtaaatctgcagatgctaatattgcagatgaaatctgtggtgttgttcgttcaacagttgaaaaattatacggcaaagaagtttc

SEQ ID NO: 87 - DNA, 2288 bp; double-stranded, linear
gggcggtgtcactgcgtctattttcggttatcggccaacctttttcattactggtacgattttatwactcgtttttgttttgagtctcgtctttgtccatgaagagtttgtgccaattgaaaaaaatcaagccgcatctgggaaacaaattttaaaaaaactagaacatccccacgtgattcttggaatgtttattacgacattaatcattcaagcttccaataattcaattagtcccatcatcagtttatatattcaacaattgttgggtggtcacggaaatgtcaccttaattagcggagtcattgcttctattccagggattgcaacgttaatagccgcccctcgtttcggccggttaggcgatcgtattggcagtgaacgcatcttgacaattggcttaattttagccatttttgtttacctaccaatggcctttgttcaaaatgtctggcagcttgccatgcttcgtttcttagttgggatttccgatgcctgtttactaccagctgttcaaacgttgatcactcgttattccccaagtgacgctgcaggtcgtattttcagttacaatcaatctttccaagcgacaggaaatgtgattggtcctatgattggttcaagcgtatctgccgctttcggttatcgtggggtctttatttccacttcttgtctggttctccttaaccttctatgggttcgtcgaagcaccgccgaattaaaaaaagagaaaaatgatgactaagttatacacagaaaagttatccacaatttgaatttttaatttttctctttttcttattttaaaaaaaataggcatataaaacaaaaaagaaaagcggatatttactggttttatgaccagcatatccgcttttcttttggttaactatacgctttttgtttcacaactcgtgaaactttttagacgtattgtagttctttttcatcttggtaggcgcgatcaattaagccgccccctaagcattccatcccatcataaaaaacaacagcttgacctggagtgactgcacgcgctggttccttaaacgtaacggttgcttttgtgccatcttcagataaggaaacatgcactggaatatctgcttgacgataacggaatttagccgtacagtcaaactcttttggcattggtgtatcaacagtaaaatgaacctcactagcttctaaatgtgttgcatatagtttttcatggtgaaatccttgtcccacatataatgtattggtagttaaatctttcccaatcacaaaccatggttcttgtgttttaccgccgccaccaattcctaagccttggcgttgaccgatagtataatacatcagaccatcatgttgtcctttgatttcgccatcttctgtcaccatgttgccttttttagctggtaaataattactcaaaaattctttgaaattcttttcaccaataaaacaaacgcccgttgagtcttttttcttggctgtggctaatccagcacgttcagcaattgcacgaacttctgatttttccatgccacccaatggaaacattgtttttgccaattgggcttgtgataattggcttaaaaaataggtttggtctttattattgtcaattccacgtaacatatgcactacgccattttcatctgtttctacttgcgcatagtggccagtkgcaacatagtcagcgcctagttgcatagcataatctaggaatgctttaaatttaatttctttattacacatgacatctggatttggtgtccgtcctaaccgatattctgctaaaaaatattcaaacacacggtcccaatattctttttcaaaattgaccgaataatacggaatcccaatttgatccgctacttttgcgacatctttataatcctcagttgcggtacagacaccattttcgtctgtatcgtcccaatttttcataaagatcccaattacatcatagccttgctcttttaaaagcaacgctgtgacagatgaatcgacaccgccactcatgcctaccacgacacgcgttttgctgttatctgccattttatcaccatcatttcaattagattctgaaatcatccacgatttgaaggtcgtaacttttcagtgcttttcattatactatttttttgaaataagtaaagcaagccgggcgtataatgagaaaacacttggaacaaagacacagccaacaagctattgctttcaaataaacagaaaacctgmaggaacaagctactttcgcttgtktcttcaggtttctctaaattattctactttct

SEQ ID NO: 88 - DNA, 6691 bp; double-stranded, linear
tttaatttttgggaaaaaattwccaaaggctaaggatagktaaattggggaccwtatttggaatattgattaaattctgaccacttaattgtctttkgaaaaggttatgctaaagttactttgtaatcgaatgaggagggctatcacatggaagaaaagaattggcctgagttatttgctcgttatcttattgtcgaaagaggctattcagaaaaaacaaaaaaagcatatcaagaagatatacaacattttttttcgtttttaaagacttcaggtaatgacaattatttgactgtggaacatttggatgttcgggcttatttgagcgaattatatgatcaggaatatagccgcaattcgattagtcgaaaaattgccagtttgcgttctttttatcaattcttattaaaaaatgaagcaatccaagagaatcctttttcctatgttcatatgaaaaagaaacagttacggttgccccgttttttttatgaaaaagaaatggatgcattatttgagagcgcacaaggggagcaaccgcttgatttgagaaatcaagcattactagaagttctgtatgggactggtattcgggtcagtgaatgtgcgaacttaacggtggacgcagttgactttcaagcttctgttttattggttcacggaaaaggaaataaagaccgttatgtgccttttggttcatttgcacaagacgccttaaaggattacttagagaatggccgcgcgctattaatgacaaaatatcaaaaaaaacatccgtatgtctttgttaatcatcatggtgaacaaatcacgccaacagggattgaatatgtcttaaaccaactaattaaaaaaagttcattaaatgcggaaattcatccccacatgttacgccatacatttgcgacacatttattaaataatggcgccgatatgcggacagttcaagaattattaggacatgctaatttatcaacaactcagatatatgcgcatgtgacaaaagaaagtttacaaaaaaattatcgaacgtttcatcctcgtgcataatggaggtaaacgtctaggaggaacaataatggttgaatcacaatttcactctacaacaatttgtgcagttgaaaaagatggaaaatttgcaatggctggtgacggccaagtaacaatgggcgaatctgtcgttatgaaaggtacggccaaaaaagtgcgccgtatttacaatgatgaagtcgttgtcggttttgcaggaagtgtggcagatgcctttacattagaagaaaagtttgaaggaaaattaaatgaatacaacggaaacttaacgagagctgcggttgagttarcccaagagtggcgtacacaacagtctatgcaaaaattagaagctatgctgattgtgatgaataaggaagaaatgctcttagtttcaggaactggggaagtcatcacaccagacgatggtattttagcaattggttcaggcggtaattttgctttgtccgctgcaagagccatgaaaaactttggcgataaagaaatgccmgcgaaagagattgctaaaaatgccttaaatattgctgcagatatctgtgtatttacgaatcataatatcattgtagaagaattataagcgagggaaaatccatgaatgaattaaacaaaacaccaaaagaaatagtcaaagaactagatcaatatattgttggacagcaagctgccaaaaaatcagtggcggtagctttacgtaaccgctatcgtcgcttgcaattagaagaaaatatgcaacaagatattacgcctaaaaacttactaatgattggaccaacaggtgttggtaaaactgagattgctcgtcgtctcgcaaaaattgtcaatgcgccttttgtaaaagttgaagcaaccaaatttacagaagtaggctatgttggtcgggatgtcgaatcaatggtgcgggatttagtagaaaatgcgatccaaattgttgaaaaacaacaatacagtcgcgtgtatgcgcaacattaaaaaaggccaatcaacgtttagtcaaagtattagtgcctggaattaaaaaagaacaaaaacaggctggcggtaatcaatttgaacaaatgatgaacatgtttaacatggctcagcaacagcaagaagcacaagaagaagtaacggaagatattcgaacgaatcgccgaacaattttggaacagctggaaaaaggtctattagataatcgtgaagtaacaattgaaattgaagaaccgaagaaaacgatgccagctatgaacaatggcctagaacaaatgggtatcgacttaaatgaaacgttaggcgctctgtcaccaaagaaaaaaatcgaacgtactgtaacggtgaaagaagcacaagaattattagtgaaagaagaatcagcaaaaattgtcaatgacgctgatattcatagtgaagctattcgtttagctgaatcaagcggaattatttttatcgatgagattgataaaatcacctctaaaagtcaacaaaattcgggcgaagtctctcgtgaaggagtacaaagagatattttgccgattgttgaaggctcccaagttaacacgaagtatggtcctttacaaacggatcacattttatttatcgcttcaggtgctttccacttgtcaaaaccaagtgacttgattccagaattacaaggccgcttcccaattcgagttgaattagatgatttaacggcggatgattcgtaagtatcttaactgagccaaacaatgctttaattaaacaatatgtagcattaattggcacagaaaatgtttcagtcatctttacaaaagaagcaattgaacggttagcacacatcgcttatgatgtaaaccgtgatacagataatattggggcgcgtcgtttacacacaattttagagcgtttattagaagatttattatatgaagcaccagatatgcaaatgggtgaaattacgattaccgaagcatatgtcaatgaaaaattgaatgacattgttcaaaatgaagatttaagtcgttacatcttataaaaaaggctggaggagaaaagatggctacattattagaaaaaacacgtcaagtgaacgagcttttgcaaaaaaacaatctgtttgacgtacaagcagaacttccgtacaacaaaatggcaatgattttaggggatattttagaaagtaatgcgtatattattagcagttcaggggatttgttggggtatactgaaaaattagatgttaataatgcccgtatcaaaaatatgtttaaagagaaaaaatttcctcaaggatacaccgaggccgtggatatgctcaaagtaaccgaagccaatattccaatagatagtgatttaactgcatttccttttgaatcacgagagctgtatccgtttggtttaaccactattgtgcctttgtacggtgctggcaaacgcttgggtacgattattttagcgcgtgttgaaaaatcctttaacgaggatgatttagtgttagctgaatatagtgcgaccgttgtcggcatgcaaattttgtatcatcaatccagaacaattgaagcagaagttcgcagtgcgactgccgtgcaaatggccatcaacactctttcctatagtgaattaaaagccgtccatgccatttttgaagccttagatggcgaagaaggtcgtttaactgcttcaagtattgcagatgaaataggcattactcgttccgtaattgtgaatgccttaagaaaattagaatcagctggaattattgaatcacgttctcttggtatgaaagggacttatttaaaagtattaaatcaacaatttattaaagagttggaaaaataagcaattgctcgtatcaactaggaggacaacgcaatgactgtacaaattgaaaatgaatttctaatcgcaacatttgctgaagaaggagcagaattagtaagtttacaatcaaaagaaaccggcattgaatatatttggcaaggaaatcctgaattttgggcccgccatgcgcccgtactttttccgattgtcggtcgtctaaaagaagatacgtatatgtaccaaaatcaagcgtatcatttaactcaacatggttttgctcgtgatcaagtatttgatgtgattgaaaaaggtggagaagaagtttctttttcactaaaatcaacaaaagaaaccaagaagaagtatccttttgattttgaactagtgattacttatacattagaacatcaagaattgactgtaaactaccaagtagaatacacagggaaagaagagatgtattttgggattggtggtcatccagcctttaatgtacctttagaatcttcactaacgtttgaagattattatctaagtttttcacctaaaaaatcacggacacaaattcccttagcaggcccgtttattgatttagcgaataaaacgctagcccaaacgaataccagctttgacttaacgcatcaattatttgaaaatgatgcaatgatttttgaaacaaaaggtcaaacagcaattacgattgccacagacgaaagtgaccatcaagtcactttgagttatccagaaatgccttttgtggggatttggtcaccgacaccgaaagaagcgccttttgtctgtatcgaaccttggtgcgggattgctgatgctgtcgacgcaactggccaacttgctgaaaaatttggcatcaataagttmccagctaacgaactatttaaamcacagtatatgattagtgtaaaataaagaaaaaggctgtgaacattatttgttcacagcctttttctttattttttttgcacgtaagccaaaagaaagacgactttctgttccatttttaattcgctgaatgttttcacgatgacggacaaagataaaagtagtcaaagcaatcgcaatcacggttaataaccagttaaatgttggtaaaatagctgggacagtgaaaggcaaaataatagtagaaagtgtaattagtacagcgctaatcatacttgttaaactcaccatactggttagatacagacaaatcacaaaaataagagcagaataaataaaaaatgtggggctgtatgctaataacatgccagcgctagtggctacggctttaccacctttgaaattggcaaaaatagggaaggtatgccctaaaacagctgctaccccaaagaagagcggattcacgccttgtaaaccaaacaaatagggtaatgaagtggctaacgttcctttcaagatatccattaataataccgtaattccggcaggtttccctaagacacgaaatgtattggttgttcctgtattcccactcccaaattggcgtatatcttttttaaagaaaagtttaccaatccaaacacctgagggaatcgaacctaataaataggcaacaagtaacaaaatgacgattttcatcaagttaacctctttcttattcaaactaggatttattttatcatgaatagaaaaacggaacaacgtctaataactaaaacaagaaaagtttttcttttgcttgaggaagcgttgacaaatggttgataaccgttataataaatgtgtgtcattagacaaagacgtctaatcactggtttgaaaattagttatcaacgaagatacaatatatatgtacttatgaagtgtcagggaaagaggtgcgaatcctctacagacctacctactgtatggtggatgaaaccaataagaccacagattattctggaaggattgggagtaagaagaagctaagtcaggataccggcttgataagtctaatcattcttttgtaggaaaaagaaggggctttgaagataactggctgagtatatcattagcatagttaagtgactgctttttttctattggagaaaaaagtggtttttttgtattgttttgacgttgagacaaaggaggttcatttcagaaaattttccccaaaataaaatagacgaatgcgaggatgaaaaaatgaaaaaatttactttaacaatgatgactttaggtttagtagcaacacttggcttagcaggatgtggtaaacaggaaaagaaagcaactacctcttctgaaaaaacagaagtaacgttaccaaccaaagaccgtagcggcaaagaaattactttacccaaagaagcaaccaaaattatttccctagtgccatcaacaacagaagtgattgaagacttaggtaaaaccgaccaattaatcgcagttgatactcaaagtagtacaatgatgactgatttaaaaaaattaccacaaatggatatgatggctgtcgatgccgaaaaattgattgccttgaaaccacaaattgtttatgtgaatgacatcaatttagctagctcagaaagtgtttggaagcaagtggaagatgctggaattacagtcgttaatatccccactagtacaagcatcaaagcaatcaaagaagacgtccaattcatcgctgatagcttatctgaacatgaaaaaggacaaaagttaatcaaaacaatggatcaagaaatcgacgagtagcgaaaattggtaaaactattaaaaraccaaaaactgttttgtttgaagtggctgccttaccagacatttatagttttggtaatgggacatttttaaatgaatggattgaaccaattggggcaaaaaatgttttggccaatgaaaaggctggttnccagtgaca

SEQ ID NO: 89 - DNA, 20072 bp; double-stranded, linear
ttanggtanccaatcgttccccggtaaatttggacagttttaatctgttccacaaacgatnaacggctccgtttgttaataactgccgttctaacatcttttctaaattgtgaaacaatttcttgtttggcatagggcggatccaataagaccaaatcaaattgtaacttctcttcataaaactgttctaaggcacgattagcatccatttttctaacttcaaatttttctggttcttttgtaatcgcaatattttctttaattacttttagtgcagcaaaattcttttcaatacaaatacttttgtccattccacgagaaacggcttcaatcgctaacccgccacttcctgaatataaatccagcgccattccgccatcgaaatatggaccaatcatattaaaaatagattcttttactttatctgttgtgggcctagtattgtcgccatctaacgctttcaagcgccggccaccatattctccagaaataacacgcattgtttcgactcctttatcaatcattcttttataattcattataacaaaaagagtgaaaaatgtttgaaatttctcataacatttctcactcttttgcattagacattctctgctaagcgaatctctgtagataattcctctactacatagccgtcgtcttcttgttcttgataagccgctttggtaccaattttttcagcaaaattcatttcgacatctggtcgatacgatttatcgacactacgaacaaaatgtaactgattaattttttccatgttactttcaatattttcttcattcatgtaaatcaccacatatttcatttttcgtgaaacatagtgaatcagtccatatcggcgtaactgttttaacggttttaatgtgtatacccaaacaattaggcaacgacgctcttgaagcgtaaattctttttcttctttagcttgcatggcagcttcctccacaacctgaatgtttctttcctcgttcaaagaaaggatttccagcatctactttaatatcttcagaaattagttgcgcaatctttaaaccaattgtatctagcaacgtttgaacgtttgtctcagcaaaacgataatttgcaacgatttcatttaaatcaagcgcccgcttcgctttacgtagggctcgttgtttctcccgaaaatcgggtgcatgaattccataagcctctactcgttcaaaggctgacttagcttctaaaaatgctttttgtaactgagcaacttccgccgaagcatacatagctttttttgtttctttatagttttgaacagcatcactttctaaaagtgctgaaattaaacattctgtttgatcttcaattgcaaataaatgttctgttacaatcataacttttcactactctccgtgatttgcctattttctggtcgtttctctaataagactaacacaccttcattggaaaaggcaacgcccaattctgtcgtttctgactcagcaaaatagctatcatattgcgggtccgaaaaccatgacaaaatagtaaaggtactatcataaacaggttcttggaaaatacctgctggttctctcaacgaaagttkgctcgttttaactaataaagraaattcgkccttagtcmaatgaaagggatgaatggctgtatgttcctctctcgtttgtaacaattctgcttgtcgatttgccgacaaaattgttggtgtatggttagccatcgtttgatacaatgtttgggcatctttttggctttgtgtagaaactgaaaaagcaacttgactttcttgctgtttaaccagattcatgacataaatcgcttggttactttgaacaggatcgaaggtcattgactgcgttatatcaactggcaaaggagaaccttcatttaattgatacggcatttccgtgagcaacgtttctttattgacataattaactgccattaaaccgcctgtccgctgattaaaaaataacaccgcaaaactgccattatcaaaagcaaccagtggtcgatagttcatatcttcttccatcagctcgacatcgtaagcttcatgatgaaaattaaatgcaaaattcgaataaatcgtcattaaatcagacaagtcagcaagcttcatatctattttaaacggttctatcattttgtcattgttaaaggccttaattgcgatgactttattttctcgaacgttgacttctaagtaatcattcatcgtcaaaccgaacgtccataattcatacgtacgacctgttttaattttttctttaggattgccaaactggcggataaagatttccacatctttccctatgtatgctgcgtaccagaagctggcaattcttcatgaggaacagcggtgtgagcgctggataagcgcccactttgagctgtttcggttggtttttcagcagggaaaaaaactggctctaaatatccaatgagtagaactgttaaaaaaacagcagtaaaggcccaaaatcgcttcattttttcccctctcatcttatttttctttcacttctaataacaaatcacctgagctgattgcttcgccttcttcaacataaatgtgatctaccgtgcccgcaaaacgtgcttcgatagtcgtttccattttcatggcttctgtaatcagcaacggctgacctttttctactttatcgccacgtttgaccaatacttgtagaacagaaccagacatcgttgcgccgatttgttctttattagttggttccgccttttgttttacttgaacagcagacttaatagaggcatctttaactaaaacctcacgacgttgcccattcaaattgaagaacaagacacggtttccgtcaatatcaggttcgccaatttcatctaaacgaataattaacgtttttcctcgttcaatttgaacttccaatgtctctccttgacgaataccattaaagaatgttggcgtatctaataaggttatatctccaaaggtttcgtatttttgacgatactctaaaaatacttgtggatacattaaataacttaaaacttcttccaatttaggttgatacccaattttttcggctaattcttcttgtactttcgcaaaatcaacaggtgctgctaagtcacctggccgctctgtgaaggctggtcgaccttttagaataattcgttgcagctctttcgggaacccaccaactggttgacctaaatcaccttggaaaaaagtcacaactgattcaggaaaacttagttcttcaccacgcgcataaacatcttgttctgtcagattattttgaaccatgaagagtgccatgtctcccacgacttttgaagatggcgtcacttttacaatatcgccaaacatcaaattcactgtgtgatatatttttttgatttcatcccaacggtgccctaagcctaccgcttttgcttgctgctgtagattagagtattgcccaccaggcatttcatgcatatagacttctgtttgcggggcatttaacccattttcaaatggttgataatacatgcgcacatcttcccaataatgattgattttctgtgcattatcaatgttaatagttggcgtccgttcaccattgactaaagcataatatagactgttcatacttggctggctagttgcgccactcatcgcactcattgcgacgtcaacaatatcaacgcccgctttagtagctgctgaatatgtgatgatcccattgccactagtgtcgtgagtgtggagatgaattggtaaatccgtggctgcctttaattcactaattaaacgataagcagcttgtggtttcaataagccagccatatctttaatcgcaatgatttgtgcacctaaattttccaattctttagccatatcaaggtaatattgaacattatattttgctcgggctggatcattgatgtccccagtataacaaattgctgcttccgcaatttttccggtatcccgaacgacttgaatacttttttccatttgaggaatccagtttaagctatcaaaaattcggaaaacatcgactccttggcgagcggattctttaataaattcttcaataacattatcaggataattttgatagcctaccgcattagatcctctgaacagcatttgtaaaagtgtgtttggcatcaactgacgaatttttcttaaacgttgccatgggtcttcggttaagaagcgataggcaacatcgaacgtagcgccaccccacatttcactagaaaacagctcaggcagggctgcatcagttagaccagcaattgctttaaaatcttgtgttctcacacgagtagctaataaactttggtgcgcatcacggaacgtggtatctgtcattaacacactttcttgattcttaacccaatcgatgacggcggttgctccttgagcgtctagaatatttttagctgtaatcactttttctggaacttcaatatctgtcggcacgcgcggggcttcaaaatattttttctccgttctttcaatgccagggaacccattgaccgttacttctccaatgtatttcatcgttttattgccacgatcgcgcatacgaggaaattcaaataattcaggtgtattatcaataaaggttgttttggcttcgccagattgaaacgctggatagctcacaacattttgtaaaaacggaatatttgttttcacgccacgaatccgaaattcttttaagcagcgttgcattttactgattgcctgttcaaaagagaaaccatgcgtacagactttaaccaataaagaatcaaagtagggagtcacagcgtagccagaataagcattccctacatctaaacgcacaccaaaaccacctggtgaacgatacgtatcgattttccctgtgtctggcataaactggttcaggggatcttcagtcgtaatccgacattgaatagccgcgccttttaatgtcaattcgttttgttttggcaaatgcatatctttatgcaaatcaagcccttgcgcaatttgtaattgagagatcacaatatcaatatctgtaatcatttctgtgatagtatgttctacctgaacacgaggattcacttcaataaaataaaactgatccccttctactaaaaactcaaccgttcccgcattcacgtagccgacatgtgccattaactgcacagcagccgaacaaatggctgctcgttgttcttcattcattgatacacatggtgcgacttctaccactttttggtggcgccgttgaacggaacaatcacgttcaaataaatgcaagacgttcccatgatgatcgcctaaaatttgtacttcgatatgtttaggattagaaatatacttttcaacataaacctcgtcagaaccaaaggctgctttcgcttcactttttgctctttcgtaaccttctcgtgcttctttggcatcgtgggcaacgcgcatcccgcgaccgccgccacctaaagcagctttaatcatgataggaaagccatgtgtttcaccaaaagctacaacctcttccaccgttgctactggcccgtctgagcctggaatcgaagcaatccccgcagctacagctgcttctttcgctttaattttatcgccaaaaatatctaaatgatgtgttttaggtccgacaaaaatgattccttcttcttcacaacgttcggcgaacgtaagttctctgataaaaagccataaccaggatgaatggcatctgctcccgattttttggcaatttggataatattttcaatgtctaaataggcttcaattggttttttccccttaccaactaaatacgcttcatctgctttgaaacgatgaacagaatactcatcttctgcagcataaatcgctactgtacggatatctaattctgtacaagctctaaaaattcgaatcgcaatttcgccacgattggcaactaatacctttttcataacgtcactcctaccatcaatttccttcaaatttattggttctgttctaaagataaatagtactcattttctaatttctgacgtgtttcatctgcactgatattcaggacaaaggccacagcaatcgaaataatcagcaaactattcccaccttgactcaagaacgggaaagtaattcctgttaatggaataatcccagtaatcccaccaacattaataaagacttgaattaataacattgtaccaattccaatacacattagtgaattaaaaggtttcttcgagcgtacaccgactaaaataattcgcgcaatcataaacatcaacaatcctaaaatcgctagaccgccgataatgcctaactcttctaaagtaatcgcaaagataaagtccgtatgtgcttctggtaaaaagccttttttctgaacactattccctagacctttgccaaaccagccgccattactgattgcataataagaattagctaactgatgtcctaagttccgttcatctaaaaatggatttttaaaaacagcaaaacgattataaatatattgataacgcgctgggaaaatttttcctttagacataattaataactgaatagccgtgatactacctaaaatgcccaagccaccgaccaagtaggtatacatataattaatcccacttgctaaaaccatcacgatggtaattaatgttagaatggccgcattcccgaagtcaggctggattgcaactagagcaattaatacaaaaacgagcatcaacgggcgcccggcagcttgtttaaattgatccatgcctccattaattgtcttttgtcgccgtgctaaaatataagacagataccagacaaccataatttttaaatactcagctggttgcatcgaaaatccaccaatctcaatccaaccacgtgcgccgttaatttctttcccgataccaggaatccgaacggctaaaaccataaccgtaattaccgcaatggcaaacatgataaaacttcgattctgaaaaacggatgttttcatcttataaataaaaaacattgcaactaaccctactacccaaaaggcaacctggttaataacgaatgaggtaggtgaaaaacctttcattacttgtaatgcggatgtggaactatataccataatcaatcccacgatacttaaaattaaatatggaataaaaatactatagtctagcaaatgccgtttctttactttgtttggcaaagcttaaccctccttgccaatctcgtttttttcttgtgtttcttcataaacatctgtatataattgattcaattcgcgttctaaatcacttagtaagcgatgtccttcatcattagttaaaatccccaaacgggtcgcataggtcacttgtcttgaaaaaccatacatttgtgtatccaccacttcttcaaatgctttacattgagaaatgcacaaactgtttttttgattacgaataagcattttaatgcgttctgcatcgtcttctaataattgaatggcaaatttctttgaaattccttcgtccatttgtacagaacctccctatcttaattaaataattataacataattctcagttagatacatgatgakttcagaaaatttcctttaagaaattttctgaaaccaagcgatatattaagtaagaaatctctttatataacaagcttattttatcactacaacaacaaatacattaaaagacttttttcttattttctgcttttaattttaaataaaataacaaactatatcatttttttgtctcttgatattctttaattacttctaaaaaggcggtgccatatytatctaatttattttggccgaccccttttattkgcaataattgaatcgttgtttgcggtaatttttcacacatttctttaagtgtactatcggaaaagactacatatggcggcacgcctgcctcttgagccatgtccatacgtaattcgcgtaatcgttcaaacaaggcatcatctactgctacttttcgaactttttggtcttcttttcggaagactttccgttcccctaaaagcacctgaacaccttctgtcgagactgataacaacggaaattgcccatcagaaggaattaaataacgttctgctgtcaaataatcaatcagttgtgtgacttctttttgcgtgcgacctttcattagtccgtatgttggcaaacgatcaaaatgccattgatcaattttttgatcttttgagccagtcaagactttaccaactaagcccttaccgaaacgttctcccatacgttttacacaagacaaaactttttgggcatcgaccgtaatatcgactaattctcgattatccagacaattcgagcagcgaccgcagtccgtcccttcttcaccaaaatagcgtaaaatatatttttgtaaacacatttgtgcattcgcatattgtgacatttcccgtaatttcaagtactctttctgcttataatcaatggtcatttcagattgttcaataaagtattgttgaatttgcaagtcttgtggagcaaacattaacacagcatcactaggcagaccgtcacgaccagctcggccggcttcttggtaataagattcaatattccctggtacttgtgcgtgaatgacaaaacgaacattactcttattaatccccataccaaaggcatttgttgctaccatcacttgcacttgatcatacaagaatgcttcttgattttcactacgtaactgttcactcatgcccccatgatacatcccagctgcaatttttttactttctaataaatgataaattcgttcaacttccttccgcgtgcttgcataaataatacctgattgtccagtattcatctttaaatattccaaaagaaaaacgtctctattttgatctttcacgacttgaaaagataaattttctcgagcgaatcctgttttgatttcattttctgatggaattcttaattgcttgacaatatcctccgctacttgtggcgttgctgttgctgttagtgcaatcacagttggttgctgttgaaattgatcgataatctctgctaaacgcaaatagcttggacgaaaatcatgcccccattgtgaaatacagtgtgcctcatctactgccaataaatcaatcggtacatgtgtcagcatctgttgaaaatcataagattctaatcgctctggcgcaacatacaatagcttgacttctttgttaaccgctaattgaatacgatgattcatctcttgataggaaatggtactattgatatatgtagctggaatccccattaaattcagggcgtctacttgatctttcattaaagaaattaatggtgaaatcaccaatgttaaattatccagaagtaaggctggcaactgataacaaatcgatttgcctccacctgttggcataatgcctaagacattttcttgtcgcaatacatgacgaataatcgtttcttgtcctggccgaaaatcatcatagccaaatgtatcttttaataattcttgtaatgcactcatttattgcgctccaatctttgttctacaagtcattttaacacgctaatctaacaggaacaaggtgtgttaaaacaagacacaatcgtgaaacaccagttaacgtgaaacatcaaaaagaatgaaaaattgtgaaagcttgctatcaaaagctttcaaaaatagcggcatttgcttgttgtggataacgagtagttatccacacataaaaaaataaccttatcttaaaatacgcattaattcgtttttgccatcaaaaaaaccaactattttcgtagtaaaacgagcatagttggtttaaatgtttatttgtcgaaaaattattcagcttttttctttttcttgcttgctttttcgcgttcgtttttgttaagaatttgttttcttaaacggatgctttctggtgttacttcacagtattcatcttcattcaagaattctaatgattcttctaacgttaattttttcggttttttaatgactgatgtttggtctttcgttgccgaacgaacgttagtcatttgtttagcttttgtgatgttcacagttaaatcgttgtcgcggttgttttccccaacaatcattccttcgtaaacttctgtcgttggttcaacgaaaactgtaccacgttcttcaatactcatgattgagtaagtcgttgctttaccagtatcgattgaaactagtgcaccttgatgacggccaccaatcgttccttgaatcattggtaagtattgatcgaaggtgtggttcataataccataaccacgagtcattgataagaattctgttgaataaccaattaagccacgagctggtgctaagaagattaaacgcatttgtccgttaccggcattaatcatatcttgcatttcgcctttacgtaaacttagtgattcaatcacgctacccatgtattcttcaggtgtgtcaatttgaacacgttcaaatggttcacatttaactccatcaatttcacgttcaataacttctggacgagaaacttgtaattcatagccttcacgacgcatgttttcaattaaaattgataaatgcaattcgccacgacctgatacagtccaagaatctgggccaattggatcaacacgtaaagatacgtctgtttgtaactcagccattaaacgttcttcgattttacgagcggtgatgtattttccttcacgtcccgcaaatggagaattgttaactaagaaagtcatttgtaaggttggctcatcaatgtgtagaattggtaatgcttcttgattgtgaacatctacaactgtttccccaacgaaaatgtcttccattccagaaacggcaattaaatcgcccgcttttgcttcatcaatttccacacgttgtaagccaaagaaacctaaaattttcgttacacggaaatttttcacgctgccatctaatttcatcaacgcaacttggtcgccgactttcattgtgccacggaacacacggccaatcccaatacgtccaacgtaatcgttgtagtctagtaatgagacttggaattgaagtggttcgtctgaattgtcaactggagctggcacatgttcaataattttatcaaaaattggggccattgttggctcttgatctgctggatcatctgattcacttgaagttccgtttaaagcagaagcataaacaactgggaaatctaattgatcgtcgtctgcacctaattcgatgaataactctaaaacttcatctactacgtgttcaggacgagcagaaggtttgtcaattttgttaacaaccacgattggtgttactttttgttctaatgcttttttcaatacgaaacgtgtttgaggcattgttccttcatacgcatcgacaactaaaacaacaccgtctaccattttcatgatacgttctacttcaccaccgaagtccgcgtgtcctggtgtatctagaatgttgatacgtgtaccgttataatctacggctgtattttttgctaagatagtaattccacgttcactttcaagtgcattggaatccattgcacgttcttgtaattgtgtgtgtccatctaaagtgtcagattgttttaaaagttcatctactaaggttgttttaccatggtcaacgtgggcgataattgccacgttacgaatatcatctctgtatttcaatttaattgctccttatctatatacgcttatgttacttaagtccataaamgccgactgcttattatmgcaaacttttttcattaaaaaaagctttcgcctgcaaaaataatgaaagttttagaaattattcggctttttctgaaaacaaggacatttttttacaaattttyctcttttaaaagaggaagagccttacctttcagcaacgctcttctttgattattccgattcatttaaatatcgggtaaatacttcatcataggtttcaggagttgctgcaataaagtattcacgacccgcaaaagttaatggttttcctgtaataccagagtatttaaacccaaattcttccaaaagtactaagcctgctgcataatcccaaggacttagattagataaatagccatgatggttgccttttaacatagcaataatttccaaacctgcacaaccgctaatacgcacgcccatgcttgcttgtccgatttccgttgcgtgatgaatattttttccatgcatgtaagcattcatgccccataatccatctgccaaggctttcatagtaggcgcttttaataattgattattccgataaacgccaagccctttgccgccccaataaagttcttctcgcatcacatcatagataaaacctaatttaccaatgccgtcttcataaacagctaacataatacaaaaattttctctttccatcacgaaattcattgtgccatcaatcggatcgatgatccacacgcgaccagcaaaactttttaaagtattgtagcctttttcttcccctaaaatttgatcttcgggaaaatttgtttgaattttattcattaaaaattcttgggtttgttcatccatatttgtcactaaatcggtgcggccatttttctgttgaacggttaactctgattccaagttcattcgaatcacatcggctgcttcaaaaagccaactttgaattgtttgaataaatttttgcgtttcagtcatctaatcatcccccagctttaatttaccgcttccctgttttttagcttgttgaagcgtacgatataacgaatatcctgaagcattttcaaattcacgacctaagcgtttttcttcgccgatacttttaacgaccgttttaaattgttgataagttgttaaaaatttgtcaacaggcaagcctgtttcgttggcttgctcaactgctgtccacatattagkgacaatcaccatttcctctgtcgtccaatctaaatctaatggatattgatagtctttcatgtcttcacctcatcttctctagtttagcatattttcataaaanaacatcttatttacgtcgattttttaatgcattaaagagaggatattctgctgttcctttgcgatacaaactttgttgtgaagcataaataccgctatttcctgaacacataaaactgattaagcaaaccatgaaaaaatagaccgccgcttcactaccaaatagttcaattcccataatgaaacaagcaatcggcgtattcgtggcgccagaaaaaacaccaataaatcctaaacctgctaaaaaaggaattgatagatgtaacaaaggggccaaagaactccctaacgtagccccaatttcaaacaatggcgtcacttctcctccttggaatccggcgcccaaggataacaccgtaaagaataatttcccaacaaaatcaaaaggctgcgcattacctgcaaaagcatcttctagtaaaggtaaactcaagcctaaataacgttggttgtttaagacgagcacaaacagaacgacaatggcagcgccaagaaacgcacgaaggtagacattagcaaaccaatttgcataggtcttttttaaaaagacaatggaacgactaaaaacccaacctgccaaaccaaaacaaatcgatgccaaaaataattttacaaatagttcaaccgaccaagtcggaattttgcccatcggataatgcgtatgtgttacaccaaaactttcagttacaaaattagcaaataagcctgcaaaaaaacttgggaaaagtgcctctgcacgaacttttccaaccgccaaaacttctaatccgaaaaccgttcccgctaatggtgtgccaaaaacagaactaaaacctgcactaattccgctaataataattacttgtcgttccaaagcggacagtttaaagacttttcctacagcatttgcgattgcgccccccatttgcaccgccgtcccttcacgaccaacagaaccaccaaataagtgcgtagtaatcgtgccaaacaatgttaaaggaattaagcgcaagggaatatcttcttccccgccattgccttgttcaatcactaagttatttcctcggctagcatttttcccaaaacgcgtatagaaatacgtaaaaacgacaccgctaatggggaggataaagagtaaccaaggatttgctaaacgaacatctgttacataggtgagactctttaagaaaaaggcggataacgcccccataaataaaccaataattgcggtaatgagcaaccattttgccatataaccgccgattgatagtagttgctttgtttcttttttcactttacatgctcctttacaattttcttatcgccaatcctagcgtacagaaaaagcctaccaaagggtacacttctcccgtttgkaggcgtcattaatttattcgtccmataaatagttcgtggtgaacaccatcaccatgttgctattaaactaatwaaatwataccacgcaactctggaaagtgcaataaaaaatcaattgcgttccgtttttatccacgtgctattacctttgataaaccgataataagccatcaccacactaacgaataaaattaagtacatgtaggaaatagtaaaaggcaaaataatcagccccagttttgcaggtacttttagttgaaaatttttcaactcgcgataatagttgattgtaaaaaaaatgccgaaaactaacgaaatactgacggccaaaacaaaactaatgacaagcgataacgaaaagcctaacctatacaagtgttgcagttgaagcccagttaagacaaaaacgagcatccccgctacgagattaataaagggttgcgctaaaaaataatagattccacacttctgccttagcgttaatgactttgatttaatcaccctgggtaaatacgctagacaatctaaatttccttgaacccaacgacttcgttgacgaataaaacgtttcacatctctcagtgcttcttgagccataaaggcctcgtcaatataagcaatcgataactctttcagcattaatttaatggttaactcatagtcatccaacaaagcatttccccaaggctgatagcctaagtgttcggtaatcattgataaccgaaaaaactgaccattgccaccaagtccgatggtttttgttgctcgacgcgctttttgaataaaattattaatcgtaaaaaactcaacatcttgtgcaataaacataaaatttgtgacatctttcattttgatccttgtttgcgcascacagactgttgtatctgtgaaaacagcagttagctcattgacaatattttcactaaaaaaaccatctgcatctaccacacccactaaaacttgatcccaagaatagtgtcctttttctgcatctgttaatacaatttggaaagcgtggttcaaagcggcccctttgccttgttgcgcattgggaaattgacgagacagaacttggattggaccagcaatactgtccatcattgctttggtttggtccgttgatccatcatcaatcgcaattatttttttcttaattggtaaagcaaccagtttttttaatgtttctccgatgactttctcctcgtttacacacggtacaagaaagtagcagaaaaattcttctgctacttcgacttctcttcttgtttttttcttgttcgaaaactgagaaataaacttgtaaataaataggttaagaagatgaacataattactttgtataactgatacaaataaatcatgtaatttgacctcttttaaaaaaataacggtatagaatgtaggcagtgacaatcgaaactagaataacgccaattaaatcaaccacaaaaaaggcgcctgttgaaattaccccaagtttcggtaaagctgattggctcattaaatacccctttctctctatttgtttttaccaacacaccaccacgatgaccatcacacaccccctataataatactttggaggattatagtacacaggtggattatagtacgtaamtggcggaatataycctggccaatatgttggtggtggcggattataaaccggtawttttcggttttctcgaacaattgcaattgtttgacccgcatgattttgcgtcagactgacgcgtgttggcgtagtatttcgtgaataaccagtcggcgcttgaacttctctaatttcatatacccggttgacagatagcccactaatagtgactgtaccatcccaacctgttgttactctttgtgtatagccattagttgtatctttccattcaaaaacagcgcccgctaaacgtgcttttgtttcaacatcttgtttaataattctgatagcaccatagtttgctttattgtttaacactaacgtatacgtttttgtgccttgacctcgtaaatcaatccgatggaccctactatccaacgcatacccagttggcgcttgtatctcggtgatttcataaatacgatccgacgataatcctggaatcagtacttcaccatttccatttgctgtaaatgttgccgtatagttattggtagtatcgcgaaatctgaatttcgctcctgctaaacgttttcttgtatccgtatcttgcttaataattttgatggcgcctttttgtgcttgattatttaagactaatgtataggttttaccaccttgtccacgtaaatctactttatgaacacgtctatctatgatataaccattcggcgctttgatttctgtgatcccatagatacgatcaccggctaatccagtaatcagtacttcaccgttcctattcgctgtaaacgttgcagtataattattggttgtatctcggaatttaaattgtgcgcctgctaaacgttgtttcgtatatccatcttgcttaacaattttgatggcacctttttgtgcttgattatttaagactaatgtataggttttaccaccttgtccacgtaaatctactttatgaacacgtctatctatgatatagccattcggtgcttttatttctgtgacctcatagatacgatcaccggctaatccagtaatcagtacttcaccgttcctattcgctgtaaacgttgcagtataattattggttgtatctcggaatttaaattgtgcgcctgctaaacgttgtttcgtatatccatcttgcttaacaattttgatggcgcctttttgagcttgattatttttggtgaacgtgtaggttttgccagcataattcgcaggtaaaagaattttatgcaccgttctgtcaagtatataaccatttggtgcttttatttctgtaatttcataaatccggttgacggaaaaattatacaaagttgcttcaccattagcattagcagttactacgcctgtattcccattcactgtgtcacgccatctaaattgtgcgcctgctaaacgttgttttgagtaaccatcttgtttaattaattttaaattgccacgtagcgcaacattttcaatggtataataaccaatcttgtcagcaaaattagtcgttagggtaactcggtaagtcttgttatttaagatatagccgtttggtgctttaatttctgtaatttcgtatacacgattgactggcaaattcgttatcagggcttgtccgtttttgtcagctacaactgttccttcttttcctgtcaccgtatcacgccatttgaactctgcacctgctagacgttttcttgaatctttgtctactttgattattgctagactacctttttgcgctgtattttcaatggtataataaccaattttatcwgcaaaattagtcgttaagataactcggtaagtcttgttatttaagatatagccrtttgrtgctttaatttcygtaatttcgtatacacgattgactggcaaatctgttatcagkgcttgwccrtttttgtcagctacgactgttccttcttttcctgtcaccgtatcacgccatttaaactccgcacctgctagacgttttcttgaatctttgtctactttgattattgctagactacctttttgcgctgtattttcaatgattactgtcactactttattagcttgtgcagttgttagagtgactttatgcacagttttatctaatacataccccactggtgctttcgtttctgtgatttcatacgtacgattgactgataagttgggaattgtgatggttccatcggttccaactgtcactrttcctgtttttcctgtcactgtatcyttccactgaaattctgcgcctgttaaacgttttttrctktctttgtcttgtttaacaattttgatggagcctttttgcgctgtattttcaatgattactgtcactactttatttgcctgtgcagttgttaaagtgactttatgcacggttttgtctagtacataacctgtgggtgcttttgtttctgtaagttcatacgtacgattaactgctaaattgggaattgtgaccgttccgtcggttccaactgtcactgttcctgtttttcctgtcactgtatccttccactgaaattctgcgcctgttaaacgttttttgctttctttgtcttgtttaacaattttgatggagccaatttgtacttgctgcttattcttcacccgatatgttaaagtgtagtcggcttttccagcaaatgaaacaggatgtttagtttcgtctaattcatagccattaggcgccttcgtttcaactaaataatattctccatcaggtgataaatttgaaaataacagctcgccattttcattcgtgacacctttttctattagattattttttkggtcatacaacgaaaattcagcacctgctaaacgtttcacctcattattttcatctactttttcyacttttaactggkttnctaaacgcgtatttcttttttcaagcgaatcgtctgkgtttgttctacttaattncaaatggaactggtgttgcatctaacttgtaaccagttggtgcttttgtttcaatgaatgcatactgaccagcttccaaaccagctaaacgaatttgacctgcttgattggtggttaatgtttcttgaacaacttgttgtgtttttgtgttcacgactttgaaaacagcaccttctaaaactttagcagttactgcacaattttttcyaaaacgacaccccytcgacctgttccatcactactctcgtctgctgtgatgtaggcaatatcatcatcttcccaagcatcgaatccctcactagaaatacgcatatacgtgtaatttgatagcacggcatcacttggaatattttcatttggaatcgtttctaaataaatataataggcatttttattggaaagataactgcccgtggctgttggtattccttcaaatttctctgcttcataattaaatccagattcagaggcatttttttggaaaaattgactggcatcatagctatattcgtcatgttccaaattccgaatcatttcaccatttgtttctaaaataggctgcttggtgagatatgcagcaatactgtcaatagctaatgtttggtttggacctacattatctaaaaatttaaaggttgttttttctgaacctgaaagacctgcttgattatagttaaaataaatgacccaagcaattcttccctctgaggtaaatcctaacgggacttttcgaaccagttcagttggcggaactttctccacgtattgcccgatattaattttgacaattttttgtgaatccccaaaagtaaaaacgacttgatcttcaaaatcttctgataaattttgattatatcgtagcttcagttgcaaatctgctgagtaatctgtaagcgtttgtaaggctttaatcgtccaagtaccatcatcgtttggaatcacttgaagtgcgtctccaatttcaaaaggtgtcattgaataggaatatttttcgctagccatccttaatgtcatcgtctctccgcttgctaattcagagattcctaatgacaaagaaactgtcgcccaatcttttgtagcaacaatttccgttttttcccccggnyattcaacagctatagaccggatttgtgtgccactttcattatccattgcataagaaataatacttgtattagatcctataatagtaaagataattaaacaaatcgaaaata

SEQ ID NO: 90 - DNA, 688 bp; double-stranded, linear
ttganacagatggagtnngcactggctatacagtaagatatgatcttggtggagaaaaaganaaagacataacagtcaatttacccggagcagaattaccacttagtttaaaagtaaaagcacattacacaaatggattaccacttgaagcgggaaaagaagtacgcttaagaaatttaacagatggatcaacagaagtamttaagaaacargtagacgctaacggagaagttgtatttactgagcaagatggtataaaaaaggaagtaaattatggtattgaaacagatggagtaagaaatggctatacagtaagatatgatcttggtggagaaaaagaaaaagacataacagtcaatttacccggagcagaattaccacttagtttaaaagtaaaagcacattacacaaatggattaccacttgaagcgggaaaagaagtacgcttaagaaatttaacagatggatcaacagaagtacttaagaaacaagtagacgctaacggagaagttgtatttactgagcaagatggtataaaaaaggaagtaaattatggtattgaaacagatggagtaagaaatggctatacagtaagatatgatcttggtggagaaaaagaaaaagacataacagtcaatttacccggagcagaattaccacttagtttaaaagtaaaagcacattacac

SEQ ID NO: 91 - DNA, 10194 bp; double-stranded, linear
ngataaggtcctataaatagnccggatatntttttattattaagatctagtactttcctcttactatgagtgtactagattctttttttgccaactttaaagaactagaccaattttcggtttttagatttttgttgacaagtacctacttttaattgtatgattgtttatgtttctacggaatatatttacaaaggaggtatatagaccaatatcggatagcgccagacctgaacgttcaggtgacgaggagagagcttatcgaagattcggcgggtggctctagggactgcactctacagataacaaagaaaaactaattgtgaagttagaacaaagcggttatcacgcaggtagaaacatataatgggatttgctagttaaacaggacctagtaaatacagaatttcaattggaaagtaggaattagcattatgtgtggaattgtcggaatgattggaaaagaaaatgtcacggaaagtttgattcaaggattaacaaaattggaatatagaggttatgattctgctgggatttgtgtgaatgrtcmaagccaacagccccatgtagttaargcagtttgggggcattkccsatttagcagcaaaattaacgccagaaatcgatggaacagttggtattggtncatactcgttgggccactcatggcgaaccaactgtcgccaatgcacatccccatgtttcaagcgatcaacgctttgcattagtgcataatggtgtcattgaaaactttgaagaattaaaagaacaatttttaagtggtgctcacttaattggtgatacagatactgaaatcgtcgttcaattaattgctcattttgctgaaaatggtttttcaacaaaagatgncttttaaagcggctttagcmgawattaaaggttcatacgcttttgcattaatggataaaatggaccccaatattatctatgtagcgaaaaataaaagcccgttacttatcggtctaggtgmaggcttaatgkttatttgtagtgatgcgatggcgatgattaaagaaccaatcaatttgttgagattgttgatggtgagattgtaactgttacagcggacaaagtagtaatcgaaacgccagaaggacaagtaatcaaccgagaaccttttgaagcgcaattagatttaaatgacattgaaaaaggaacatatccgttttatatgctcaaagaaattgatgaacaacctgcagtgatgcgcaaaattgttcaagcgtatactcaaggtgaaaaagtgactttagatgaggcgttactggaaaaaattaatcaatgtaaccgaatttacattattgcttgtgggacaagttataatgcaggttgggtcggaaaatctttaattgaaacgattgccagtattcctgtggaagttcatttatcaagcgaatttggctacaacatgcctattttatctgaaaaaccgttcttcattttcttaagtcaaagtggtgaaacggcagatagtcgccaagtactggtacaggttaatgaattagggcatccatcacttacattaacaaatgttgctggctcaacattatcacgtgaagcggacgataccttgttattacacgctggaccagaaattgctgtcgcttccaccaaagcttatactgctcaaatcgctgtcttagctattttagcaaaagcaattggcgaagaacgccaaacattagcagccgtctcatttgatgtggctcacgaattgagcgtggtagcagctgtcatggaaaccttgattgatgaaaaacaacaaatgaaagccttggtggaagattatctgacgtatactcgaaatgccttctatatcgggcgaggagtcgactattatgtgtcgatggaagcggccttgaagttgaaagaaatttcctacattcaagcagaaggctttgcggcaggtgaattgaagcatggaacgattgccttaattgaagaaggaacacctgtgattgggattgtgacagatgccaaagtcgctgcccatacaagaggcaatttaaaggaagtcgaaagtcgtagagcaagaaatattgtgattgctttggaatccttggcaaaaccacaggaccaactgattattccagatgttcatccgttactttctgccttagttagcattgttccaggtcaattattagcgtactatgcaaccttacaaagaggctacgatgttgataaaccaaggaacttagccaaaagtgtactgttgaataaatcaagaacctgagagaaagatgttcaacgggttttcatgagttttaatatctgagacaaaaatcactttagatttttgtctcagatattttttataaaagaaagatattcagtcaaaaatgaaagattccaaagaaattctttttttccgttgaaaactgtttgcattttagcaaaattagatataattaataagaaccgaaaaataagaattagccagtgaggtaactttgtttgaaagaaagcaaaaagtaggttaagctgaaaagtgctaatttatttaacaaaaaaagattgtgagttgtttgatatggatcagtttagtacattaactgaacaagaatttactacctttgcaatgacacatcctgcaggtaactttttagaaacacccgaaatgaaacatttattggaacgacgtggctggcattgtgaatacgttggcgtcaaacgagaaggccaactaattgctgcgtgtatcctaagcaagaaaaaagtcaaaattggttatgctttcgacattgacggcggaattttgatggattatacagataaaaaatgtgtagaagcctttttcacaggcttaaaaaaatatgtgaaaaaaaatgatggcctttatttaacctttactccaaataaacaaatttgtttacgtgattttaatggcggtgaagttgaaaaggtcaatcaagaaacatttgactatttcacatcaattggttttgaacaccaagggtttgatgtgcacaattttgatggtgcgccacgttggctgtttgtcaaagatatggctggattaacagaagaagatctttggaaatcttatggaaaagatgctaaatatgacatcaagaaaacatgggaatatggagtaacaatccgagaacttcgttacgaagagctacctctctttaagaaattaacggaagaaacaagtgcacggcgtaattttgaagataaggatttagcttattaccaagctgtttatgaagagtttggcgaacgagcgaatttatggtgcggactaactttgctacttatttagaaaatcttcatgagaaattacgcaaattacaagagacgctcaacgaagtcaatgaagcgttaattgccaatcctaaaagccgtaaaaaaaataaccagaaacgtgaatttgaagatgaagttcgtaccgtgcgcaaacggattgacgaggctaaagaaatgaaaacatcagatgaacctgaaattttagcaggtgccttattcattgttcatccacaagaagttgtttacttgtttagtggtacgtatgaaaaatataaacaatactatgcaccgtatttaattcaacataaaatgttaacttacacagtagaaaataacattcccaaatataatttttatggcgttgacggtatctttgatggaagtgatggggttcttaaattcaaacaatcctttggcggtcatgtcgaagaattaatgggcaatttccaatggaaagccaaaccaatgaaatatgccttatatcacgcattaaaaacaattaaagaaaaagtctaaaattaaaacccaatccttaaaaaggaatggcaaagtgaggcgtttaaatggaaaatcaagtcgaggttatgacgtatgcacatttaaaagaaattatgcaggcgttagaagcaaacgaagcgattacagaagatacaaaagtctttattgatacaggatgggatagcgtgcaagaagtagccccagatgcggtcagtattgaaaaagttgctaaatttacagtagcagatgttttaacaaacgaaagttttgctgggtatagtttagaagaaaaggcggagaagatgaacgctgagggcgacctagaaacggcaattattattcgtaatctttactaaaaaagtccgtttgaatagttaaaatcgaggtcgggacagaaccgtttagctccgagcaacgcgtastgttggttctgttcccgccggttatcaggttttgagcctggagcaaaaatccaaagtgatttttgtcccaggctcatctgctttaaataagaaataaaggaggttagatatgagtaccattcmtgrattyccaaaaaactatgamcgttttattgcacaaggagaagaagcacttgtagaacataatcagatcgccgctttagaaaattttcaacaagcctatcagcwaccamcaacgccgccagtaaaccaaaaaattgtccaattattgttggaaatgggtgaagctgatgaagcactagcattggcagaagcgttccaagagtcttattttgagaaccttgaaacagcggcaatttatatgcaaatttatagtcaaagtcgtcgctttattgaagggtatattttattgaagcaattacttcaaactaaaaaaataacgctagcacaacaaaaaacgttagaacagcaattaatgcaagtggaagaggcgtatcaacaattagaaacgcagcaaattcaagcaattaaaaggracttgttagtaagcgatcaattgcccgtttatcaacaattagcgaacattaaaaccagtttatatttgcctaaaccagtatttgtggaagtcgcaaaagatttagttatgaaccaagcacttagttattttgctcgggaatggttcattgaagaattagcacttttgcaattttcagaaccactgacttttctttggtatgacaatcagcctcagacagtcttactagaaggaaaaactggaccgttaaatacgccgatctattccgaaatttgtactgaacttaggaatcgtttagaaaatgatgatccaattatgctgcagcatttggaagaagaaattcgattgcatcttgcctatttgtatccattagcagagacggttatttcagatccaactatctgggtcttgggttatttggcaacctattatcctgaatatattgaaaaagaattgactgaagcaaaaggccatcaaatcgatgctgttcaaaaagttcaacaggcgatacgaacggcatttacacaaataatgctttaaaaaatggcacgtcctaaaagcgaggacgtgccattttttcggtttcagaaatttgctgaatctgctctaattgcttttcttgactgattattgcggataatagaaaaaagcaagacagaaataagtaaaaagaattccttgaatcaagcaaatcacaacgaacaatggcgttgctcctggaaaagaatcagaaatccgtgtaattaaaaattcaactaaccataaaatcattgaaaataaaaataattttttctgacgagttctcatagtccgcaacaacctttctggtgattttcacttctctatcataacatagaaaacgagctgttttttctcaaaaattttgttacttcataagaaaaatgggaaataagcaagtttcaggaagtactagctttaccgaaaagaatacttaatccatcttaatcaaaccatacagtcacgtttattgcaaaagaagtgtttttggatggaacaaattatttcataaacacaaatatttctttgttgtttgtataaatgtcataaaagtgattacttactactttttgatttttagacatatccgtatcggtcagtggtgccatctctaatcctaaattcgatgaagtattgaaccaaacgtaattagggaagtatagaccgtcatttggtggcacaatttttgaaagaattgggtagtttcgacttgtattagcataaacagttgaatttttgaaaaacgtatttaaataaactttttttcgttcgtttgttacaacattttttaaatcatctgttaaaacagctgcttggcgattgaatgcttctttttgatagtttaatgtggaagaatacaccaaaacaaacgataaaatataataagataacaagctggccacaagtaacgaagttagataaattgctttcacttgtcgattgttaaataaacttaacatgctgattgtaacgaaaacagcaaatccgtaaatatagcgaggcgcatcacctgcgatatttcttgaatagacaataaaaatgccaaaacttaagagagaagcaagtcctaaatacaagatacaataaaggaaacttaagcctaagttgattttgctatttgatagatgactaataaaaaataaaacaagcagtaggagcagtaataaaagccataaacgattactctggttcaatagctctgaaaaataatggtaactattttgataagccacactgggaatatcgtgcaaacttggtaaggcctgactgcccccaatgttgtttgttgcggaaggtacaaattttaactcgataaggtagctgactatagaaagtagataagcgatagcagcaagtgcgacttttttgcaaagagcaatgaaattttctccagcaagtaactgcttgaaagtaaggaataagacgataactatataaattcctgacgaggcttggtaagtattaaacataacaaacagtgaaaaaacagaaaccaagaaaaacgtaaaagaattacgctgccaccaataaaaaggaagaaacgaacaaaaaatactcaatgccatatagggactatcaaacctgaaactaagacattggaggaaccaaggattgaggccaattaaagtagctactaaagaggaaccccagctaattttttggtcattgatgatataaattgccagtatgcttgtgagagataagataagacctgttagaatcggtgtggtcaagcccagatctgtcaaatgacgacttccttgaacaaaccatgagagaaattcactgccccaacgtgcgtaagtcgtaccaaaatctgtcattccagcgacttggcgagcattatcatctaagtaagggaaattgataatgccgatggataaaactgccacttgataaattaaaatgatcaatagaagataggctttattttcaatacaccaattctttaaatcaaatttttttgattckgtaggtaattgtttcatcattgtactccactccaataattatttamcaattaaaatatmccataacgagtggaatgaagaaattgcttttgttattttctcatcttgacagaacactaagggtaggcaaaacaaaaaaatcccaactctttattaaagagttgggattttaccaaaaagccacctgccagcttcatagataattattcaagaatattgctgtttaattaaaaacaattctatatgttttaatatatacatcaagataacaatttagatatactttgggtaatttttgggtatttacaaaatatctttgtatttgttttcatatttttctttgtycttttttctatttgcttcagtagctgatgcgtattcatatgactgtattatctctttatgtcctagctgtgttttgatatatattggatcagcttcagctaggattaataagtcagaacgggcatgtctaaaactatgagatgaaattctttcaatatttgctagttcacatgtttcttttatatatttattcacagatgaatttgagatgggccatgaattttttttactaacaaaagcaaaattttggggattacgtaaatctcctctcaatatttttttcttttgttccatttcatatttttttaaataatagaaaagagaagaagggacatcaatatttcgaacacctgcttctgattttgtagggccaattctatactggccagcatcatacttataggcattttttatcttaataacttcgttactttcatcaatgctatcccaagtcaacgcagcaacctcttgataacgagctccagtatatagttgtactaaaatgaagtatttacttgtggtgttttcacgagataataaagcttctttaaatttagttaaatcatcaatagatatggttttatttgatttcttttctggtacttggccagttaactttatatttcttgttggatttgaatgaatatattgcatgtccaacgcttctaaaaacatagattttacaatgttatgtctgttgctcaccgtctcaactgctagtcctttttcattgatattgccaggttttgcaagccagttaatccattgctgatatttgactttggtgacgccttttagcaattgtttgtccccaaagaaatcatgtaaattctttcttgttaaagctattttttgcatacggccagcagacactttattctttttaaatgtatcaacccaaatatcataaaaatctaaaagtttaattgcttcagtgttttcaccacgcataatttttgatttaaactctgtttcagcatctctacaagccttcttagtagatctagtaatcattttatttttccattcatttgtaatagagtctttatatttaaatcttaactgccattttccattagctaatttctttggttctgccataaataccaacctctcggatttttttaatttaaatacatttaagaacgattttttattgaatatgttataagtaagtatcaagttatcgtatatcataaatacgaatacgaatatatgttcgttttttgtgataaaaagaaaaacccgaaggtttctctctttgttaataaaataataagaagatattaataatcaataatttctacaagtccgctatctgcactttgtggagttatgtgtatttccacattagcttctctttttgctccatatgcatttactatagtagcacttactttttgataccatttaccatctttttgcgtccatggttgggatgacgccgataattgaatgcattttgcttcctttataaggatacatatcattaaattgatgcttagctaaagtatctaagacggtttgttgttctaaggttggctcatctgctagcttagtaatgtcattagtatttttatcttcgctcggtaaagtattagtagctacatcagacttcgcttcagtacttacttcttttttttcagatacatcagattgtttattatcttggctactacttttagaaacatcagagtttactgttttktgtttgctagtttcagtactkgatactggatttttcatatattcttgaaaatctttttcatttaaaaatctaacaacaaaatctttgtcggcagtttcgaatgtgagagtatctccctttttaagagatacttttttcttgtttcccactccgtataagtcatggttactattttctccgcctgatttgacggtaataagaactatgctcgatttatcatctagttgagttaatacagcatagtaatctccaggatcaatatcttttccaactgaatattcccctgacgcaacaaagtcttttgaattcggttgtttaactgtgctgctagattgactggttgacttttcagtatctttattatcattatttcccgracaagcagtaagtagtgaaataccacaaacacaaaccaatcctaaactaattaattttttcatcataattcctcctaaataatttattcaaaccattcatataccccaattgtaccatcacacctaaaaattatttgataatttttatagatcattccattttcatataattttgagtaacttttgattgcgtcttgaagatattcagtagttactcctaggaactctgcacattgccaaacatatattaatcgctcatgataacaatctataaaatcttgtggagttattaacaatttacatccacaatctctagctcgttgttcttgttgtcttttttcattactattttgctctataatatccccaacacttgttaaatgatgaccaatttcctctgcgagagtacccaccatttcttcgtttgattgattagggkttaaatatactacattattaatatagagacctttctgatttctgggcatcataggtctattctgtagtttagttcaggataattagccatcaagctttccaatttatn

SEQ ID NO: 92 - DNA, 2053 bp; double-stranded, linear
nattggttggtacaggtattngaattggttngctcccttggcatcaaaaggtttgcmaattcgttaawttmtycagattggtaatatctgataactcgktgtaagaacaatcaatagaaaatagatttgtattttggctgctaacatctagaacagttaattgattgctcaaacaaactaaaatggctagatcaacattattagtaacatctaaaacggttaattgattgtaagaacagtctaaaagatgtaacctagtattttggctgacatctaaagtagttaattgattgctagaacagtctaaattccttaaataggtgttctgagtaatatccaagtctgttagacgatttccactacaagatagagtctcaagcattctattctgactaaaatccagattggtcaaattattaaattgacagcttaaatcagttaattgttctgcatacttgatacctttcaagctatctaaatttttattagtgacagtaatttttgttaaacttgacatatctgcaatagtcaattgatccttatctttcccaaagcctgaccagttatttccttggctttgtacagtagaatcagtccttaaaagtgttgcgaacctagcatcgatatctgttccttcaattaaattggttgttttaggatctaattctttattttttttgtccagttttgccgattcgttttcttgagtaggagtagtctttgtagataaagttgaatttaatgtgctcgttgttgttaattccattgagttttttgttccttgtgattgatccgtatttgcatctatagaggaatctgtgcccgaaagtaaacttgaagatgatgttgattcaacttttttggatgaagtagtttttgccgataccatcacacccattattccttgtgaaaggactaaacctaaacacaaaaacaatctaaaggatttactcatagttattctccttttctacataattgtctaaatagaaacagccaaaaactacttattaaaaacaatatgccaaaccagcttagccaagttattcgattgtcaccagttttaggtaatctttttatttgcgttctgctacgaacgattgatagcgattgaatggttgtttgcggcaatacattcacaactggatttttttttgatggtatgtctgaagtttttgtaaacccgattccgacttctgtggtctccctattttctgcataagttgtttgaggaatataaattaatagaaccaacaataataaaaackgaagatttcytcytctcattatgtcacttccccttcgtttttccacttctctccacgacgaactaagtaagcaatcaatccagcaagtgctactgtcaaagataatgctacccatggtacccattgtgggatcactacttgatacgctgccgattgattcacttttttcgcttgcgcttctcctactttaaattctttttcccatttccaagttcgaccatcacctgttgcttttccagtaaagtgataagttcctggtttaaacgtattcaatccaataggaatgttaaaatcgaaattcgaatttggtgctacagagaatttctccatcttatgtttatataaaattttcttttccccttttagacgtatctccccttgaatcgttagttcttgaagaacctttggttgatcgttttgaatacgtgctgcaatcactttttgaccattcgctaattgtaagctggctttctttaaatgaagcatcgctccctgattaaagggttcttcatcctccgtaagcataatcgcaatcacgcgcgcatattgaggagttaagccagatttcttttgtttcacttccgtactattctttcgaacaaagcgcagagagcccagctttactccggagaaagccgattcaggtggcgtggatctcaaatgtnatcggtttctcttctttccccttggagggggaatttccttaacggccacctttnattttttactaactcacggaatgggggctttcaaacgggcatcgaacttangggggaacattggna

SEQ ID NO: 93 - DNA, 4178 bp; double-stranded, linear
gcagtcgagcctgttggtccataaaaatcggtgtatgaaagcaattctttttagatatttttgacttcccaatttgatatactgcggaaagtatctgagaatttatttaacacattttttatttactanagaaagtaaagatcagagctgtgcaaatagaaatgattaaaaacatcccaatatcatcatctaatgtttcaaaaacttcaacaggtttcataaaatgtttaattatttttttcattgtattcacctcaaaaagagaatagaatgaaatattctacttatccattgatatatctaacgattgacttacaaaattgaaataaaagtctaaaagtcagttggtgtgattattattataatacaaaaaagacctccattcttttaagaataaggtcttttttttcgtagtcgccttctaggcaaactaattcagttagccgtattctaaactcaataaaatgtcaaatactcataggtgtatttttatcacaaaatttaccacagatttgcggtattatttacatatcttagattattaaaaatgacaaaacagctatttaatgcgtattgtatgatttttttgttccttaaattgttatggaatttcagatggggagtggcaaatatacgaagaaaattaactatttatagcggttttattttattagagagtctcgttagttttagtattgtatgtgtgatagcagggatattctccctgactattacacaattaattcagcaaaattatcaacgggagcaagaattaacgcgcactcgtctaggatacgaagcaattttatttttagagcagacgggtgatttacgtttcaaagagcggatatatcaaggagaaacttaccgattttctttgatggagaacgatggaagaaggatactaaaagtcacagattcaagaggagcgattttgattggtcaataaaaaatatgcgggttttacgatgttagagtgtttagtagcactagtcgttttaagttgtatgtgtcaattgtttcagttgatgattcaacaaagttttatcggaaatcaatatttgaaaaacaatgattcgaaatcctggcatatttttttaattcaattagaaaaagaatgtcaaaagctcgttttccaaacaggctctgctccaagagatttctttcctcgactcagaaacaaacaagactatttcaattcaaatcaaagaagataaaattattaagcgagtcaatggtaaaggctatcaaccgctgttaattggtatcmaaaatggacagtttaaaaatgaaggacaatcgtttactttggaagttacttttacttctggaaaaacatttgatagtttttttccgataaagggagaattttaatgaggcaaaaatattcaggaaacttattgttcacggccatggccattgtttatttgatgagttttctcgcccttcagttactagaagaacgtcagttaacacaaaaatttacgcaagctacccaggaatactatgcagggaaaagtatctttcatttatttcttgcagatgttaaacaaaatagacgaaagttaaaaacagaagaaaggctcgtatacgcgcaagtgaccctcgattatacatacaaaaatgaacaattaagaataactgttttattaaacaaatctggtcgaaaataccaatatcaagagagagtttctcatcaaaaaaaagcggaaacaatactggaatagcgttgtttttctacaaattattagattttagaagaaagacagtaaaggcattgattattctttcttttttcgttaaaataaaacaggtatggaagttgttacattttgaatagaatagaggtgctaatttgttcccagaaaaaattgaagaggctttcgagccaatggaacaagcaatccagttattgcaacagtcattggatacttcttttttagatgcgtatattgaaaatggtgaaaatattttagatgattttcaagtacgagtacttgacggagtacctaatccagagacagtgaaacaattagaaacgctgtatcatacgattaaaaaaattgatttagctcctgaagatgtgcgacgcttgtcccaattacttttgctaaaaggaacgagaaaagagcagcttcaagcaaatcatcaattgacgccagacggtattggctttttgtttgtttatttagtagaacaattaacaaataaatcagagccattaaaaattttagatcctgcttcaggaatgggaaatttactgttaacggttctgctgaaccttgaaacagctggttacaaagtttctggttatggtgtggatatcgatgaaacacttttggcagtatcttctgtgaacaatgcttggtcacaagccaatattcagttgttccatcaagacggattgcaagatttgttattggatccagttgatttagcattaagtgacttgccgattggctattatccaaatgatgagcgagcaaagggatttgctgctgctgcggaggaaggccatagttatgcgcatcatttattaatggaacaagccatgaaatacgtgaagccagcagggtttggcttattcttaatcccgaccaatattttagagactgagcaaagtgaattctttaaaaattgattgacaaaaaatgtctatttacaaggaatgatacagttacctgatgaattgtttaagtcagaacaatcacgtaaaagtatcttgcttgttcaaaacaagggtgcagatgctgagcaagtgaaggaagttttgttagcaaaacttgcctctttgaaagatatcaataaagtaacggagttctttaaacaatttgaagcttggaaagcttcaaatttaaaataaaatagtaacgaagaggagaaaattatgtctaaaacaattgcaattaatgcaggtagttcaagtttaaaatggcaattataccaaatgccaaatgaagaagtgatcgctaaaggaatcgttgaacgtattggcttaaaagattctatcttcacaattaaatatggtgaaggacaaaaatatgaagtaattgttgatattgataaccatgaagtggcagtaaaaatgttactagaccaattaatcgacttaaacattttaggttcttatgatgaaattactggtgttggtcaccgtgtagttgctggtggagaagaatttaaagattctgttgttattacagacgaagtattagaaaaaattgaagctttatctgaattagcacctttacacaacccagcgaatgcgatggggattaaagcatttaaacatatcttaccagaaatcattagcgtggcagtctttgatacgtcgttccacacaacaatgccagaacacaactatttatatagtgtaccgcgtgaatactatgaaaaatttgctgcacgtaaatatggggcacatggaacaagtcatcgttatgtctctcaacgtgctgcagaaatgttaggtcgtccaattgaagacttgaaaattatcacttgtcacttaggaaatggtgcttcaatcactgcagttgatggtggtaaatcagtcgatacatcaatgggcttcactcctcttgctggcgttacaatggggactcgttcaggggatgttgatgcgtcactattaccttatttaatgacaaaacttggcttgactgatgtgcaagacatggttgatattttaaacaaaaaatctggtttattaggtttaacaaatggtttatcaagcgacatgcgcgatattcaatcaaatctagataaacctgaagttcaaacagcatacaacatttttatcgatcgtattcgtaaatacattggtagctatgtcactgttatgaatggcgttgatgcgattgtctttactgctggaatcggtgaaaatgcagttggcgttcgtaaagatattattgatggcatgacttggtttggttgtgaaatcgatgatgacaaaaataatgtacacggtgaagaagcagttatctcaactgatgattcaaaaatcaagcttctattagtaccaactgatgaagagttaatgattgcccgtgacgtagaacgtctaaaataattaaacgaacacaccttgtgagatgctctcacaaggtntcttaataggtaaataagaagaaactgagccaactatcaaaagtgatagttggctcanttncctt

SEQ ID NO: 94 - DNA, 21252 bp; double-stranded, linear
caaaatcagccacctatggccagtctatcctgccaaagcgttttttattcttcatcggttgctttttctwgttcacgataktttctcatttytttgctgaataattcaccgttactagggggcgtatatgtaatagcattcgctccggcgataatggtttcatgaatactcgattcagttggtcctcctgttgcaataatcggtaattctggatacttgccacggaaatagcgtacggtggctgcagtgtcttttcctgcactgatattaatcatatccacgccagccgcaagtttttcatcaattggtgtatgaatagaagttactgtgctgataataggaatatcgattgcttcatccaccattttaattgtttcaattggtgtaggaccattcaaaacgacacccattgagccttgtgcttctgcaaataaactcatataagcagaacgcatgccttgcgttaaaccgccgccgactcctgaaaagacaggaatatccgctgcttcaataatgccttttgtaatcgctggatgcggtgtaaaaggatatacagcaatcactgcctgtgcatccgtattgcggataatcgcaatatctgtcgtaaaaataattgattttattttacggccaaaaattttaatgccactggcttgccgaataatctctggcatttttacaatatcttgtttcagcggcgtcataatttctggaatccacttttcgctcattgtcatcattcctccatgcttaacggtcgtatttatttaaattgtattcttcaattacatgaatgatcttatcagcgtatgtaggatccgttgcgtatccagcatcttgaagcgcttgtgcagcctctttataatttttggctaacaagactttttcatataaatttggatcccaatcgaccccatcaacaaataacttggtatgatctcgcatggattcttcccaattgtcataaactcgaaaatcaccctgaatcgtaatccagacctcattgacatactcttttgtttctaaattgasttttggttgattcccatatgctttaatcccaaaaagattgttatatttcgatgctaattgactktgtccaaaatttgattctaaaactgcttgccccataataatacttggtaataccccgtaagattcttgtaattcacgtgcatacggtgtgatttcagcaacaaattcttcttttgagatgttttcattttggcgattgactgactcgctttgtcccttatctgaatcagaaaggacagataacgaaaagacaaaggccaaaccgacgacaactacgcctaagaataactttggcaaattcagctgcttttttctttttttctgataagttggctccacttcattaattccccacttcatcttttattttccgataaaatgtttcactatctttcactttcgtgattgatttcatttgttactataaccgaataattgtatcattttcacagaaaattatcaactttcatcactgcttacgctcgtgatttcagtacttgattcagtggtagcagttgaagaaactgtactactttcagaaatttcagtggatgatttcactgttgtttcagttgatgtgtgaacagattcttcaactggctttttgccaaaaaagacaaaaattaccgcaccaaacataataatcacagataaaatcccagcaattgtgtatttcaaaagaccatccttcctattcgttattcacctacgtaagtatccatcagattttcattgacccaatctaataattcaacttttgaaccttccaattgtcgttgaatcgtagctggtaaccggaatgtaataatatcatcaaaaccccattcaccataggccagcgtcactttcaaatcaatataaccagcagcaatttcttgttcttgtttattgttaggaattaattctacaacgcccaaatcagattgtagccattttttggcaattgttgtttttaaccgtttatattccgaaacagctaggttacgtttttccggaaataagatggtttggcggagtattttttgagtcagcatccactcataatccgtaaacaaattcttaattttttgcatgacttcattgtccaaaccaaattggccttctttccaagcttgccaatcggctgcttgaatttgataagcggagtaaaaattttcttctgtttgatactgttcaataattgcgtcaacaataatatctacataaacttgatgcataatcattcgcctccattttctattttactgaaattctctaaaaaaagcatctttttatctctggattttatcatatttacaaaattgtccttgttttctaatttctcttgtttacagtataataaataatgaagaagatttgaagaaattgcatagattaggaggacttcttttgacaaaaaaattatatcaatggggcatcgtaggattaggtggaattgcccacgaatttgcttcaacgtttaaacaagaaactasccaacttgcagctgttgcttcacggacattgtctaaagcagaacaatttgccgctgattattcaatccctaaagcctatggttcttatgaagaattgctagcagatgaaacaatcgatgttgtctatatagcagtgccaaataaacaacatgctgaacacattttaaaagcgctccaggccggaaaacatgtgttgtgtgaaaaagctattacgatgaacgcggcagaattaaaacaagccttggcagttgcagaaaaaaatgaccttattttagcagaagccatgactatttttaacatgccactatacgacgaattacgtcgcttgatggatgctggcaaatttggtcagttaaaaatgattcaagcaccatttggaagttacaaagaacccgatcctaaaaatcgcttttttaatcctgacttagcaggcggcgcattgttagatattggtacttatgcggtttcgtttgctcgttggtttctcagctcacagccagacgttttagcttctagcatggttcccttctctactggcgttgatgaacaatcggtgacattgcttcggaataaagaaaatgagttggctactatttcattaacattccaagcaaaaatgccaaagcaaggaattgttgcttttgaagatgcctatattaccattacagattatccacgcgcagatgaagcgattgttcactacaacgacggtacggttgagaccatcgtttctgggtactcagctgaagccatgaattacgaaatctacaatatggttgaagcaatcaaaggtacacaacccaatcgctccttatttttcacgacagaagtcattgatattttggaccagatgcaaaaattatggcagaattaaaaaaaagaacttcggcttttgctgaagttcttttttttatttgttctctatggataaatacggtttaacatacgtgggaatggaatcgcttcacgaatgtgttcattaccagtaatgaacgtaacagcacgttctaaacctaatccgaagccagaatgtggcacagaaccgtatttacgtaaatctaaataccagctgtactcttcttctgataagccaaactcagctactttttctttcaaataatcataatcagttgcacgctctgaaccaccgataatttcaccataaccttctggtgcaattaaatcggcacaaattacaacatcttcacgtgtcggatgtggtttcatatagaaggctttaattgcttttggataatttaaaatgaatgttggaacgccatagtaatttgaaataaaggtttcatgtgggctaccaaagtcttcgccccattcaatgtgatcataatcattgtttgcttcttctttttgtaataactcaatcgcatcatcgtaagtaatacgtttgaatggctccgaaacatatttttccagtaacgctgtatcacgttctaaaacatccaatggatattgttgatttttcaataccgatttaattaaatgttttacgtaggcttcttgaatatctagtgattcttcatgagttgtgtatgccatttctggttcaatcatccagaattccgttaagtgacgacgagttttggatttttccgcacggaaagttggtccaaaagtaaagacttttccaaatgccatcgcaccagcttctgcatataattgacctgtttgtgataagaatgctggttgtccgaagtaatctgtttcaaataattctgttgtgccttctggtgctgagcctgttaaaattgggctatcaattttaatgaatccttgttcgttaaagaactcgtaagtagcacgaataatttcgttacgaactaacatgatcgcatgttgtttgcttgaacgtaaccataaatgacgatgatccattaagaaatctgtgccgtgttctttcggcgtaattgggtaatcttctgaagcgccaacgacttctaaatcagtgatatccatttcatagccgaatttagaacggctatcttctttgataacaccagtaaccatgactgctgtttcttgkgataaatgtttaatttcttggaatttttctgtaccagcttcttcaccaaaggcttcaatgaaatttggtttgaacacgacaccttggaaaaaggctgtcccgtcacgtaattgtaaaaaggcaatttttccgcttgagcgtttgttagcaatccaagcgccaatttttactgtttctccaacatgtttgtttgaatcaataatttgaatttgttccacgtttgtctctccgttcatttcttagtttattcttttaggcgttgtgctgaattcgtttcttttctataaagtcattcattcgctcaatcgctttttctaacgtcattaaatctgtcgcatagctcatccgcacatgttctggtgcaccaaagccctctcccgttaccagagcaacatgcgcttcttgtaataaatcttccacccagttagtcacgttatcatacccacaaatttctaacgtttttttgacattcgggaatagataaaaggcgccttcaggttttattagcgaaacgcctggcaaagctgctacttttggatagatatgatttaggcgtttttcaaaggcctgacgcatgtcttcaactgtcgactgttcacctgttaaagcctcaattgccgcatattggctaactgcgactggattactggtggattgtgaagcgagttgtgtcattgcttgaataattttttcatccccgactgcaaaaccaatgcgccagcctgtcattgcatatgttttggaaacaccattaataatgattgtctgttgacgaattgcttctgagatggttgcaattggtgtgaaccgatgtccattgtacaccaaacgaccataaatatcatctgcaataatgaggatattatgagcaactgcccattcaccaatttggcgtaattcttcttccgtataaataacaccagttgggttagatggtgaatttaaaatgattgcttttgttttgtccgttcgtacagcttctaattgtgcgactgacactttaaatgattgctcttgcgtgcttgatacaaatactggcttgccttctgctaatttgacttgttcaccataacttacccaataagggacagggataatcacttcgtccccaacgttcaaaatggcttgaaataatagatacagcgcatatttggcaccatctgtcacaataacttgcttgggttgataacgaagttgatattctcgttccacataagagacaattgcttgctttaattcaggaatgccgccagaaggtgtgtaataacttgctcttccatcctcaattgaagcaattgctgctttttgaatatttttcggggttacaaaatctggttccccaaccgttaagcttaaaacatctacaccttttgcttttaatgctttcgccttggcggcagctgctaatgtaacagaaggagtcaattgctgtgctcgatttgatacgttcatacacctttcactcccactttcatcaaaacctatctaaattaaatatctttgacaacgttgatctcttcgcctttatcaaagctcatcagataatacgtcagtactccttgatcattttcggtgaccacttcccatgcagggcgcttatcataaagccctaacgtagctttcatcaccgattcatcgggatgggctttagcaacaatgtctgttatttgttgttcagtttgaccatctttttgatttaagaccgtgactttttctcccgatttagggacaatcacgacaatctctgtgcctttatcatttttgccggttaaagtaaaatacgtatttttgcgtgtaaaccagtaaaatttatcaactgtttctaaattagcagaagttttggcaattgcagttgcttcttttttggcttgggccattggttgattggttcgtacaaaaaagataattattgttacaagaattgctaaaaggattgccaatagggttaaaaggacagtaatccgtttcttctctttcttttcttctaattcctccaaaaatccttccatcctctctaaacttactgggtcttattatagcagaaaaatagcggcctttcacaaatatgacctaaaaataatcgattatttgtttaaaaattcctttaattcttctaaaatttcaggcatgggcgcttcttttactgagagtcccttgggaaacgctttgattaatcgtttgccatattttgcagtgactaaacgacgatccagaatcagcaatgcccctctgtcttcttcagaacggattaaacggcccagtgcttgtcgcaaacgtaaggctgctttcggtaccgcttcttgagcaaatggttgtatcccttctgcttctaaatacgcatattttgcttgcacaagtggtcgtttcgggttttcaaaaggcaaacgcgtgactatcaataactgtaaagctgttcctggtaagtccacaccttcccaaaagctatcggctcctagcaaaacatttggttttccattagagaaccgtttaagaattttttcacgactgccgctaatcccttgggcgaggacctcttgtcctttttccaataatcttggctggacttgatgatacacggtggacaataattcatgcgaagtaaaaagaaccaacatcgaacgttcctcttgcgccatcaatttttcaatggtatctgaaatgtactgacccatttcataggmagaggcattttgaatggctactgcttcttccggtacatagactcgcgcattttctgcatagttataaggcgttggcagggttttgaacgtcacctctgttaaacctaaccgttgcggtaaatactttttattgttgccaaacttcaatgtgccgcttgtataaataattcgttcataccgcggataccactttgtttcaggaagcaaactagcttctaagtcatgaatttcaatcaagccatggtcttcattttgtggtaaatattcttttacccaacgtggacgccaatcatcaagataaatggtaaaacagtgatgaatacgttcaatttcatcaaaaaattgaaacaagcgaacaaaaacaatgcgatcagccaaactaaaggtttccaactgactcataattgtttgctgtaacttactttgaatagttaacagctcctgcagtaaaagctggagcgtttgactatgtttttctcccgcagcagataaataatcaatacgttctttggttaaaagcaactcctgatggtctatccgcttctgtgttttactaaataaacgatgcaattcaaaaagaaaatcttgccattcatccacaaaatccagtaaaccttgctgataaatttttacaaaccgctgctcttcagaaaactgttgaaaaatttgctgtaaagcaacaaaaagttgttctttttcaataaaatgcgtgacttgtttttttagtatcacactgttcactcgttcgctcgccatccgactagcgatgtctggtaaatgatgtgcttcatcaataattagccacggactttcaggtaataacggttgttttcttagcgactcttgcgccaaaaatgcatgattaacaatcaacacgttactttgagcgacttttttatacagatgtcttaaaaagtcaacttcataaagttcatctttttttgaaagaaaatccaatccgcgatgtgtaacttctttccagaataaatgatttaaattcgtcaattgtagttcatctaaatcgcccgtttctgtttctagcaaccagacgagaacgcccatttgataaagagcgtattgtttttgcggagttggctgattcaacgttgccttaaagcattgtaaatcaagatagtgtcgatggcttttaataacaatgcctcgtaatttcccttggcagatttgattggctaatggtaaatctttttccactaattgattttgtaaaacaatcgaaactgttgaaatgatgactggtttttctggcgttgctaaatagctcatcggcaacagatagcctaatgtttttcccgttccagtcgccgcttcaataaataaatcttttgtcgttccttctgtaaaatgatcatagactaaattcatcatccgactctgttccgcacgataagcgaaacgttcgccaaacagtttttctttggcttttttagttttgggatacgtgctagtctgatagaacgtttcttcaaaaagaggaacttcttttttgcgtaaagcaatgccactgaccacttgataagctggatttaatggtgtgacttgttttttcatttgttcatacgtttgttgaataaaggcactggtttcccgcgctgtctgttgacttaattccgcaattttttccatagtgactaatggtaaagatttcattttttcttgaattaataacaaaagttcggctgtaacctgcgcatcactatctgcttgatggggattctcatgagacaaacctaagctttccgacaaatcacttaaacggaaacttttttctgtcggtaaaaaaatctgtgccaattccactgtatcaatggctggaatagtaagtggcggcgtgccacaccgtaccagttcacgagctaaaaaattataatcaaagtggacgttatgcgccacaaaaatagtatcttccagataatgataaattgtatgtgctacatcttcaaaataaggcgctttttgaacttgcgtattactaatccccgttaaactttgaatttgttttggtactacttgattgggattcacatctgtcgcaaagttcgcaataatctttccatcttgaacgagaacgcatccaaactgaatgatccgatcacttgtaggatctgttccagtcgtttcaaggtcaactactgcatacacttgtttgtctttcaatgacttcacgcctttcattcatctttgaaaattatactacaatttataggattttcactagtatttcaaaaattctcttgaaatcttttccagagataataagaaagrgcctgaaacaaaaatccaaagtgatttttgtttcaggcytaaaagctgataaattgaacggttttgtcttaccttctcctaaataaacgattaataacagtcaaggattttctgcatatactggtttaattgcccatagccttccaattctctgattactgggagcggacaacgaacctttttattaaatagtgtccgcttttcaacatattctgtaattcgtctaaaaatttatctaatcctttttctaatttcatacaacttaactgattgcaaattcgcacgtctcctgcctttttcttttgaacttgtttaaatgattgtgagaatgcttttgcttcaaacatttgtgcttctaactgtcttttttcaatagttattttcggtactgcttgatttccatcagtatcctctaaatggcgactcataaagcgacgataaatttcctcttctaattcgtccaattgtcgttgaaagtccgcaggaattgtccgacttgatgaattttctttctcactttccatagagacagcttctttttctggcttctgctcctcttctttttcggcagacttattcactgaatttagcgagcttttttctgtttcttgtggaaaagtaaataaaggttttgccgcggtactctgctggttttcttgttttttttctggcagcgcttctttaattggcgctggttcacttgttgctacagttgtttcaccttcttgattttcccgattatcaggcgagagattgacgtctggttgttccagattagtatcctctgatactttcagcgatgcctgttctgcggctatcacaggagaagctcttttcaaatggatcgtttttatttgtctagaaatgacgggatttctcgtttgattaacggcttcatttaaggaggctaaattttcttttaaaagtgtcaacatttcacgtaagacagcaatttcaccagctaattccgttaattgattttcttgcggcactacttgcacattggtttcattcatacggactgtttttttatttttagttgtcggtatttcatacatccattgtttcagtgcggatcgtaagtcacgagttgtcggctcaaacttccaaaataaacagtgtagtacattactccgtttcaacatagacataaatctttttaacaattaactcttcaaactgttctgattcatcccaactttcgcataaagcctcaaaaaattgttccccttctgctaaattttgatactctttcgctaaataaagcttgcgrattaagtaaaaattatacggtgtttcaacattatctgcataaatttctcgtcctaaaaaatctggattcgtttctttacaaagaaagaccgttttctcttctggttgtgtttcaagtgttttagtcatgagattcacttcctttttctccgttaataaccattttttaatgatagatacctttagtatacaggagaaattcttctgattttctcatatttttaagagacaatagaaattttagagaaaaatcgacagaaaaaaaacgtgagataaacagtcctattgaccatttatctcacgtaaaatacttaaactgactattttatccttggacatgtaaccaattattctgctgaatcaattggcaaaatcgtgtcttttttctcgcgacgtgcaattgctggtaaaatcattcctaatagaattaagacgattggtgtcacaatgttagaagctaattggaacaaccagccttgagggtctgaggcatactcaaatttaggcaccattcctaggatacaagcaaaggctgtaaataggaaacaccaaagaccaaacacaaaaccaattttaggatttttaacaaatttatattctgaattaaattgtttgtatgctttgtttagaagcatataggcaaagaagacccacaagtaacgcattggcataactacagaatttaagttagttagccatttaaccacttcgttcatgtccttcaacccaaacattggtaaagcgataataatacttactaaaatacctgttaataagtaaccattaattaacgtaccttttttcgtacgtttacgtaaccaacttggaacaaattctggatctgcttcagctaaaagaattttcagtggagcatcaattgaaaaggctagcgcagccacttgacccactgtattcgtcaaagcataaacaatcattaagagattaccaacaccataatatgcgcctaatttttggaaggcactgtaggcaccatttgccattaaatctttaggaatattgtcacttgagaataacatgcccattgcaaatgaacctaaaacagccgataaaccaaccattgccgctaggaaaatcattcctttagggaactctttggctggatttttagttgcatttacgtaaggagaaattttttcagcgccacctaccgcaaaaactaacatcgatacggttgtaaaataactaaagtcaaatttaggaatataggtgctgacttgtgacatgtttggcgtcgcaaattcaaccgttgaattaataaatggtgcgcctaccgctaataaaatgaataaaatagacatcacaaacatggcggttccagctaaaccaccaatgacttttaaggtggttaacccttttgttgataataacaagaaaaccaagaaaattattaatgaaataaatgataccgttacgattggcatcgtattgactaggtttccattcccttgaactgcccaacctaaggcaattaaaattgcttgtggtttttgtgccaagtaaggaatgtgcactacccaataagtccatgctgcataataggctagacgtttagtactggtattttgcacccacgaactaactccaccattactgtctttaaatgttgaacctaactgtcctacgattaacgcatagggaataaaatataaaactaaaatcaaaagccatgaagtgaccactgaaatcccttgttgtgcataattattcacaacatttccaagaccccagaccatgttaaaggcaattaacccgacggtgaaccatcgtaattgctttttgtccatataaccaattcctttcttattaaaaaaaataaagctcttcatttatcataagcattttactttttatgcacaagctcaacataattaaataaagatggctttttaataagtaattaaaacgcttctagcaatgattttctaatttatttgatgactaaaaaaggccggtgaataagttgcttcaccagcctttttctaagagatttttcttttataacatatcaaataatgataattggttttcatctggcaagtcttttaagacaccattttcattcatgtattcaattaacgttttagaaactttgcctcgtgttgccaaatcttctttcgataagaacggttgctcttctcgcgcagcaacaatggctttcgctacgttgaggcctaaacttggcactgctcggaaaggtgcaatcaaggtatccccttcaatcacaaaattttcagcatctgatttgtacaaatcaatcatgccaaatttatagccccgttccaacatttcattacataattctaaaaccgttaataagtttttctctttagtggaggcgtccatccctttgtccgtaatttctttcattcgtgctttcacagcttcttttccttgtgacattgccactaagtcgaagtcatccgcccgaacggagaaaaacgcacagtaatataagattgggaaataaactttaaagtaagcgacccgcaacgccattaatacgtatgctgccgcatgggctttcgggaacatatatttaattttagaacaagaatcaatataccagtcagggacgttgttttctttcatcgcatttaaatacgtatcccgtagttcatcaggaatcttattccattgtcctttacgtaccgtttccataatcttaaaggccatcccactgtccaaaccagcatgaattaaataaaccatgatatcatcccgacaaccaattacttcagcaagattggcttcgccacgacgaatcaattcttctgcattccctagccacacatcggttccgtgagacagtccagaaatttgaagtaattctgcaaaagttgatggatgggtctgttctaacatacctcgaacgaaacgtgtcccaaattcaggaattcctaaagttcctgttttagaataaatttgctctgcatccacacctagaacatcaggtccttcaaaaatacgcatcacttctggatcgtctgttgggatggtttttggctcaatcccagataaatcttgtaacatccgaatcacggtcggatcatcatgtcctagaatatcaagttttaaaatattatcgtgaatggaatggaaatcaaagtgcgtcgttttccattctgcctcttgatcatcagcagggtattgaattggcgtaaagtcataaacatccatgtaatcaggaattacaataataccgccgggatgctgcccagtcgtccgtttaacccctgttgaacctttggctaagcgatcaatttcagcaccacgcaaatgtaaattatgatctctttcatatcctttaacaaagccatacgctgttttgtcggctactgtaccaatggttcctgcccggtagacatattcttcaccaaaaagaactttcgtgtagttatgggcttcggcttgataatcgccagaaaagttcaaatcgatatcgggaactttgtcgccatggaaccctaagaacgtttcaaaaggaatatcgtgaccatctttaaacaatcgagcgccacattttggacaggctttttcaggcatatcaaaccctgaaccataggaaccatcttcatagaactcagaatattgacactcaggacaataataatgtggcgctaaaggatttacttcagtaatccctgtcattgtcgcaacaaaactcgaaccgacagagccccgtgaaccaactaaatagccatcttcattacttttatgcaccagtttttgagaaattaaataaatgaccgagaaaccattcccgttaatcgaattcagttccttttctaaccgtttttcgacaatttctggtaaaggatcgccatacaattcgcgcgcacgattgtagcttaaatcagtgatctcttgttcagacccaggaattttcggcgtatacaaatcgtcttttactggaataacttcttcacataaatcagcgactttgttgggattttctactacaattcgcttagcgatgtcttgtcctaaaaattgaaattccgttaacatttcatcggtggttctgaaatgaacctttggtaaactatggcgatttaacggattagcgccgcccatagacccgactaaaattttccgatagatggcatcttcttcatttaaataatgaacatttccagtggcgacaaccagcttaccaagttcgtcaccgattttcaccagattactaataatttcttccaaatctgcttcatttttcaccaattcttgttcaattaatggcgcgtaaactggtttgggcataacttcaatataatcgtagaatttggcacgattttttgcttcttcgacacctttttgcatcattgcttcaaaaatttcgccgtttgaacatgcggaaccgattaaaagtccttctcttaacttcgataattgcgaacgaggaatccgtggtactcggaaaaaataatctacattggacatggaaatcaatttaaaaagattttttaatcctgcttgagttgttgctaaaatcgttgcatggaaaggtcgagctcgtttgtatgagtctccttcgccaatatgacgattcaaatcatcatggaaatgcatatcatgattctctttcgcttcttttaagaaaatccagcacaaatgacctgttgattccgagtcatagatggcgcggtgatgttgttctaagttgacgccaaattttttcgataaggtatttagacgatggcttttgaaatgtggatacaagaatctggataattctaatgtatcgatgacgggattagccgcttcaggtattccatgtttgccataacttgtatttaagaaccccatatcaaaagaagcgttgtgggccactaaaatagttccttctgaaaactctttaaacatgcgtaaaacttcttcttcggattttgaaccgcgcaccatttcatctgtaatcccagttaaattgatcgttgtttgagataatggatggccaggatcaataaattgctcaaaagtctcaatgacatttcctttgtgcattttgacagcggccaattcaataattgtatcataaacagcggaaagccccgttgtttccacgtcaaagaccacataggtagcatctgttaattcaatatgttcttcgttgtaagcaatgggtacaccatcatcaacaatattggcttccacgccgtataaaattttaacgcctgcttttttacctgcagcatgggcatcaggaaacgcttgggcgccgccatgatccgtaattgcgatggccttatgaccccatttccccgcttgcgccaccaagtcaccgactttattggtcgcatccattgtactcatgttactatgcatgtgtaattctacacgtttttcaccttctggcgcgtagtcttttcttggcgcatgggcgacttccatcaaatcttgagcattcatgactaaatcacgcatgaaggtatcttcttgtacactaccacgaacacgaatccaactttgcggttgaatcgcatcaaaaacttgttcatctttttccccattcgaaaatttcttcaccacgaaagaggaagtataatcagtaattttcaaaattaaaatttttcgtttagaacgcaattcacgcacttctttatcaaaaataaagccttcaatcgttatccgacgttcttcttccagtatgtttcccattggcataatgggttcatcattgggaatattccgacctaaacgaattggaccatcaaacgcaggcgcttgttgttgtttttcttttttcatttgttcatgtttaacaagcgattcagcagcttgttgttgaaaggctgcggcttgttctaatttttgctcttcaaattttttcagcacttctgcagcttgctgttgatccatttttggttcaatatgaaatttaggaaacccgtaagagaaataaagttcctcaataattggtaaatattgttgcttcaaataaggaataactgcttcattatcaacaggtaagataattttccgatcttcaaattgtggtgtctgtgtttttaagactttctgaactaacggcgtattgcattgactatttaacaaggccaattgccaataatccgttaattgttcctctgtaaatgttgtctgatttgtggttatttgaacggaaacctgcgcaatttgttgaaaagctagttccaattgttgcataaatgtttgatatagcatcactggcatcaattcatcaaaacttaaatgaaattcccataagcgactttgttggtgaacaatgaccttgtcaatccggccattttgaattaagggatgttctttcgctgtgtcatctaactgaatttgcgtcatcagtttatcaaataaatcgcgtgctttttctgtcacaaaatgaacctccttctatcattgaaaaaaggccctcagacaaatctgtcaagtgccttttttcggtttctctgcattcgcttctctattaagtatactcgttttttgtaaaaaaacaatcttgtttcttttctaaaaagagctaagaagagcttgaagcaaaaatcactttagatttttgcttcaagcytaaacgctgataagtggcggaaacagtttatcctaatcattctgtccgcccttttcattattattccacttctgatgttgtgttcatcaraatagaaagtgtactttctaattcttctttgcgtacttccaacatttcaccagtacgtttgatttkgacttctaccacaccatcgactgcttttttcccgactgtgatacggattggacaaccaattaaatcagcatcagcaaattttacgcctgcgcgctcgttgcggtcatcaactaatacttcgtagcccgcttcggtcatcattgcttcaacttcttgtgatagttttgtttggtactcatctttcacattcatttggaccacgtgtaaatcaaatggcgcaattcctgttggccaattaataccacgctcgtctgcattttgttcaacgattgctgaaagtaaacgactaacgccgatgccatagcaacccatgatcactgatttttcacgaccgttttcatctaaaactgttgcgcccatagcatcactataacgcgttcctaatttaaagatatgaccaatttcgattcctttagtaaaggctaagacaccattgccatcaggagaaggatcgccttcttgaacaaagcgtaaatcttcgtaactaattggttggaaatcacgatctggatttacatttgtcaaatgatagccatcttcgttagctccaacaatggcgttggctaaatcttgaacagctaaatctgcataaattttaacatcttcggaaacattgactggaccaattgaaccaaagcccgctcctaagacacggcgagcatcttcttctgttgcttcatctaagaaatcagcgcctaagaagtttttcaatttgacatcattgacatcatgatcgccacgaaccaagaccattactggctcttcatcggcaataaatagtactgatttaataattcgttgtggctcaacttcaaagaagtttgccacttcggcaattgtacccacttctggtgttgcaattttttctaaatctaattgtgtttcatgtgattttttcggcgtataaagacttgttgccatttctaaattggcagcataatcactttctgttgaataacaaatagtatcttccccaatttcagaaatcgccataaattctttagaatctttaccacccatggcaccaccgtccccaataatggcacggaattctagtccacagcgttcaaaaatgcgtgagtaagctttttcgtaatcacggtatgattgatctaaactagcttcatcggcatggaaagaatagccatctttcatgataaattcacggcctcttaataagccagaacgtgagcgtttttcatcacgatattttgtttgaatttggtataaattcaaaggtaatcgtttgtaagaattaatttcatcacgaattaattctgtgaaggtttcttcatgcgttgggcctaagatatagtcacggtcattgcgatcttttaagcgatacaagttaggtccataagtttcataacggcctgattctttccaaagttctgcgggtaataacgcaggcattaacatttcaactgcatcaattttctcaaattcttctcgcataatcgtttttaatttttctaaaacacgattggctaaaggtaaataagaatagatccctgcagcgacttgacgaatatagcctgcgcgcaacagaatttgatgacttaagacttctgcatcatttggtacttctcttaacgttggaattaacatttttgactgtttcattaaaactctcctctattttaaaatcaactatttttgatttctttacacacttttttacttaaactttctccttaaaagaaaaagcgttgaatatcgttccaagtaactaacaccattaacaccatgacaaacccaaagccaattaacgtaatgatgccttctttttcaggactaattggttttccacgtacaccttcaataatgtttaagacaattttcccgccatctaaagctgggatcggcaacaaattaataatccctaagttcattgacaacatggccattaagaatacaactgtacttactccagcattggatgcttcttccgataatttaaacatcatgactggcccacctagtttgtttaaactaaagcctgtgaatagtgagccgagtgctttaaaaatctgtgtcgtactattcaaagtatcctgaataccgcccatcaattttgacggtaaatcggttttcatataaggataaacgccgactttaccaatcgtttgtttttccactttttgtttttctggtgtcactgttagttgctcttctttgccgttacgctcaactacgaacgttaacggcttttcggggttcttctgcacaatggttgtaaaatcttcgtattttttgattttttgattattaatcgataagactttatcgttttctttcaacccagcttctgcggctgggccattaggaatcacttgtccaatttgattcgtgtttaaatcagtgacgcctccttgtagaaagaccgctaacgtaaacagaataaaccctaagataaagttattcatgggtcccgcaaagttcgtcaaaatgcgttgcgataatttcgctgattgaaattgaacgtcaagtggcgcaatccgcacctcggttccatcactttcaataatcgttgcatcatggtcaactttataaacggtttcttcttcctcgtttccattgacatagcccttgatgaataattctttttcaagatcaaaatcaatgacttccatcggaatactatgaggtaattgtacttttttacttgtattaattttaaccacattacccacggcatttaactcaacagatagaggcatacctggtgtgatttctgtcatgtcttcgcccatcccagccattcgcacatagccaccaattggcaataagcgaatcgtataagtggtgccatcttttccacgatgcgcaaaaatctttggtcccattccgattgcaaactcacgaactaaaatacccgctcgttttgcaaaataaaagtggccaaattcatgtacgaggacaagaataccgaagacaataatgaatgtgataattgttttcatagatgtccttcttccttcattcactgacgttcagtgctttttattattacatgggaaagtctcgtaaaacttgctctgttcccttcccgataaaccagtgcaactgtttactgagaacagtcgccactgttagtgaacaaatctttccttatgtaagacaagttttattttagcatattcactcataaataaccattggacttgaccacttcgcctagatattttgtgtttttttagaaaactgtataaatgagaggmattgattactacgaccagtatttattttaaagaccttcaacaatagtagctaactttagaccataaacttttccgacagtttgtcgtattttatcaacacgctgattgacatgtgctaccatgaaagtattaatagtaattttagggggaatgaatcaatgtatggagaattacatggtaaagtagccgttgtcactggtgcagctacgggtttaggattatttattactctgcgttatatcttagagggcatgaatgttgttgctgactatgtcggtgagctgcctaaagaatttgaagatgtccaagccaagcacgcagatcgcgtaaaattcgtgaaggctgatgtctctaatgaagaagatattaaagcgttagctgaaaccgctttaaaagagtttggtcatgttgacatttgggtaaataacgccggtgtggaggcttcttttccgacaattgatatgccattaaaagaatggcaacgtgtcattgatgtcaatttaaacggtgtctttttgggttctacgac

SEQ ID NO: 95 - DNA, 8726 bp; double-stranded, linear
gcatatcaacaagtcaaagaacgatatgaaattttacaaaaagaagaaaaagccttaaagcaacaactggcttcttatcatgatttctatgaaacgttttgcttggctgaagaagtcttattggcggttatccaaagagaacaagcacgtcaacatttgttaaatgcttcatcatttttcatcttgcaaacgtggattccagtcgaagaaaaagccgagattttgacagcgattgaagaaaaagttcctaaggacgaaatagctcttacttttgaaaatcctacgaaggcggaaattgagacggatataccagttaaactagcgaataataaattggtgcagccgtttgaaatgttaacagagatgtatagcttaccaaaatatgaagaagttgatccgacacctgcgatgatgccgttttatctagtcttttttggtatgatggtagcggatattggctatggcttactgatgctactcttgtctattattgctttgaaagcatttgttttaccgagaggcatgaaacgttttgccgactttttcttgattttatcatttccaacaattatttggggcttcatttacggttcgtttttcggtgcagcattaccgccaataatgtttggaatcaaatcaccatttccgattttatcaacgaccgaagatgtaaatacgattcttattttatcggttatttttgggtttatccaattggttgtcggtttaatgattaatgggattcagttatcaaaacaaaagcgctatttagatagtattaacgaaagttacgcttggttagggattttgtttggtttagcattgttagtcgttggtaaattagtggttaaaaatgaaggcttatttacagcaggtgcgattttagctagcctttctgccattgcaattattgtgattccaatgattcaatcgaaggccaaattaaaaggcttagccaaaggactgtatggactatacggtgtgacaggttatgtcggtgatttagttagttatacacgtttgatggcgttaggaattgctgggggaagtattgcttcagcgtttaatatgctcgtagagttcatgccgccagttgcccgttttagcgtgggcatcttgctgttaattgttttacatgcgttaaacatattcttatcgttattaggtgcttatgttcatggcgcacgtttgcaatatgttgagttctttggaaaattttacacaggcggtggccgggcgtttaatccgctaaaaacaaaagaaaagtatgtcaatgttgagaaaaaatagaaaattatttattggaggaaaatagagatgatggattacttaattaataataatggtggaattgtttttgcagtattaggaatggcaatggcgacaatttttgctgggattggatcagccaaaggggttggctttactggggaagcagcagcagctttaacgacggagcagccagaaaaatttggtcaagcgttaattttacagttattaccaggtacacaaggactatatggttttgttattgctttcttaatttatattaacttaggaaacgatatgagtatggttcaaggattgaactattttgtagcagctttaccaattgcttttgcaggattgttctctgggattgcccaaggtcgtgtagccgctgcggggatccaaattttagcgaagaaaccagaacatgcaacaaaaggaattatctatgctgccatggttgaaacttatgccatcttagggttcgtaatttccttcttacttgtattgaacgtcaaataattgaggaggcagatggatggatgccattgaaaaaatcatcagtgaaattaagcagcaaggaaagcaagaagtcgaagcctatgtcaccagtgaacaaacgcgcatcgatcaagaattccaagcagcacaacaagaaattttgctgaagcaagaacatgaaatagaaaaacgacaacaacaattattaaaagaatttaaacaacgccaacaacggcaaacactagaaattcgtcaggatgcattaaataaaaaacaagcatatcttaaccaattatttgacgaagtggtcttaaagatgagtgaatggtcagcggaagaatttcaacaattcatgaaagcacaattaggttcacttgaattaacaggaaaagcaaccattcttttaggcgagtattctcaaacgaaagtgacgcaagaatggctgaccgccctttctgatgctactgttcaatgggagctttcagaggaagttgttccaaaagaaagtggctttatcgttgcaaaagacggtttggattataattttctcttttcagcattagttgaagagattcaaaaaacagaaggctttaaagtagcagaaaaacttttcagttaagaagggaggacgtagcatgagaaaaccaacgtatcatcaaattaatccgctgattcgtttaaaagaaacggagctgctttctgagcaacagtttcaacaacttttagaagcggaaacagttgaagacgttagaaatatgttaaaaagtacggtttatcaaccttatttaaccgaaacttttgaagaaaaatttgactaccattcttctgaagcgctgggaagtctttatcgctggttatatgaaatggctccagaaccagctgtagtaacgttgtatacgatgcgttttaccttccataacttgaaaattttgacgaaagctgagcgaacaggtaaagattttgattatctttatttagaagatggtcgttattctctaaacacagtcaaaagtgccattcatacaaaaaactcttccgaacttgagccagcattattagaagtgattcgtgatgtttttgcctatctggaagagggcggtttaccacaagcaattgatatcctttatgatcgagcatttttacagcaacaacgaaaattggcggatgaattgggctatgaagagttaacgaaggaagtcatcgcttttattgatttaaccaatctatcaacgatggctagagggattgttcaacatcaaaacagcaactttttatcaaccgtactttctagcgctggcagtatcacaaagaaagaactgttgacctatgcggaaaagtcacttgtagaatttacagcatttgtcagaacaacgaattacggacaactattagaaaagattatcaataaagaaaccatgaattaaatttattggcttttgaaaaactcaaagatgattacctgacctcaatgtatgaaaacggtcgaacggtcgcttttggaccgctcccattactagcctttttgaatgcgaaagaggttgaatggaaaaatctacgtttaattttggtcggaaaacatagtgggttctcaaatgaaaaaattcgagaaaggatgcgaaaagtcaatggggtataaaattggtgtcattggagacaaaaattcaatcttaccatttaaactgtttggctttgaggtccatcatgccatttcagaaatgcaagttagagaagccattgaaactatggcgaaaaataagtttggggtcattttcataacggaagaagcctctactttagcagaagaaacgattgaacgatacaaagaacaagtgacaccagcgattattttaatcccaagtcataatggtacaatcggaatcggtttaagtgagattgaaaaaaatgttgaaaaagcaattggacaaaatattttataatgcaaaggagaatgagcgtgcaaattggaaaaattgtcaaagtttcaggtcctttgattttagctgaaaacatgtcagatgctagtatccaagacatttgtcatgtaggagatttaggcgttatcggagagattattgaaatgcgaggcgacgtcgcttcgattcaagtatatgaagaaacaacaggcattggaccaggagaaccagttatttcaacaggagaaccattatctgttgaattagccccaggtttaattgccgaaatgtttgatggtattcaacgaccattggatacatttcaagaagtaacccacagtaactttttaggccgtggcgttaaaattgatgcgttagatcgtgagaaaaaatggacgtttgaaccaactgtggcagttggtgaagaagtgtcggcaggtgacatcgtcggtgtggttcaagaaacaccgattattcaacataaaattatggtgcctttcggcgtttcaggaacgattgccgaaattaaagcaggtgactttgccattgatgaaacagtttactcagtggaaacggctaaaggaacggaaagttttagcatgatgcaaaaatggcccgttcggcggggacgtcccattttagaaaaactaagtcccaaagtaccgatggtgaccggacaacgcgtaattgatacctttttcccaattacgaaaggcggagcggcagcagttccaggaccatttggcgctggaaaaacagtcgttcagcaccaaattgctaagtgggccgatgtcgacttagtcgtttacgttggttgtggggaacgcgggaatgaaatgacagatgttttaaatgaatttccagaattaattgacccaacaactggtgagtctttgatgaatcggacgattttaattgcgaatacgtcaaatatgccggtagcggcacgggaagcctcgatttatacagggattaccattgcagaatatttccgtgatatgggttactcagtcgcaattatggcggattctacttctcgttgggcagaagcgttacgagaaatgagtggtcggttagaagaaatgcctggtgatgaaggctatccagcctatttaggtagtcgcttagctgaatattatgaacgagcaggacaagtcatcgcgttaggaaaagatcatcgtgaaggaagcattacagcgattagtgcggtttcgccatctggtggggacatatcagaacctgtcactcaaaatacgttacgcgttgttaaagtattctggggcttagattcccaattagcacaaaaacgtcattttccttctattaactggttgcaaagttattctctttattccacagaagtagggcaatatttagacttggaattgcaaggaaactgggccgctatggtagctgaagggatgcggattttacaagaggaatctcaattggaagaaattgttcgcttggttgggattgattccttgtcggataaagaccgtttaacgttggaaacagccaaatcattacgggaagactatttgcaacaaaatgcttttgatgacgtggatacgttcacttctcgaacaaaacaagcgaaaatgttgcaattgattctaacttttggtgaagaaggtcaaaaagccttaagtttaggcacttatttctctgagttaatggcgggaacagttgaaatccgcgatcgcattgctcgtagcaagtatttaccagaagaagaattagaaaaattggatcgtttacaagcagaaattaaaacaacgataaaagaaatcattgctgaaggaggaatgacgaatgattaaagaatatcgtacaatcaatgaagtcgttggtcctctgatgattgttgaaaaagtggcaggcgtaaagtacgaagaattaattgaagtacgcatgcaaaatggcgaaattcgccaagggcaagttttagaaatcaatggagataaagcgatggtccaaatttttgaaggaacgagtaacatcaatattcgtgattcaaaagttcgctttctgggacatcctttagaattaggggtttcgccagatatgatggggcgcgtttttgacggcttaggtcgcttaaaagataatggaccagaattattacctgagaaaaaattagatattaacggcgaagttatcaatccagttgctcgtgattatcccgatgagttcatccaaacagggatttcagcgattgaccatttaaataccttagttcgtggtcaaaaattacctgttttttcagcatctggcttacctcataaagaattagcggcacaaattgccagacaagccaacgtgttaaatagtgaagaagaatttgccgtagtttttgcggccattgggattacctttgaagaagcggaatattttatggaagatttccgtcaaacaggcgcaattgatcgttcagtcttgtttatgaacttagcgaatgatccagccattgaacggattgcaacacctagaatggctttgacagccgctgaatatttagcttatgaaaagggcatgcatgtcttagttatcatgacggatatgacaaattattgcgaagcgttgcgagaaatttcagcagcacgccgtgaagttccaggacgtcgtggttacccaggttatctttacacgaacttagcaacgttgtatgaacgggcaggccgaattcgtggctcaaaaggttccgtaacacagattcctattttaacaatgccagaggaggataaaacacatccaattcccgatttaactggctatattacagaagggcaaattatcttgtcccgggaactatataagagcggtatccaaccaccaattgatgtattgccatcactttcccgtcttaaagacaaaggaactggcgaaggcaaaacgcgcggggatcatgcagcgacgatgaatcaattgttctcagcctatgcacaagggaaacaagccaaagaattagctgtcattttaggagaatcagctctttccgatgtcgataaaatttacgcagcttttgcccaacgttttgaagaagaatatgtcaatcaaggattcgatacaaaccgttcgattgaagaaacgttagatcttgggtgggaactattaagtatgctaccgagaacagaactaaaacgaattaaagaggatatgctcgatcaatatttaactgaagggaagtagaaaaatggctcgattaaatgttaatccaacccgtatggaactttcccgattgaaaaaacagttaactacggccacgagaggtcataagttgctgaaagacaaacaagatgaattgatgcgacggtttattgcgctagtcaaagaaaacaatgagttacgtattcaggttgaacaagaagtgacggatgcgttatcaaattttgtattggcaaacgcaacgttgaacgaagcctttattgaagagttagtggcaattccagctgaaaaagttgaattagaaattattgaacagaacatcttaagtgtgccagttcctaaaatgatttttgattacgatgaatcggttcaagaagcacccttagattatggctacgtgaattcaaacagcgagcttgatcaagcttttgctaaaatttcaagcattttaccgaaattattagcacttgcaaatgttgaaaagacgtgccaattattatcaaaagaaattgaaaaaacgcgtcgtcgtgtcaacgccttagagtatatgacgattccacaattrgargaaacaatttactmcattcmaatgaaattwgragraaatgaacgtggcgaaattacacgtctaattaaaattaaaagcatgaacaagaaaattagtggttaggaagaacgagtgcgaaccagttggtagctttcgtgctcgtttttaataaaaaagggagtggaaaaaatgaaaaatgaagaacgccgcaaagcgattgcactgaattgtcaaaaatacgaaagtgactatgctcgcttggtggaaccaatcaatgagctactgttaaacttgggagcggctatttcagaagaagccgcgaacaaatcattctgaatgtaaaacgatatcatcacggcgtgaaatatcttcctgagtgtcatttagatgaaagtaaccaatttatcgaagatgggcttgaagctcttaaaaagggagatttaggcaacggtgcgttacaactatttggggccggcttaaactttgctagttttgcagcaaaagcataaggaaccaaaaaaattgatgcccaccaaatgttggcagaacgttttacgaagttgttgtctgtacaaacggataatgataacaaacaataagraaaataccctkggtttattaagtcgacttagtaaaccaaggsyatttttttaactgttattgattagggtattcagacacctgtaattgccataacttatctgtcactgaagcaataaacgcagcactcttagcattatcaggtcctttagtaaaaattgctaaagcaaaggggtgaggtgtttctaaaatccccatatcatgaataaattcatcataggaaccaattttatgagcaacttttccttgagttgtgggagtttccattctttcatggaaaacactttgtttcatagaatcataaatcgcttggtaatctggttttgttgctttttcagtatataatttttgtagaataacaagcgcatcttcagaagaaaattgtggctcttcaatcgaaggtgtcttgtgcaaataacgctgatacatttctcgttttgcttttgcatcaccacccaatgtgtcatagagcatatttttagcgatattatcagaataggtgatggcatattcttgtaacgtttttaatggatattctggttggatattataggcaatgatccccagttccttcttcataatcttcttcggcgttatagggaatcaggtctgtccattttttttgaccagaagcaaccgtgtcggcaactagcatcgtcaggggcactttaatagtactagctgtataaaattcatgttggccattcacggaacgctgttcgccagtt

SEQ ID NO: 96 - DNA, 2531 bp; double-stranded, linear
gtaaagacttttcacaagtatcaaagaaatccgtcgttaatctttactattcgacaaacgaacaccctcttgctcagcaagagggtgtttttttgtgtaattaagtggaaaatcaacattgactttttttgaagtcacataagtgtgaaaattaggtttttggacaatgattcagaaatcttttgaaaattgaaggtgtgaggaaatttagaaagataaaaagagggagtactgaaaaccgaaatttcagttaagtgcttggatcaagaaacaaaaactacgttaktttgtcaatatcagttgaaattggagaagaagcagaatggggtgatagtattggcaaattaattatttaaggtcatcgttacaggatttttgttttttatatycaatcmaaaagaaataaatacaaagaacacagataagtattttagcaagtaaccaataaatagcaggactgttggtgctataagaatacaagaaaatagtagtaaacttaattgagaatcgtttgctatttaaatagtgttcttttccttttaatatatatacgataaaataagtatattaattgtaaaaggacatgataattatggaagaattagaatggaatwwtttttatgtttgctatagttttgagggtagtgattcttttaataactgtcaagatagtagattactttgngaatactcctgaagtacaaatacagagaaaacttcctgagtttgaaaaagtgccaccttatgatccaagagataattcatttctgatacaaattattctttaagtaatacaacgactaagtttatttaccaaaccattacaataagaaaaggtgcaagtatacctaattactattggtatgatgatggtcaatttagaggaaatctaaaacttcaacgttggcaagactacggagaagatccaaacataagaggatatatctgtacttatggaggctacgttaccaatggttcaagcccggcgcaaagaattgtcgatattaatgaacaatagctattctaactttatgtaataggagggagtaatcatgaaaaaaatcgggtattttagttgtattatttttttcatgtttttggtaggttgtagtaataacaaaaaagaaaacggcaatcttttgaatgccagttcgtttcctttaatactcaccacgattattgaaaaagaagaagacctaacgaaaggttcaatttttttcaacaaggataaaaccatgacgcttgaaaaagaatatttagttaatcccaataatgaagacacaaaaaaaacaagtagaacagaaaaaaaggtatataaaaatattaaaatacaagaaaataaagagagctatgaaattataggtcaattggacaaaaaaacgaaaaaaatagagtttaaaaaagttgatgaaggtaaacgtatatctgatgcagaaggtaatgtgtatggtgattttggtggtaaataggatagttaagtcataaaaaagaaggctaaaaatttttatttttttcgtctctatactttctgatgttagtttttttaccaacatcagaaagtatagagacgtttttgtgtaattaaacaaaaaatcaacattgactaagaccagaaatacttcctttagtgctccgagttgctctaatataagacaccaaattgataaccatttgcttgataaaactctattaattgtggcaatgcttgttttgttaattccttatctactgaatcatgcattaagactactctaatattataatccggataaacctcaagtgaatgttgatggaaagcgagcatttctgcgactgtagtaggctgtctgtctaacggctccgcatctccaaccatcgcattccagtcaatccaatggatgccaagttgtttgaataattcatcagatttttctgtacctccccatgacatatgacctcctgggtatcgccagagagttgtttgaaatgtttcgcccaatatttttttaagagagttctccatggttgctatttccgcttgtatttctttagtgttgacaatcccgtttggatataacgttgcataatcatgagttgaactatgaaagcctattgaatgtccttctgcaacttcgcgtttcactatcttttgattttcggaagttagggtatttcctacaagaaaaaaagttgcgtggacgttatacttttttaatgtatctaggacttgtggggttatttgattattaacgccatcatcaaaggttaagaatactaatttttcacctttgtaaggttcttctccagttatatattttctgattttgtctgctgagtaagcatatttttttgatgaaatagtcatgtgtgttgattccttttctaacttggtcggggaatctttttttgcagttgaatttttagtcgatgtctgcgtagtatcatcatttttacttgttatcttgggttgagttaataggaacgtttgaatgaaaacaagaacaatgaggattaacgcacctaaatnatacatacccgtntattttgaattt

SEQ ID NO: 97 - DNA, 2717 bp; double-stranded, linear
accgccgccgccaargatgaacgaaaatatctcgaatccaccaaaaccactactgctaaatccgccgccaccgaaaccgccaaagccaccagcgccgccaccgwaattaggatcagttcctgcatggccatattggtcataggccgcttttttctgtggatcacttaatacttcatacgcttcagaaacttctttaaatttttcttccgcatcggcttctttgttaatatctggatggtactttttggaaagtttgcggtatgcttttttaatttcatcatctgaagcaccttttgctaatcctagcacttcataataatctcgtttcgtcgccattgacttccctccaactttcttcaaactttacaatgtgtttagaaccagccaaattcatcgattgctttcggtctctctggttggattatctgtcacaccttgaatcagtgttactagctgtgaataggtattttcagcttgtttaacatcgttgtaatcataccacagttctttcaaaacctaaatagtttcttgctaacttgattgtggttgattttctcacaaaagacaagggactgggacattagtcattgtactaatgatccagtccctaaaatcaattgttattgattatttgtcatcaccatttacttcttcaaaatcagcatcaacaacatcatcagcgccaccttggagcagcttcagggattttcttgtgcttgttgttgcgcattggttcgtaaagttttactgttaagttttggacgatttcatttaatgaatcacgttttgctttcatttgttcgatatcgtttgcttcgatggctgcttttaattcatcacgcgcatcttctgcttttttcacttcttcagcatctactttgccttctaattctttcaatgttttatcaacagtgaataataaagcatctgcatcgttacgtaagtcaacttcttctttacgttgtttatctgcttcagcgtttgcttcagcatctttcaccatacgttcgatttcatcatcagataaacctgaagaagatttaatcgtgattgtttgttctttttgagtgcctaagtctttcgcacgaacatttacaatcccgtttttatcaatgtcaaagcttacttcaatttgtggcacaccacgaggagctgcaggaatatctgttaattggaaacgacctaatgttttattatcagcggccattggacgttcaccttgtaaaacgtgaatatcaacagctggttgattgtcagcagcagttgagaatacttgtgatttacwtgttggaatcgtagtgttacgatcaattaattttgtaaatacgccacccattgtttcaatccctaatgacaacggtgttacgtctaataagacaacgtctttaacatcaccagtgattacaccaccttggattgcagcacccattgctactcttcgtcagggttaactgatttgtttggttctttgtttgtttctttgcgaacagcttcaactacagctggaatacgtgttgaaccaccaactaggataacttcgtcgatttcagaaggatttaatccagcatcttttaaggcttgacgtactggtacttttgtacgttcaactaaatcacttgttaattcatcaaattttgcacgagttaagttcatttctaagtgcaatggtcctgcttcgccagcagtaataaatggcaagctgatttgtgtgcttgttacacctgataagtcttttttcgctttttcagcagcatctttcaaacgttgtaatgccattttatcgttagctaagtcaatgccattttcttttttaaattctgcaaccatgtagtcaatgatcttattatcaaagtcatccccacctaggttgttatcaccggctgttgataatacatcgaaaacgccatcgcctaattcaaggattgacacgtcgaatgtaccaccaccaaggtcaaagacaagaattttttcatctttgtctgttttatctaagccataagctaaagctgctgctgttggttcgttaacgatccgttctacttctaaaccagcaattttaccagcatcttttgttgcttgacgttgcgcatcgttgaaatatgcaggaactgtaataactgctttttcaactttttcacctaaatagtcttcagcaaaaccttttaaatattgtaagatcattgcagaaacttcttgtggtgtatatgattttccttcaacatcaactttgtagccagcttcacccatgtgacgtttaatagatgaaatcgtgttaggatttgtaacagcttgacgttttgctacttcgcccacttgaatttcaccgtttttgaatgaaacgaccgaaggagttgtgcggttaccttctgggtttgcaataattttcgcttcgccgccttctagtactgcgacagctgagtttgttgttcctaagtcaataccaataattttactcatagtgaatatctccaatctgtattagttttctataataatatatttttaattaacgtttgttattgtgcaacaatgaccattgatggtcgtaacacacsatcttgtaatttgtaccctttttgtagaacttcaacaatggtatctgctggggtttcttcagaagcagggactgtttgaacggcttgatgtaaatttggatcaaaggttcacccattgctgggatttcttcaattccttcttcttttaaagccacagtaata

SEQ ID NO: 98 - DNA, 16870 bp; double-stranded, linear
gaatttagaaatgaggactactgatgattttattacaagcaaatcaagttgcccggcattttggctcggaaacattgtttgaaaacatacatttagaaattgcaacaaaaagtcggattgccttagttggtcgtaatggtgctggaaaatcgacttttttaaaaatcattgcaggcattgatgctcccgatagcggaaccattgccaaaaataaaactgctacgttaggttatttagctcaaaataccggcttagaatcagataaaaccgtttgggaagaaatgacaaaagcctttgctgacatcctagaaatggaacagcgtatgcgagaattagaaactaaaattagtgaaatggagccaaccacttccgtttatgaaggaattttaaaagagtacgatcaattgcaacatacgttttctgaaaaaaatggctacggctatgaaaatgaaattcgctcagtccttcacggctttggctttgatgaatccttttacacgaaagatattcaaaccttatctggtggtcaaaaaacccggcttgcattagcgagaatgcttttacaaaaaccagacattttaattctggacgagcctacaaaccacttagatatcgagacgctttcttggctggaatcttatttgccaagttatgccggcgccctattaattgtttcccacgatcgttattttttagataaggtagttaatgaagtttatgaactgagtcgcaaaaaaatgactcactacaaaggaaactattccaaatacttagagttaaaagcagaacaattagccagtgaatggaaagcgtatgaaaagcaacaagaagaaatcaataagttagaagatttcgttgccaaaaatctggttcgtgcatctacaacgaaacgtgcacaaagtcgccgaaaagtattagaaaaaatggaccgtttagaccgacctcaaggagatgaaaaatcggcgcattttcttttcgatagtgaaaaagtctcgggaaatgttgttttacaagtcgaagatgccgccattggttacgaccaagaacatattttatccgaacctattcacttggatattcgtcgcaaagaagccattgccttagtcggaccgaacggaattggtaaatccactctcttgaaatcaattattgaccgcattcctttcattaaaggaagtaaaacttttggcaccaatgtttctgtaggttactatgaccaagagcaagccaatttacatggcaataaaacggtcttagcggaattatgggatgaacacccaaccacacctgaaaaagagattcgaagtattttaggcggctttctcttcagtggagacgatgttgaaaaaacgattcctttattaagcggtggcgaaaaagcccgtgtggcattagcaaaactagcgatggatcgtgacaatttcttgattctcgatgagccaaccaatcacttggatatcgataataaagaagttttagaaaatgcgctgattgattatgaaggaaccatcctcttcgtttcccatgaccgttactttatcaatcgaattgcaacaaaagttgttgagctttctgaaaaaggcagcaaactttatttaggcgactatgattattatttagaaaagaaacaagaggaagaagaaatcgctgccctcttagctaatgaagaagcggcgaaaaaacccgaaccagttacagccaaaaataccttttatcaaaacaaggagcaacaaaaattactccgtactttgcaaagaaaaataacacaagtcgaagaaaatcttgctcagttagatacgacaattgcacaattagaagcacaaatgagtcaaccagacattctagaaaatcatgttgaattgctggctttaaaccaacaattagatgaagttcgtcagcaacaagatgaactacttgagcaatgggaaaatttcagtttagaattagaagaaatggaaaataacaattaacggagggattcactatggcttccaaaaaaatcagtttaacgaagcccaaatatcaacaaatcgccgttgatgttgcggaaaaaattgcagaaggcaaattacatgttggagataaaatccatgcccgttccaccctagctaaccaataccaagtgtcgccagaaacagctcgcaaagccattatcgttttagttgatttagaaatcgttaaagccaaacacggcagcggcttctatgtggcatcaaaagaaaaagcgcaggactttgtgacacaatatcaagacgttcaaacgattgctgaaattaaagaagaattgctagatagcgtagcgaaacaaaaagaagaacttactcatttttctagcattctagatactcttgttgaacaaacaaagcgttttgattctttcaatccaatgaatccctattcattagttttaacagaagaagctgcttatcttgaggcgacgattagcgaaatgaatttttggcaaaacacttcggcaacgattatcgccatcaaacacaaagaagagcttctggtctcacctggtccatatgcaaagatttcgttgaacgacacactttattttgttggacatgacgaatcaaccttacaacgtgtccaaaatttcttttatccttaaacaaaaaagtgactacttatcttgcggtaaatagtcactttttttatttattatttctatttttcataaaaacccactataaaacctagttaaaatactgtttttcttcattttcagaaagattttcatctaatttgacaaagtgacaactttatagtagtctgatgtagtcactttttttaatgaggaggaacaatgatttgccaaaagtaaaagtaaatcaccttaccaagatctttggtaagaaaaccaaaccggcacttgaaatgattcgtgccaacaaaagcaaaacagaaattttagaaaaaacgggtgctacagtcggtgtttatgatgtaaatttcgaagttgaagaaggcgaaattttcgttattatggggttatcaggaagtgggaaatcaacattaattcgtttattaaatcgtttgattgaaccaacttcaggaaatatttatattgatggacaagatatttcttctttagataaagaaggattacgtgaagtacgtcgaaataaaatgagcatggttttccaaaactttggtcttttcccccatcgaactatcttagaaaatacggaatatggtttagaaattcgtggtgttcctaaagaagaacgccaagcaaaagctgaaaaagccttagaaaattctagcttaattgcttttaaagaccaattaccaagtcaattatctggtgggatgcaacaacgtgtcggccttgctcgtgccttggctaacgatccagaaattttattaatggacgaagcgttctctgctcttgatccgttaattcgtcgtgaaatgcaagacgaactattagatttacaagaaaatgtcaaaaaaaccattatctttatcacacatgatttgaatgaagctttacgaatcggcgaccggattgctttgatgaaagatggtcaaattatgcaaattgggactggagaagaaattttaaccaacccagccaacgaatatgtgcgaaccttcgtggaagatgtggatcgttcaaaagtcttaactgcccaaaatattatggtacctgctttaactactaacattgaaattgatggcccaactgttgctttaaaacggatgcgtcaagaagaagtgagtatgttacttgccgtggataaaaaacgccaactaaaaggcgttgtacgcgcagaaaaagctttagaagcgcgtaaaaatgggacttctcttgtagaatgtgtggatccagaaattcaaacaatcgacaaagatatgttagtgaatgatattttcccactgatttatgatgcacaaacgcctcttgccgtgactgataacggcaaactattaggcgtggtcatccgtggtagcgtacttgaagcacttgcagaaacagaggtgaacgaacatgaataagtatcaattacctgtcgcgtcttgggttgaaagttttactgattggttaacttcaacatttgctggattattcagctttttacaaacaattggtcaaagtgtaatggacaacattactgccttactaacagccgtaccaccacttgtgctgatcgtgctattaacgattgctgctttctttatttctaataaaaaaattggcttaagtttattcacgtttattggcttaatgtttatctataatcaaaacttatggaacgatttaatgagtaccgttacgttagttttactttctagtgttatttccattatcattggtgtgccactagggattttaatggcgaaaagcgaaaaagccaagagtatcattacaccgattttggacttcatgcaaacaatgcctggtttcgtttacttgattccagccgttgcattcttcggaattggtatggttcctggggtcttcgcctctgttatcttcgctttaccaccaaccgtacgctttacgaacttaggaattcgacaagtgccaaatgaacttgttgaagcagctgattcttacggtagtactggctggcaaaaattattcaaattagaattacctttagccaaaaacacgattatggctggtgttaaccaaacaaccatgctagccctatcaatggtagttattgcttcaatgattggtgcgcctggattaggacgtggcgtcctttccgctttacaacgtgcacaagtcgggaacggtttcgtaaatggtgtggctttagttattttagcgattatcattgaccgttttactcaacatttaaataataaaaaagcagctcctaaagcagctggtgccacctctaaaaagaaaaaatacgggattattgcagcggttgttgtaattgtcgctggcttagttggtgcttcaatttttacaacaacaaatgataagcaaatttccctttcttatgtggaatgggataccgaagtagcctccacacatgtggttgccgaagtcttaaaagatatggggtatgatgttaaaacgacccctttagataacgcaatcatgtgggaatctgtagctaaaggtgaaacagatgccatggttggtgcgtggctgccaggaactcacgcagagcaatataaacaatataaagataaattagacgaccttggtgaaaaccttaaaggcgcgaagttaggaattgttgtcccttcttatatggatgttgattctatcgaagatttatctgatcaagctgggaaaaagattactggaattgaacctggggctggtgttgttgcagcagcagagaaaactaaagaagcttatcctaatttgaaagattggtctgttgaaacttcttcatcaggtgccatgactgtcgccttaggacaagcaattaaaaacaacgaagacatcgttattactggctggtctcctcactggatgtttgcaaaatatgatttaaaatatttagctgatccaaaaggcactatgggcggcgaagaagcgattcacacaatggctcgccaaggcctaaaagaagatcaaccagaagcttacaaagtgttagataatttccattggaccactaaggatatggaatctgtcatgttagaaattaacgaaggcaaagacccacaagaagctgcacgtgattgggttgattcacataaagaccaagtagcagaatggnaaaaataattcttaacaaatgacttccccatctattaaaagrgggcgttgaacaaattgttcaacgccctcttttttcgcaaaaaaaaccactcagttgggtagactgagtggaaaggagttatttttacttgaggagtaaaaatgaaaagtgtttatgttgggtgttttgttggtatgcttatatattaacgagaacctgtgaataatttgtgacgaaaaccttggaaatttgctacgaattacttaaaaaagtttaaatgtgtctcaccctagttaatcgatacagtgattatttctttttagcattttggatggctttaaataatgttgaaaattgtcctttgaaagacatcacatcatcaaagatatcaacaccatcgtttaacattttgacggtaacccagccaagcgcttccgtaattgctaccgcaactgaagcattgaccatgccaccagtcacagttccgacaacaggaatcacttttagaatattcccgactgcactcttacctaaactaaccactactaattctttggttaagcttttccctaagctttcagaccaagactgaccaaaaattttatgcagccgtgacatcatagttaattgaacaggtaccagtaaaaaagcatccgaaaacggaattggcgaaaacccaataattgctgctgacaatgcagcaaaatgaatcgtttgatgacttttctttttcacgtcaggtgaaacaccagccaaaaattcatcaaatactttgtcgagttgtgtttgactgttcgtcactaattgttctgctttacctttagaagttgcgaaagcattcattatagccgtagacgttttttgtggaaattttttcaagacatcttgaaaaaaagaacgaaattctgggtcttcgatttcttcattcaattgcttagtttcttgttctgctaattcttgtttttcaatctcttcaaaaagttcttgtttctttttgtttttatgtttttttcttctcatctcattaactcctttatctatcaatatgtagaaacaaagtatagcatagcccctgattgattctcttttagatgatttgaaaagccagaacttatctgttttttaaacaaatagaaatgttccagcttttctcaaaaaaatcagctattttgtttgttcttcaccgcaataaaccgtcaagtgtttaggcaaaatcttcagcgtaattggcaaagcagctccttcatcaccatccacattagtggttaattcttcttggttttctaaggagattgttccttctttaaaggttaggtaaactaaattatcagtggactggtcgacgccttttaacaaatctgggactgcttttactgcatcccataatgattgatcttttaaataaactaaatgaagtttgccatcatccacttgggcctctggtaataatgtttcaaacccaccgattgaattcgttaagccaactaaaacggtactactttcaatggtttgttctttttgatccaagcttaaatgaaaaggatacgtttgagcattcgctaaatgtttggcacctgaaataaaataagcgagttttcctaacttcgttttttgttcaacgtccacgtcgttaattgactctggaatcgtcccaattgcaacgacattcataaagtagtcgtcattgattttccccacatctaaagcactggttttttctaaatctaattgttgaatcgcttcttcagggtccatcggtaaattcaaggctcgcgctaaatcgttcaccgttcctaaaggaaaaaagccaaattttgggcggtaagcttgttctgccaacccgctaattccttcattaacggttccatctccccccattacgaaaacactgtcgaagtgactttccgcagcttcacgggcaaattgttctgcatcgccgcctttttctgtttgtttcactacaacttcatcaaataactgctttaatttttcttctgctaacgtttcaaattctttggctttttcaccaccagaactggggttaacaattaaaactgcttttttcactggtaccactcctcattgatatctaaatcgtttgattccttacaattattataaaagatatttttgattctggcgaaaaatatgctgacacttgcttaacaaacaagcattcctgctcctcactacttttcaaaacgttctttaaagcaataggcaaaataatagaacaatttccaaaaatcttgccaaacttttggatccatccccgtcaattcatgaattcgtttcaaacggtaattcaatgtatttcgatggatatgtaatacttgtgaggtttcattgatgtttaagttatgattggcgaaaaaaataacggtttcatagtattcatcataaatcgtctggatggtttcaaaaaaatccaattcaatatgaaaaggaaaattaaaaattccttgaatgaaaaaatcttctgcttggtaaaacttagccttttctaattggagaaacgatagaagtaaatacgtgttttgtgcctcttggaccatttgttgaatcgtggctttttccgaacttatcacaaggtattctgttactggctttgttatctgaggtggttcagaagtaatcaccagataacaattttcccattcaaatatttcatgtccaggataataactggataataagcgcttgtccttggtcagtacacaatgattctggtcatctaattgaaggttatatagttccaacgcttcaagttttaaggcttctgagtaagaagaatcaacatgcattaagtgctggataaactgatttttttgtttcttctttttttcgcgttcttgttgtgtatttaattcttctgtcagtaaaagaacaatcgagcgcacaagcttggtaaatttgcgcacctcgtctggttctcctgaaatgcctacgacacctaaaatgtgattattcaaaataatcggttcattggtgccttttttctctaaagaagtatctttataaatttcaatattttttcgttcattgatggctctttctgcaccacgatggcgctccccaattcgagcagaatctccactcgcaataatttttcctcgttcatccataatattgatgttataaggaatatctgccatcaacttttcaacaattttatttgcttggattttgtctaattttaacattgctatcgccaactttctaaaaagcgagtagcgtttgggacataagccgcaatgacttatgtcccaaacgcttaattcttcagatcaacgactgaacatttttatttcagctttcattactgatgataccatggttagttcttagtcacaaggcaccagctgtaatgtacgagcaatattttcaacggttctttctaaattaactggtccatttttcaatgctgcttccaatggttcggctttggccaaaattccaaaaatagccgtcatcccttcttcatagaggacatccacatctttgccgatatagccagcacaagcgaaaaccggtttttgatacttcttggccaaacgcgagacgccataaggggctttgccgaattttgtttgaaaatccataccgccttcaccagtaaagacataatcagcggcttttattttttcttctaattgattcacttctacgacaatatcaattcctgggcgtaactgagcttttgtgaatgctagtaaccctgcacccaaaccaccagcagctcctgcgcctggcatcatctcaacatcaatgccgatctcttttttgatgatcgctgcataatgggctaagtttttatctaattgagccaccatttcttctgtcgcacctttttgcggaccaaagacatgagacgcccctgttggccctgttagtgggttattcacatcacttgctactagaacttcggtagcaaaaatgcgttgatcaaactgtgttaaatcgatctgcgccagtttatctaatgcaccaccgccacgtgtcaattcttgcccttccttgtctaacaaacgcgcaccaagtgcctgaatcatacctgcacccccatcatttgtcacgctaccaccaatgccgataatgattttttttgccccatgattgagcgcatgttgaatcatctctcctgtaccataagtagaagtgatcaagggattgcgttctgctgctttaaccaattcaattccgttggctttcgccatttcaatgaccaccgtttcttggtcacctaataagccgtaataggtttcaacgatttgatcaggaagcggtcctgccacgcgcactggtactcttgtacctcctgttgcatccactaaggaatccaccgttccttccccgccgtctgccatcgggacatgttgaatgtctgcatctttaaatacagctaaaatccctttttccattgccagacaggcttcttttgcactcatactttctttaaatgagtctggagccaaaacaaattttttcgtcatcttttcgcgcctactttccaactagtttaaaataaagccatataaaatggttgcaacaatcgtcattaccccaccgacacacatttcataaggaatcactcgaattctttctttaatcgtcatattcatactttgtgccgtaatatggaaataattgccttgaggaacactatcaatcacagttgcaccagtatgcaccatgactgctgctgaaagtgaagatgtgcccatatctaaaatcgctggtccaaaagaacctgtcgctaaaataaccgctgtggatgttgaaccaactgctaagcccattaaaataccagaaatcggtgccaagaaggttccagaaattcccataacagaaattaagtggacaatttgtgttgataaatcagaaacagaaattaatccagcaattgcacctgcaccaattaaaattaaaacggtatcggttactctcttcaagccagaagatgcataaaaggccagttgttttgtttgcccaatcgcaattgtcccaacaactgaggcgaacggcaaaatatacagagcatcaatattcaaacttttgatgaaagaaatatttaaaacggcgccaatcggattaagtaataataagacaatcgctaacactggcgcgatcaacgcctttttcaaaggtaataattcttttgtttgttcctctacaagatctgtttctttgaccattgatcctttgtttctcatgatatttgcaagaacaacagctgtaattaagccaaatacggctggaataaagccagcaatcataacgtcacttagaggtaaatcaaagccattcgccgctgcaatagtatttggattaggcgaaataatattgcccgctttgccgccacctgataaggcaatcaataatgataacttactgatacccgtacttttcccaacagatagagcaatcggggcaacaatcaacactgcaacaggaatgaatacgcccactgctgtaattaccattgtggataatgccaaagataaaatagcttttttctcgccaagcttttgtacaatggcgttggcaattgattctgccgcaccagattccatcatcacacccgccaacatgccggctgctaagacacggattgcggttcccataatactttgtgttccgtttaatagaacagcgactgtatctgacagggaagcgcctccaataagacaaccaacaattgcaccaaaaaacaaggaatacacaggattaaattttttcaaaattaatactatcgctacaactaatcctaaaattgcagcaacccaagatattgtaatatctggcattcaaaatcagctccttaaattgtttacgctttcattctatcaaagtcctttctttttaaaattgtaaatttaacaggatttattgttcaaatgcacaaaaaaaccgttcttaaagaacagttttttgaaatctttttctatctttctcaataatgaccaccaatccaacgaacaaaagaacactcacaattaacaatactgccgttttattatatccatgaaatagcktcgcctccacatgcgtaaagtattgaggaaggaattacaccaatgaatatagcggctattaaattttttaatggcaactgcatagtatctgcagcaaaattaatcacagaagaaggaataattggaatcatgtagcccaccataatcccaatttttggatgcttcatccgtcgaatggactggacccaatgattggtctccgtttttttatctaaaaattttatatgatgcatcaaaaagattgcaaccaaatttcccatactattccctaaaacgttaatgagtgtgccgctgaagggaccaaaactcaatcctgcaatcacaccaattactgaggtcggaatccctggtactgcacacatgatcgcggtcaaaaaaaccaacaatagcgctgctgaaaaaccatgtgaacgaattcgctctaataattgtgtcttactggctttaggattcaaaaataattgaatatctgtttgatattctagatacaaacggtaacctaccagcaggattaaaataagcccgctactgattagtagtattcggattgttttcctcttcattttctttgctccttttatgctttatacaaagtgtagcacaggattctttgtgcctcaattagaagcttgtatgaataaaagccgcccctaaaagttagactaaaaatctaacttttaggggcgattcgaaagttacgaagatactttttttatttccgatacatcttaaactccaagaacagatcgttataaattcctaagtattcttgacctaagtcttggtaaacttctaaatgtttgatagtttcatcatctggataaaattgtttatcttcggcaacttcttttggtaatagttttttagcttctttatttggtgtggaataaccaatatattctgcattttgtgccgcattttctggtcgtaacataaagttcataaatgcataggcaccctctttatttttggctgtcttaggcatcacaatgttatcaaaccagagattagagccttcactgggaatcacataatgtagatgttcattgttttctagcatttcagcagcttcaccagagaaagttacagcaactgcactttcttcattagccatgtacattttgatttcatcggcaacaattgctttgacattgttcgttaatcggtttaacttatcggtagcctgacgtaattgttggtcgtttttactgtttaacgaatagcctaaactgttcaaagataatcctaacacttcgcgagcgccatcaatcagcatgacattattttttaattccgggcgccataaatcatcccaatgttggatctgacggccgtcaataaatttatcattataaataatccccaacgtgccccagaagtacggaacggaaaacttatttttgggatcaaaggattgatctaaaaagcgtgcatcaatgttttctaagccttttaatttgctgtgatcaagtggtaaaagcatcttcgctttcatcattttttgaatcatatattcagaaggaatggcaatatcataggctgtgccaccttgctgaatttttgtatacatagcttcattagaatcaaaggtttcgtaattgactttatagcctgtttctttttcaaatttcttaatcaaggccggatctatatagtccccccaattgtaaatggtcaaggtatctgctcctgccatgccacttgctttctccaattggcgcacgccaaaaaacaagatgacaataatagcgataattccaataaaaagtgactgtaattttttcattttaacttggccacctcactttgttcccgacgcattttctttaaacgttttggcgtattgtctttactgataaagtaataaccgacaactagaatcattgagaataggaatactaacgcacttaaggcattgatttctaaactaattccctgacgtgctcgtgaataaatttcaacagataatgttgaaaaaccattgcctgtcacaaagaatgttacggcaaaatcgtccaacgaataagtaaaggccataaagtagccagcaataattccaggcgctaaaaaaggcaaaataatatttttaatcacttgaacattattggcccctaaatcccgtgccgcatctaccatagaatcgttcatctcttgtagttttggtaaaaccattaaaacaacaattggaatactaaaggcaatatgcgacaataatacacttgtaaaacctaaactgataaaccctactgccgtgaagaaaattaagaaactggctccaataataacatctggtgaaacgagtaaaatgttattaaagctaagcaacgtgttccggtttttacgacgttttgtataataaatccccatcgcaccaaatgttccaatgatggttgctattaaagccgataagaaagctagcaaaaacgtattcagaacaatggttaacaagcgtgtgtcttcgaaaacgttccgataattatctaacgtaaaaccagtaaactgattcatcgtttgcgtgtcgttaaacgaataaaaaatcaaataaaagattggtgcgtacagtagcgcaaagacaacgaataaatacacataagaccatttaaactttttcttttgcattatttgccacgccctttcttcttctcacccgtcagcaacatcacaataaacatggcaacaattaaaatcacacctattgttgaacccatgccccagttttgcgttactaagaagtgttcctcaatcgccgttcccaacgtaatcacccgattgccgccaattaaacgcgttaacataaagagcgagagcgaaggaataaagacagcttgaacgccacttttcacaccgtttagggagagaggaaaaatgacacggcggaacgtctccgcactgctagctcctaagtcccgactagcactaatcaatgaaggattcatctcttctaaggcattaaaaatcggcataatcataaatggaatttcaatatacgttgcgacaaataaaaaactgaaatctgtaaacagaatctggtgcgtacccaaacccataaaactcataaactgattgatactcccatgaatactgaaaatcccaataaaggcataagcttttaataataaattcacccacgttggtaaaataacaagcattaaccacaactgtttatgcttgagctttgtcaaaaaataagccgtaggataacttaccaataacgtaaaaatggtaatcagaaaagcataccacactgaattaatggtcatacttaaatacgttcctgatgtaaaatacgtttggtaattcgccaaggtaaactggccattcatatcgaaaaatgattgataaataatcattagcactggcgcaatgacgaataaaagtaaccacattacatagggaatcgaataaattcgacgcattgttttcattttattttcccctttcgtttactcgtcgtaactttctaaacgggcatcaaagtcttcttctgattcattgaagcgcatcacgtgaatatcttctggctcaaaagagagccctacttgagcgccttctttggcttttcgagtggaatgcaccatccattcgtttccttgttcatcaaaacaaataatttcataatgaacgccgcggaataactgcgtgtccaccgttacggttagcttgcctttttcaagcgtggtaatcgttaagtcttctggacgtaaaacgacttctacaggttcatttttccgcatgccgccatcgacacattcaaactttttgcccacaaatgaaactaaattatcttccagcatcacgccatccacaatattactttcccccacaaagtcagcaacaaagtgattaatcggttcatcataaatatcgactggtgtgmcactttgcacgatatgacctttattcatgacaaaaatttcatcactcatcgctaatgcttcttcttgatcatgggtcacaaaaataaaagtaattcctaaacgttgttgtaaatcacgtagttcatattgcatcgctgtgcgtaatttcaaatctaaagcggataacggctcatctaaaagcaatacttttggctcattgacaatcgctcgtgcaattgcgacccgctgacgttggcccccagacatttcactaatttcacgtgtttcgtagcccggtaattgaaccaaacgtaatgcctctttcacttttttttcaatttctgctttggatagttttttgatttttaaaccaaacgcaacattatcaaaaacattcatgtgaggaaacaaagcataatcctgaaacacggtattgacttggcgtttattggcaggtacatcatttattcttttaccatcaaaataaacatcgccagaagtcacgtcattgaatcccgcaataatacgcaaaatcgttgttttgccacatcctgaaggtcctaataacgtataaaattttccttcttcaatttcaaagctgacattttttaatactggttcatcgtcaaattgtttgacaacattttcaaatgaaatcacatggtttctcactggataaactcctccatttcgtcctttataaatacgattctgtcgccacaattaacgcacgactttttcctcgaccattgttgctaatttggtgaggttctgttgcttggtaatacatggtttgaccttttttagcaatatacgtggcttcccctaatgtcaaacgaatggagccatcaatcacataaataaatgtttctgatagagaaggttcaaacgttttgtattcgccatttttatcaaaagtaataatgacaggttccatttctttttcattcgaggctggaattaaccattttagttcatagccatgttcttcatcataatagagggtactttcttcttcattgtagacaattttctgttcaagcggttgctgactaaaaaactgctctggcgtcacgcctagtacttctaaaattgagaaaaatgtttccattgatggtgagcttaaatcccgctccaattgggaaatatagcctttggataaatccgttctttcgcctaattcttcttgtgttaaatttttctgaatgcgtaaatttctcaacttctcaccaatttccatggcacacctcgtttctattttcagctaatcttttcaacaaaagttttgtaatac

SEQ ID NO: 99 - DNA, 3905 bp; double-stranded, linear
gaattatttcaattacctgttgactatcaagatgaacgattaacaactgtccaagcagagcgtttcttggtggagcaagcagatgcttcaagagccaaaagaaaaaaagtgattgataaactagcggcagtaatgattctacaaaattatttagatgcacatagccgataattatcgagctttgaatacatcangggagagaagaagaatgacagaacataaccacgatcatgatcacgaggacatgaacacattactttagtagacgaacaaggaaatgaaacattatacgagatcttactaactgttgacggtcaagaagaattcggtaaaaattatgttttattatatccagcaggaattcctgaggatgaagatgttgaattgcaagcttactcctatgtggaaaacgcagaaggtacagaaggcgatttacagcaaatcgaaacagacgctgaatgggatatgattgaagaagttttcaatacattcatggctgaagaagaagagtaaaactgtaacgagagaagcgctacttctcctattgagaagtagctttcttaataataattgttataatgtacatgttgtttctatcataagatactatcactatcattgagtgtgatggataaagaaggacagcattgtctagttttacaagatgttgtaaaaacgtaacatccttgtaatgacgttaatttagtaactatctagcataatttataatttgtgttatactaagtatgaggttttagtaatactgttaatttkakaatattaaataaaaaaatggctccacctactggcataggtagagccgtcagaaattcagttaaacaaacacgtaattattggtgtggtgcattgccacgaactgaaattccagttaataaagcaagtaaatcaaacatatatttcacctcctttattatgatagcttcattataacattatctgtaaaatgatggtatgtttaatacaaaaaaaatagaaagattggagttttgactgtgagagtagcgggagaaaaaatcaaaacagcgcgtaaaaagaaaaaattatcgcmagctgaattggcaaaaggaatttgtacacaagcmacaattagtaacattgaaaacaaaaatgtgtgtgacagtttagacattttctcatctgtatgtctacgtttagacttacaagtagaagaatgtatcgaaggttctagtgagaaaaaactcgaaagcttattaaataaagtagaagaattatgcttttactttaagcacgatgaagcctatgatttgttgaaagactatccagatgatatcgaaagttcaaacagaattttagaaacaaaatttttctattataaaggaattacgagtttattaggtaagaaaaataatagcgaacattgttctatttacatcgtggttctgaaattagtcgtgatattaatatttataatattttgagtatgaatgcgatcggtattttatatgaattagaagatgatattgaaaaagcaaaagtttattacgataaatctttacaattgctaagcgaattcaaattagattatccattagagcaatgccgtatttattataataccgcaaaattctattcattaattaaagactatgcaaagagtattgaattaagtgataaaggaatcgaaattaatcggacgcacagttctatttactctttagattgcttattatacgaaaaagcgtttaataaacaaatgctaggactagatgctgttgaagattatcgtattgcgtactactttacacgtttctttgaaaataaaaaattacttacttatattgaaaaagatatgcaagagtttaatatcagttttaaataataaattattgtttcagattttaaaaagaacaacctaactcaagaggagttaggttgttcttttttctctttttaatttgtttctttgacagcgttacggacgctttcggcgacgacttttgcgactccttcttggaatggatcgggaataatattagtcggcgtgagttcattatcgggaatcaattttgcaatacctttggcagcggcaatttgcatttcaatcgtaatctttttcgcccgagcatctaaggcaccacggaagataccagggaaggctaacacattattaatttgattcggaaagtcactacgaccagttccgacaatataagcgcctgccgctaaagcttcatcaggaaaaatttcaggaactgggttagccattgcaaaaataactggctgctcattcatctgttgaatccactcaggttttaaaacacctggtgccgaaacaccaacaaagacatcagcgccttcaagagcagtagctaaatcaccggtacggtgttcccgattggttagcttcgcaatttctgcgtggtgtggtggcagagctgtatctgtttcgctcagaatccctgcacggtcaacaatgataatatgttttacgccagcagctaaaaattttcttgtgatcgaaagaccagcggagccaccgccgttgattaccacatgaatgtcctctattttcttgttgattaattttaagctgttgtacaaagccgctagaacaacaatcgctgtcccgtgttgatcatcatggaaaacgggaatatctagttcatcgattaaacgctgttcaatttcaaaacaacgaggagcgctgatatcttccaagttaatccccccaaaggttggagccaaaaatttcaccgtttgaataatttcttcggtatcttgtgtatctaaaacaaggggaatcgaatccacaccagcaaagcgtttaaacaatgcagcttttccttccatgacaggcatcgctgcttcaggaccaatgttacctaaacctaaaactgctgaaccatcactaataacggcgacggtgtttttctttgtcgttaattcgtaagcgcgttcttttttttcatgtatggcagaagaaacagccgcaacacctggtgtgtaggcaattcctaaatctgcttttgtttcaatcggaactttagggcagacttctaatttccccccaaatttttttgcttgctcaatcgctaattcttttacatcttttgttgacatatcattttcctcctaaataattcacttatagttaaaaaagcattctaaaaatagcagtcattgttattactgtaatggcaccgcctaaacgtgtcgcaacttgtgcaaacggcattaagttcattcgattggctgtacttaaaatagccacatcgccagtcccacccataccactctggcaagcggagacaatggcagcctcaacgggattcatattcatgaagcgtgaaacgaaaaatcctgtagcaataaywgtgaaaacgacactaattaccacaacaaaatattgccagctaagcattcctacgacatcttttaaaggaatatataacatacytaagccgaccattaacgggaacgtaaaattgccagagataaatttataaagctgttttgatccgcgttgggtttctttcggtactacgtttaagtattttaaaaaggctgcgacaacaatcatcaaaacaggaccaggaaagcctgttaagtgttgcaataaaccgcctgtaataaataaggtacacgcaattaaaacaccagcgcccattaattttacatcaattggtgctttgtcttcttctaaagcatcacttaaatcatctgaattggtaattttaatcaactgaccttgtccagaaagttcagggcgtttttctcctaaacgactaagtaaaccagaacacataatagcaaaaaaattaccaataatggttgcgggaattaattgccccactaattgttcacttggcaatccagtaatggccactataaccaagggataaaggaagaatgccttcaccgat

SEQ ID NO: 100 - DNA, 32768 bp; double-stranded, linear
taaaaagccccttagaatcataggtntttttgatggttgtaattgttgatgttttcttnaagttgtaaagatttgatttaatagtgatcgtgtcacctaattgataatcttcacctaatttaaacagtttagagcttgtgggaacctcaccacttagtgttaaaattcgtttacgttctgaaagtttgttattccctctatttttcaagacttcgaggtattgtgaatctgtcaaagtgacctcgtcagttgtcttttgtaagtctcgagcatctacgtataactcttttctttgtagacctgttttctcgttacccaccactacacttttacgttccgagccttcaccttcaccgaaaacaatagcggttgaagattcatcaaagttattgttctgataccccgcttttgttagattttcgtattcgtctgaaaactcaatcgttctcgaaacatctcgacctttaaaaatagataacgtattaccaggaacgcctaatttagtagctgtctctcttatcccaaaatcgtaggatgtgcaaagagtttccacttcttcggctacgacaccataactattctgatactggatagacgtattccctaaattagctcgggaatccaattttaaatattgaatttttctttttacatccgaagggtttactacttcattattaagatgttcccaaacaatttgctctggcggtgccgttttattataaattcggtaaacaatacgatctaatgatttcccaagaagtgatttccccgacacctttatttgtgctgttgcctgatcgtctacaactacggcatcaacatagaaatagagcccttccatataaataacagtgtctggaacaaatatttgtatattttcaggtgtcaaaccaacaaacagctcaaacgttgaataggtatagtaatttaatttaacagttaaacttttaaacccatcaaatactttttcggaaataaatttccattgattatctcgatcctgagtgaaaatttctaactccattacacaccacctaccaacggccggaagtcaagttgtacaattacgttaccaataccagtagtggctttcacttgaaaatagttatcacccttttcaagctgcagaaaggtagaattagggtctcgcaatggcatagcgttagattcaacaccgtttgggtccgtcatgattgcttctttctgtccacgagtagttaccagtttaaacttagtacctgcttcaaatgaacctttaaatcggaaaaattcctgagtaattacgttatacacttctggatcggtagcttctgcacctaaagaaaaatagaacgtgcctcccactgatacatcaccatcattggttacaggaacaatctcaccactttttagtgtagcaaactcataccctttcgttatttctaacggccacatgtgtttttttgtggcaacggctaggggaattaacgtattatatttactcatatcagaccaatacggatctaaagctagaaaggtacacgtaaaagcctgtgtaatatttttagctggatctggcaggtcgggagcttttactactaacacatcaatttgaaactcacgatcaaatactctgtaaatcaacgtacctggtgttttgggatttaacgtttttatcatttcatgctgtaaattgaaaagatcctttgttcctctagcaattatttcaccttttatcgttaaatcgcgcttatctaaacgctccgaaactttaataacaccatctagtccatattgttcttctgttatgatcttattttcaacagctccgaagcctgttttacttttaacggtaaaaggtggttgaacaccgaaactaatcaaagaaccttccgagttcttgtatataagttcgtacatccaacctacctcctatcttctcagtgttgcaaggtcttgcaacttgtattttgtttctcttgcaatttctctaggcgttaaaggctcgggacttgtaatatattgtgtaacattgatatctccgtctttttgttcagccattacacctctcactgcagtttcaacatatcctaacagcgtgtcaatcggtgcgacagcctcagcccctgcttctccacctatcattgcgttatttccgttcatgccaaatatggtaggttgcgtcatgataccgccgtctttgtaccattctatgcccaaacttggtattttacctttcaataaatcgcccgcagaccaaccggccggactaatagaaaagtgaggcagcggaattttcggccagctaatattaaagttaaagaaacctttaatcgcatctactacatttttcactagatttttagccgcattcattggcccatcaatagcattttttacaccattaaagatattagaaactgttcctgtaataccaccccatacatttgaaatagtatttttcactgcgttaactacattactaatagtatttcttacaccatcccaaatagatgaaacggtatttttcataccgttaaataaattcttaacggtgttcaccgttgcactaacgatattagacacggtcgatttaatactattccacaccgtggatgctgtatttctaattgcgttaaaaatgtttgtaattgaattttttaaagcattaaaaatatttatcactgtgtttttaacagaagtaacgatattggaaatagtcgttttaatactattccatacactagaagccgtgtttctaatggcattaaaaatgtttgttatcgtgtttttcatagtattaaatatcggtgtaacaaagttaaggatagtctgcacaacattagagattgttgttttaatagcattccaaacgttagttgctgtgtttttaattgcgttaaagacattagtaatcgtcgttttaatagcattaaatataggagtgacaaaatttttaatagccgtagaaactgaagtaactgtatttttaattccgttccaagcgattgttacagagtaaacgacagcatcccatatctgttgaaagaaagttttaaacgcatcaaaaatacccttaataactccaatgaaaccgttaattattcctgtgacggtatcacctattttttcccatacaccggtagcaattgcttttatgagatcccatagatattgaaaatacgctttaaaaccatcaaaaatacctttccagatattaattgtattaacgattatcgcccctactacagcgtatattacattccacactgtttgtagaaaattcttaatgccgttaaaaacgttttctactgtttttttgaaaccatcaaatgttttcttgccagcatccgtgaatttcttccaaatttctgagactttagcggtaatatcattccacgtttttactaagctaccttttaacccactagctgttttaacgattgaatcccacgtattttttataaaatcggctataccattaaatatctctactgctttatctttaacggagttccatgtatcaactagaaacttagtaaaagatttccaaatcttttgtcctgtttcagtttgggtgaaaaaataaattaacgccgctactaaccccacgattgccgaaataatcaacacaaaagggttggcgtttaacactgcgttaaaagctgtttgaattgcagtataggcttttgtgacacctgaagctattttagtagctgttaatacacctttcatgataattttataggttgctaaggcggctcctactccaactataatagcttttaaagaactaaaaatagctttatttttagttatagcctttgtaaaattagaaaaagcagggatgacattatttacaataacctcactcacagctcctgatatgtcccaaatcacctctacgattttttcaatcgcaggtaatactactgtatttattgttttaaatgcagatttaaaaatttctatcgctttaggtactacagctgtgaaaatatcggcaaaagtaattgaccatgtactaaatactcctgccaatttcgtaaatatcatagacacttgactgcccgtatcctcaaaaatcccttttatttcaggcagttctttttgtacaatctgagctacattttttatagcatcactaatccacttaaaagcccactgaagattcatcacaaaacctgaattttgaatgccgttaaatgcatccatagccgatttttggaatcccccaaagtctggtataactgcagctaccttatcacctaagccacttaagcctttcgtaatgctttgaataatcgaaacgaccgttcctaaaataggagtgcctatttttgctaaaaagtcctgccacgcttgttttaagttacccataacgttttcatatccgtcggcttcgcgagcagcctgtcctacagctccggcttgtttaagcatgttgctagcataatctaaacgagtagcttgtttcgtcgcttcatctaaattttgccaatcttttgtagaacctactactccctgagaaatagcaaactgcgccatttgagtatcatttgcaaaaatccctatcgcttcaccggcttcgtagtttccttttagaaacgaagtaagagaacttgaagcatcttccagtgaaacatcatagaaagctgcagcatctgccgctaaggtagttgcttgctctgatttcttcattgcggcttctgtatctagccctaagcctttaaacattgaagtaattcgagaaaatgtcggctttatacggttaggtaggatattcatttttttacccatgccatctaccattttttgtgctaatggttctaacttaccaaaaacctgggtaaattgtgcattcaaagcttgtgcacttgccgcggcttctacgcttagcttcccaaaattaacgattttttctacggcaaaagcagcaccaattgctagcgctgcttttttaaagaaccccactaatttacttgttgttgattgtcccttagattccgtctcgtccaaagccttattggcttcaccattatcgacaccgattgtaccaaaaagcttgaaaatttcgcccattaagacacctcaccttcttttcgaggtttaacaaattgactagcaaaatctaatgctttttgttgttcttcttttgtggtagatttcgctttatttttacgtaaaggtctgtatttttgttggtctttaaattcttttaaagactgcgtcatctgtgtgtgtaaccactgattgtagattttttcttcttgttccacttcttgaacataaaaaataaattccattaagtcacacaaacgataggtacgaagtaacgatatcggatctccgtaccttttgaacaacaaatctttaattcggtgttcgccgtcttttatttcaataagctggcgatagaagagaaaaaatcagctagttctggtttcttaaagaaatcgactaataaagtcgtatactcctttaatccaagagctgaaatttcttgtatagaaacgcctgttaactctgctaaaagtccgttaatatcactcttaatatcttttaagttaagcatgactttttgcaacatcgctgcgcccatttcaatgccacgcttagtagcttctttgtcagctttttctttggctgcatcaatttttttctgctctgcttttgttggctcttttgatttgtggtccaacggtacaactttttcagcagattcaatatttttttcaaataaattgataaactcgtctttcacatcaagctttcctatgatggcaagtaatgtaaataagtcatcaccttttagttcacgcatttctaaagtcattttgttattcctccatgtaaaaaagaacgactgataagccgttctttaattatttcagttcgtctaaatttgttatttggaaatatttgattcctcaataatctacaagctctcagttagctctataggatttttcgatgtacttgggtaataaatacggaatgggaattcgtcatttattagctgttcataagaagcgttagctgtgatttcctgttcaattactacctctttgccatcctctgttttaatttcaagtccgcttttcactaatccgttatctaacgcaacgatgataggctgtttcgttccattatgaatacccacaacggccatgttagggatatagtccccttcttctaaatagcgtttaggtttaataattttataaccagcaggtgcttcatctgtagtagcatctgtcatcgtagcatttaatgatcggcgtaaattttctgctgttaattcaatcaagttggctttcatcgtagctgtggctgattcaagcacattcaaacctactacgtccataatataagcaccgtctacttccactttacggtaagaaagttctgttttgatttctacaccaccagaagttgcccccatgggaataccggtaaactcctctttctctttatcgtatttaaaatcagtaaatactgtcgcagaatcaatgacaaaattgtctgcggttgtttttgtataacctgttttaggtagtgccatattcttttttcctccaatcgaccgctacataaaagcggacatttcttctttttaacagctcttcttttgttggtattttatttgatccttgaaaactaaaaatgagatttagttctggagttagtacccttttgtaacaaagagctgttttaaacttgtcttctagaacaagcaagtttaaaaatgaattatttttgtcaaaaatatcaatatccagataaaaaccatcttgatttctacgaataggctcggaatcaaaatcaaaggtggcatatggatagatgacctcttttcgaggattcgtttctaaaaatgtttctgggtgtatctcttgtaagattcttaccagctctcgtataaactcttccatcacttatccccctttaaatgtagctccgtattctttccctagaatttcgatgactttttctttattctgccgaaacgcgtttcttaaaaacttttgtggtttctgacctcttgtaaaatgccattctccatctggtccctcaaagaaccatccacctttacgtcctgagccattttcagcaaattctccggttccgaattcaacataaatggcgtattgttctggcgagccgacaatgccgaccacttttcctccaacagccttaagttgatagtctatccggtcccgcaactgtcctgtttcaactggcgcaccagactttgcagcagctttgataatcatgaggactttagtcatcccccgttctgccgtcgcgtctaactctttttttaccttgtctttgtagctgataaatttaaagtcattcttcgccacttaaaacaccttcaaacttcaaataaatttcattgtgatgctttatgccaacaggattatcggaatacgtaatatcgtaataacgatttgtttgatcaaccactcgcatattgtctgttatcccctcaataaattcgggaataataagaatgtgtgtagattcttctacaaatgcgttctgtttcgttgtttcatctgttcctgtcaccaagtcgatatatccagaaacttctttaaacaagccccaatcgtcaataagcccgcctaatccgtcaggcttttggcctttgacctcttgtagaaaaaaggtttgaggtgagtacattatccccacctcatttttttatatttatttaaaaaactgaactttgctgcaggaaagccctcgatattantcactagcgttcacatcgtaatacgtgatagacattctagcgatagattctgacttaatgcctaactttgcgcccatcgattttttaaatcgtaaaagttcttcaatacccattttaatatctgctggatattctacttttgtaataaaagcaccagaaaaagagccatcaaaaaaaggctcttcaacatctgtttccagtgtcttttctgtgatagcttcaacagttgttaggcaatcgtttactttagaattactaatttgaatcgtatcacctactcgtaaaccaagagggttatcttttaacacaatagaattacccttaaaaacaacatccctaaagcgtatatgaacgttttgaaaattattattggttagttgcctaactgtctgttcgaacgcgtctaagtcactctgagtaaccgatggatcaattttttttgcttcttcaatgctgataatcaagttagccacctcctaagatgcaggtgtacctgttactgcaatagaggttgtaaacgcaccggaagtaaattcaaatgtcgctttaccttctgcaataattgagccatcaaatccaccgtttttatttttagtgatagtagcaacactctcattactagatatcactgtaattgctgaaattacagcttgtgcgtttgtggcatctactggattagctgcaatagtaaatgtcttagttgcgcctactgcacccgtccatgttttctgactaggcgtgatacccgttgctggattagtaggcgttacgctttttttactgcttttaaaatagctactttatttttttcagggatgtgtttaccatattttccagctccctggattgctactccgttaaaatcttcggagtcaatagcacgtgttacagaaataccaacgcccgcaatacctacgctatccgcggaaaattgagccatttccccagtttgtaatttgctttctggaatttcaaccaatacaaaacctttaaatttatatattgtttgttcatcaatgttagcacttgaatttttagttgttgttgctaaaccattgtctactaaaaaatcataaacatcagggtgaacataagcaacccaagcaagagacttagaaactaaattattcacaaaagtcttatgcgccgttgagaacagcttagttactccttcactggttaattcaaaccgaatcgtttcagaggctgcatcagataatgctttacctaataaaccgtcgatatactcagcccaagcaatcgcttgttcctctaatctttcagctactactgcgtcagcgtcatcgtttactgtgatattatccactccttcgtgaatcgctaacggagattcataaggaaccgttgtatcaatagatttaatttctttacgtggcccaaaacgattagagttgccagttcctgtaccaaacgctacgttttcaccagtgttgtagggttgcattaccacaggtgtatctgaagtttttagcatcaaaaatgtgtcgctatcttttacagcatccgacgtctgcaactctcctccaaacgcacgtaaaaaataagattttttctctgtaattttggctaataagcctgcatattgtttcgtgtaaaattttgtagccataaaaaattcctccaattactcgtattttgataagattgcttcaaatggatctttttcgtttggttccttcccttttggcagtttgttatcaattggttgatagcctgctttattttcagtcttttttttcgacttatcatcgagtgtatccttcttttcaaagtaatcagggatggaagctttcaagtctttcactttactttctaagtccttcacattcccatctttgtcaagttctaactcacctaatttaaataaagcataatcaatatccttagcccctgcactttgtaatgcagcagatacttggctattgattttcaaatctttgttttccttttccaacgcgtctgccttttcttttaaatcagctagttctttttgaacatccggattgtcctttgttttagcttctagcgattttaaggttttatttgcttcagctaactggcttgaaagattattatattggtcttttggtactgcatttacaggaaattctttgtcaatttctttattagcagcctccatatccaacgtaccatcttctttcatatgttttgctaaaatttgtttgatccattccatcgttttctacctccatagcatttatatagcggtcgctgccgcttagagtgtcagaatataccgtctgctcggtagcggtgcccttttaacgtcatggctcctggacaaaataaaaagacttatcaataagcaagtcttaactcctcatatcatctaatacttgttgttttgctatatctagcatgcctagcagctgcaaacttccattttgactgtaataaatagtgacctctccatttggccgctgtacaacaattgtggcctgttcaaaatcaggctcttggcttgatacccattcgtaaaactcttcgtagtctacatctaaacaagcgtaaggatcttccatcttatggcctcccttagatataaaaatagcactcagccgcttaatgggtgagtgctactattcgttataattatctgcatccgcttgccatctatctagcaaagtgggttgattaagtttatgttgttgataatattcctgtctcaaccgctcacgttcctcaggcgttttcgctgtgtctagcagcttatataactcatcaaattccttatcagtcatctctaaagcgctacgcctataatccacatctaccttacccaagaattgtcacctccaatatattatcgactatctccactgtatacttcaagtttctgttcagtaggaattcactttcctttttcatcgaactgttcgttcctatataagcgccttgcgttcctttaggaatcaggaatttaactactctaccatccttatttgcactggtaaaatttaaaaaatcctcggcaacttttttgttgatactagtagacttgaattctttgaatacatttccgttcagaatagcatcgtattcatttgcagatacacctctataagttattatatcatgtttcaatttaaatttactaatagcatcatctaaattttgaataatattgacaagataaggtttttctcttggattatatttttcatttcggagtatcttattcattttagcaaatgcgtctgatgtataatctttcatagcattaacttgttcaggcttcaatccagcaacccatttatcactatcatcttgcagatcagattgaccgaagaagtccagctcagtaaaattcggctttggtttcgattcattttgtctgattctatctgcataccactcatcatagcttttaaactccgacatctctttagattcattatcttttctaagttcagggctgataccgtcgacaacttcaattgttgtacatcggcaattcacatcttctgatgctaccccaaacatccgcggaccttttgccgaatgccctctaatggtaaactcttcgtctacatcaacctctttaccgtctaactcttggtgggttcggcgtgtatgtttatcgatcgtggcaagccatttctttttaatattgatgcccagctcttttgcttcttcatatcctttttgggtagtgacagactgagtacgtcctgcttctgttcttgcaatacgtaatgcttgtttgtagctagcttctgtttcctcattaatccatctagctatttcagcataacttttaccctcgaataagcccgttatgatattgttagtcacattttgggctaattcatcacggtacttgtataaacgctttgagagcctcttacccgctacaggtgcattgacgagattcataatataatcatggttaattaacggcatacttagtgctatattctgtgactgctctagcgtataccacagtccataatatccctgttcagcttgttttgcagaatagcctttgatagttttttcaactttcggtgagtttaactgaagaatggcattaatttcatcagcaacactaaaaagtctctctacttccaaacgggtggaaaaagaaagactttctgcattttctgtataaacttttagccgctttttgatgtcgattaatgattgacgataaacattaaatagctgattatccgtttcctggtaattggctttctgtagagcctgtagctccttctgccatttgttgagttgggacatttggggtcaccgccgtttcttcttcatcggtgttgtccgtcaaaccttgcgtatattccgcctcttctaatgcctctttcacgtcttcccagtcaaggtcaaactgttcgcagataaggcgtaaaacgttgtcgtcgtcaaggcgaggtgctacttgcaagatagattcaaggataatttttcttgtctctgcttcggttttctcattgttaacaatatctgtttcattcaccattacttctctagtaaacgtaaatgaaacttctgttgggtcaaatgctttagtataacgacgattaatgtcatcaataacaagcttattcatccattctagtaaagctcgtagtctggcttcagtcttgttggctttcatgtttaatagtgtataacgtgcttttatcactatgttggtgatattcccgtcgcctacttgagttgaatcaaaggccattccaaacttatagatattttctttgtcaatctccattttggttttacgcccttcagttggaatcgttactgttttaacatctaagcccccatctgaaccagtaccaacaacctttttagatttaacattttgtcttaattttgaaagatcgtcaccttggaaacctgatacaacgtaaatggcttccgcaaaatcttgtaaattgtttgataaaaaacaattcattaagtcgtaatcatctatcagtgccttaatagactttaaatccgtcgtttcctgtttattatttgataaccgataaaaaggtatttgtccgtagcttcgttgcaataagctttcattatcgctatcaactgctaaaacatgtggccttggattaattggttcagcttcatctaattcataatctttgttatcctcagctacgaaaaaataaacgttctggtcagtccacacttccgcgtgatggatatcgactgtctcgccgtctttctcgatttcagtgatataatgacggcaaatacgttgtaattcattgtattcattgtatacaccaaacacgtttaaactatcagccacttgaaaacacaatcgatcttctgcattggttcttgcataaacatactcaaaacctttttggcttgaaccttccacaagctcttgtagcactacttgaaattcagaattgtaatactctgctaaatactctttaagttcttcgttttctgtttcgtattcaacaggattagataaaaggtattgagttttttggtcaacaatttctgggaaaaagccgtgcgggattcgtacattcgaggcgtatttgtcttctcgcagtaccccctcatcgtctacgtaaaagatacgattgttcatgatatcattttcatggttatagtaccgaatacctgtctctgcctctctttttgaggtagattttcgatctttgtcaatcgccgcctttaaagcactagcgataatcttcacgtcttcactaagtaaagcttccatttacagcctcctttctagtatagccatttatttgtgttcttaatttctctaagcagactagctgcactgtctggtgcgtcgtcgtgctctgcgttctctgtatagtctagtatctcggctatatattctttgtctgtgtcttcaagccaaattattcggctccaatacttccgcaaataagaagatatcttgataaacttatttgttttttcgtgatacttttgcacgtattgacttcgttcgattaggtgtttagctaaataacctttatcgccgttcgtttcagtgtaaaatgttccagcttggtagtattgatgtagttgcaatatttcaggtaggcaatcatcaacgtgtttctgccatttcttgccaaacccgataatggttccgtccttttgctctttaaaaatggtaaatgctgtgctatcaccacctccgtatgccgcgtcgatgtgtgctacaccgttataaataaggttagtgttatcgatataggtcggtgcagtaaatagcgattcactatcagcgatgtgttttaactcgtagttcgctgcaaagagcgacggtgtcatagactgctgtaacgctttacgttgttctttgtcaattaatcctgtttcgtaacaatcgaatttcttgacgttaggcattttagaaattgcatcttccttatgccaaggcgtgcctgtgttaataaaacggccctcacgattcttcacattctgcaattcttgatactgcagctttgttttctctcgttcagcacgacttactcggtctttaatgttaacaatatcatcagtgataacgatatccgcgtgtttacctgttaatgaagcataaatccccataccaagtaattgagatgttccccgggtagatgtttttaagttggtatctatttctgttgtagtctctttcaaaagcaccaattcaacaccatataatgcaaatacaagcgttttaaagtatttgctagataaaaccttagccacttgtaaaataatctctacgacgtctgtatcggtcttacgtaagaagataatatttttgttgggaaaaagaaccatcaacaatgcaatagcaatcgccaatgtggttgttttaaatgagccacgatgagccaatagcgtttgatcgtctttctcgaacaaaaaagactttagccaatcattgtgcagttctgctaagtcggtaaacccaactaaatttccgaaaattaccgggttcgttttgattaagttcaagtattttcgctttttagggctcatgtagaatcatcctcgaaaaattgctcgatttcgacagctgcatcggagatattaagcacgcctgaaacttcagtttcttttcgatctcgccattcgtccggctttctatttttcaaccagaaaatagctgcagttggattaggagctacttgttttttaaccttttttgtaatttccataccgttctctgttagttcttctgtaacttcggtatattcgtagcctgtagcactcttaaataaagcattttcaacttgtctatcaacgacttcttttcccttttttaaggatgccgaaagtgccggaaatttttttacccattctctgaaagttgaataagctaccccgatattctgggctatctgcttatcgatgaggccatctcgtgcccatccttcgattttgattaacccttcctcggttagccactctgtgtacttcgccatgacctcaccgcctttctgtatcaaaaatagacaccttcccattttcttgggaaggtgccttttctgcgtaattttactgataacagtatatcacgatttatcaatgggaattgtcacatcattgtcacttttttcgattttcttcaaaatctggttatgtttatttctgatatagccatagctatgcccaaattctcccgcaatttgttttaacgatagcccttcgatatactttgctactaagattttttgatctaatcctttgaaactataaactagctttcgtaaatcgtaaattgagttcattttccacgctaaacgtttttctaagtcttcgataatatcttccaacttagaagctttggaatcttttgttagtgtgtatcttcctaaatcctctgggtcacaccatctttctaactcttttttatacgtttctagctcccagtctaagtaatagatttcttgttctaatttttgatagctgactaaccattcgtacaatgtactttcacctaccttcttgttcatcgctttcactattaaccgtaacttgtacatttttatacagaattagagttaataatgcggatagcaatataaatctaacatcatacggtatcttagctaatatcgaaataatccactccgacactttgtatatcatcatagctaaacctaaacataaccagaargatattaatttatccaagtttatcccccctatactcctcaattttggctttcactgcagccattagcgctgattgcccttgttcttttgcttgtaaagctttgattacttgttcgtcaatagttcctttcgtcactaagtgatgaataataacaggctgtgtttgtccttggcggtctaatctggcattggcttgttgataaaactccaaagaccatgtaagcccaaaccacacgataatgtgcccgcctttttgtaaatttagtccgtgccctgctgattgtggatgggctaaaagtaaagaaatttttccctcgttccatttctcaatatccccgtcagacacatttaaagcctttgcttgtttaaatcgtgcttggattctttctaggtcatgttggtattgataaaagactaaaaccgattgcccttgtgcgtcctctataacgcgttctagcgcatttaacttttcttggtgtatttcccttccgtcgccgttttcgtcgtatacagcgccgttagacagctgtaaaagcttgtttgatagtgtagccgcattactagctacaacgtctgttccttcgagttctaacacgtattcccgttctagctctttgtactgtttccagcttgtcgggttcaagtctagctcgataatattttccgttctcggtggcagtcgcaaataatcttttgctttcatactcacgcatatatcgcttattttgttgtaaatcgcttcttctgctcctgggattaattgccaagaatacacgatatgcccgtttttttgtgcggggacaaaatatttattacggtattgtgtgatagtctttcctagccgttcgccttggtccaataaatacatctgcgcccacaaatccatcaagctgtttggggaaggtgtgcctgttagcccgataacacgttccatcttcggccgtacttttcgtaatgctttaaatcgtttggcactacttgacttaaaactggataactcgtctataatcacggttttaaagggccagtttcgttgatagtaattgactaaccactccacattttcacgattgattaaatagacatctgcctttttgaataaagcttcttcacgttgctttgggtttcctaacacttttgaaaaagtgaggtgctgcagatggtcccatttttcaatttcatcggtccaagttttctcggcaactgataatggggcaattactaacacattttcaataatttcaaacgtgtgtaacaactcgtcaatagctgtcaaactggataaggttttccctagtcccatatctaacatcaaagcacagtaaggatgatcaagaataaaattcttagagtattcctgatagggatgtaacgttgctttcaaactcaatcactcctttttatgggacatatcaggcataactcttgctataccgctttgcattgcgtagattaacatatccactccttgcttgctgtcaatgacaaacactgggataagctgctctttgaatttctctataatttttaactggtcttttcttggtttacctccaggcctctttaattcaacgaaaaacacgttgccttgatataaaataatcctgtcaggaacacccctagttcctggggaagtgaacttataacataaagctcctatgcgttttatctgcctaactagatacttttcaatgtcgttctcaatttgcattacttcggcctcccatctgataagatattggttgatgtgttccatcagatctattttcttcaacctccgtttaaaaataccgtgtcacatgtaacacaaaaattcttcaacttatatatattccccatgtacatatatacatatacgccctatatatgtatattaattatttctatatatgaatagaaaatagtgttacaggtgttacgattgtncttcattcttactctcccaagatgtaatagcgtaacactccctgtaacaccaacgggaaataaggtgttacaggtgttacagtgaatattttaggtgtaacactcgtagcttttttaggtgttacacctaaccccgcgtcattactacctttttgttttaaggtgtaacacgtaaataggctacttgtactccatacccagggccaaatcttaaacgtcctttattacctttgctgtttttctcccaaccagataaatggcttaaaacttgacgaatttctgcagcttttgcaggatgtatgtttttagaatctccgttatacaattcattccaaacctctgcaatacatactttgtttctaacaatctcgccttcttcctgaatatccgtcccccacccctgaatatactctcgtctttcttgcttacttcgtttgtaccaatcttccgttattgggatttccaaatattcaaggatttcgccttccatgctagaggtttccgtgtgcatttcttgggcttctagtgctagtttttcttgttcgtctgttagatacaaaggttctcctgcttgccacaactcaacggcttctgcccatatctgattgcgcgtttcgtcggtcatttcccacactttatttttaatcggttgaatgccgacatctactggccaaaaacgccgatttcctgttttatctcttagaaactcgttgtcgttcgttgttccccaaaagacacaacggcgtttaaaataggacttatgccgaccgtaagcaacgcggaaaatgtcttcttgcttgctaataaaatgcttggtggcttcaatgtctgctttttttgtcgctgacaattcgcccatttccatgatccaaacaccttgcaacgcttcgtaagagtctttccccgtcacaccttctaagctgttagaaaaccagtctcccgccaattttgcaggcaatagcgtttttcctattccttgcggaccgctagtcactagcatgtagtcaaacttaatccctggcacaaaaatacgccctacggcagctgtaagaaattttttcgtaactactcgaatgaacggtgtatcttctgcgcctaagtagtctattagtaaagtttctacgcgaggcactccgtcccagtgcaagctctctaggtattctttcactggatcatatgagtttctttcgatttcttggactagcgcatcatcgattttgccacggttcacaataccgtaaattttttcgatatatacccgtaaccccgcatcgtcgctgtccttccacatcttgtctcgatctaacttccgccaaggcaagttgtctttcacctcaatacgattagaaaaactgttcataaaaattttctttttgaggttcgggtcattcagcataatgacttctaaatttttcgcggaagccataatctgaccgtattcgtcaatttcgaggtccaattttgtaaaccagtctttgtcgtcctcttccaattcgtctagctcgccgtcaaagtcttctagtgcttgtgacagcttttcactctgaatcaaggtcttaacttgcttgtcttccattgcgaactctcgcatcgctttaaacgatggataacggtcaatccgcgtcgtaggtttgacgtcttcatctaaatcgccaaatagatggatacggacaaggtcaaacgcgttcaccagttgatcgcctacagggtccgtaccgtgatgagaataagcgaacttatcatcataaatcactagcccaccactagtagaaccttctaaaaacgtccaacggtcctctcttcctgtggacccgtagatgtcaggcaaaaaggtttcaatcgctgaaatgatgtcatacgtgcgacaaaatgccccgacaatcccttttttctctaatgggtcgcctgctttttttgcttgtctttcgcggatagaatgcccacgggaactttctggccaaaaacttgcatctcgccagtcttcgtattggcttagaatttcgtcaggatcgacccacggcaaatcgatgttatcggtgaaatattccccgtctatcgaatgactgggccaatacattaaacgttctgcctgataggtcgtatcatcgaagttatccatgccgaaaaactccgcaagctttctcgctaggggctcatactcttcggcggtcactgggcgacttaacggaataatcaagcgataacgtggaccttttactaaatggctgtgtgtcgtgtagacagctgcagcgtggtcaaataacagctgtacatcgtcccaaaagtctaacgtcgtgctgtcggcatctaacgtaacaaggctacgctgttgcgtgtttcctcttttccgtcgtccttcttttaaccaaccaccaataaacgccccaacgtctttaacttcgccctgcttagactttggcatttttttgtagtcttcgacagtctcttgtgtcactgtcggcgttttcaatcgttgggtaaaatccgaccaagacatctgccgatttttccattttttctcggtttttgaagcacccactgcaagatggatttcaccatcataggctaatttgatgtttttttctggctgttccatctttccgcttcctttcttttattgtttaaggatgaaacctaaacagtcaagccatccttcttgatagtcacacgtagaggatttatgatcataattaaacgcagctctcattgctttaagatatttacgcttaccaacaacgtagcccaacaaaaagcaaagtactaagtttattagtataagtatgttatttcccatttattaacaatcctttccatattcgtactcgtaaattagattagttaaccagctataatctagctcttgctcttcgtcaaactcctgttcgttgacataagcagcaaaatctacgatattttcgatattttcctcatcataaaaaccccaactccaaatgaatgctttaacacgaacgagttccccaatatcttttttaaaaacaaaaacgggctcattgaccatttcaacactcatacaaaattcacatgtccccacttcttcttcgtgaggattagtttcaacatcaactagttttagtttcattttctatcgctcctttttctaatttttagtgattttcaattcccaatcatcgctatcaaaaaatacaaattctaattcctcaaaatcgtttgtattttttatcaaatctttaaatttcttatttgaacaaatatttccaaagcgttttaaaaagcggtgcttaaaattttcataatcactgtaactaaattcaaaaactttcccagttgaaaaaactccaccagttgtcagttctaactttacataatttagtgccattatctgaacctcctaatctttcatgtaatatttcgtttcaaatccttcggcgtttaacggcaagccttccgcccaatcaggaactacagacatgattttgttcatttcttcaatagatttttccccttctggcacttcggctactgcctcatcgtgcacatggaaaacaataggatagccctcacgttcaagcctctgcatcgcttctgctaaaacgtctcttgccgttgcttggacaatgttttccaccaatttaccgccgtaggtttgctgttccgtgaaagcgactttatcgccttgcccttcataaaaaatagcaggaccgtagtcaccttcttttaaatgcgcttttgcatacgctagttttcgtccgcttggtagctgaataaacaagaatcctgcttttttataaaatttcaacccacgagggccttttttaatgccgccgttttgtaaacagtcaatcacagctttttgggtttcatgccaaaagttcttaatgcgtttattggctgtacgccaacggtccacaatgtcttgtaattcgtgttcttcaatgccgttttctaatgcacccattgctttaagcgcccctggtccgccttggtaaccaagcgccaatgtcgccacttttccacgttggcgcatgtctttaccttcgtggcttttccagtcgtagtccgtcacttcgcctaaatggaacatctgcgccgctgttgcttcgtaaattttgccgtgtgtgcggaatacttctaatacccaatcttgtttggcataccaagcaatcactcgggcctcaatggctgaaaagtcagacacgatgaaccgatgcccttctttggcaactaaacctgttcggataagttgtttcaatgtgtctggcacatcttcatacattaattcgatgccttcaacatcttttgctttcacaagctgacgggcaaaatcaatttcacttaaatagtttctaggcaagttctgtacttgtaataatcgccctgcccaccgtcctgtgcggttggcaccgtaaaattgtaaaatgccatgaatgcgattatctgaacaacgtgcattatccatcatcagatattttttcgtgcttgaattagacaaactaaggcgcaattttaatacctccgccacattctcgggcaagtttcctaatgctagagcctttaacacaacctcttttcctaacttctcgaaaggcgttccttgttcttctagccactttttcagttgcgctaagctgttaggattttccaatcctgttaaagccttcatttcgtttaatcccgcttcgcttaaatcggccataatatcaatagcagccgttgccaattcgtggtcaatttctgcccctctgtcgttaatccgctgatccaaggtgtaaagcttccactcactttcggggacagggaagcgattcaacttattcgcgatagccatttctacattgacgtcttgaatacaatactctataaacgtttgccatttttcgggagcgtgttcaggtaaattccttgtacgcatgccgtttttcttggtcggcttacacggtttagaaaagaagttaatcagttgcgtacctcttgtgtctttttgctgttcgatgtttaaatatttcgcacattgccctaaagaagctggcaaccctaattcgtttgcgtgaaccatcgtacagtgccattgtgcagggtctaagtagtacggaatacctaaatacttagacaaacaaacgcgctcaaattgggcattaaatgcaattttaagcacgttcttatctgttagcgcagccactatctcgtcaggtatttcgctaattgttaagtcctcacattcgacaggctgaccatcaaccgaataagcaaaaagtaaaatttcaaagttggggctatcagcgtatttataaaccccaactttggttaagtcttcatccgaatacgtttcaatatcaatatttaacgttttcatttgctatcagccgtttcagatggtaaccgcaatttacttttatcaacggcaatcatcggaagctgtgcttcttcctctttaaaaacatcaacgttgatccctagctcttcaagataagccactccttgtttagcaggcactctttctacatttgcaataatcgcattgtacgtttctcttacctcttggatttcttgatcgtaaacagcttctactttcgcaagcccttttattgagttatacttaagtttttcaagaaaccctttcttataggtttcaaaatctctagcatccgtatcgcgataaaagctccatatttccaaactgttttcttctaacaaatcgacaagttcattttttacgttttggcgaattctaagtgagctgaaatatctatgcaatttctcaaattcaggatcaattttcagccactctgattcaatatgtgcacgaatagccttcgtctttttcgctcttatttctttttccactgaattttttaaagtaatcacatggtttcttaaacgtgctttagttggtttcattttttcctaccccctgatcttctactggtgtatattcttgtttgacataaaaattagtatctccgaattctttgaattcccaacggtgcaatctgacggattctaaacggctaccgttttcaaaatatatagaatccagttttctctcttcaattagctcaaaaacatcttgtaattcaataggcaaataaattggtcgtttacccatttcaatttctcctttcaaaagaaaaggggcattttagccccttattcaatttttagctaaacatatcgtcttcttcgtcttcccattctaggtcaccaaaatcggattcagcattggcacgaccgcctaagaagtcccctttacataacgttaaaatgttgtttagcccagcagtaacccctttgtttcctgcagtactgtaagcataaaagttaatagatgcaatcgcataaacacctgaatagacttcgtctggatcgtctgtttttacaagcacaccatcttcacgttttacgacttgtggtttcgttttacttgatacgttgataaacattgcgttttcaaattctgggcgttcttcggtgtccatttcttcatcgccatcgcgtagtagttttcaagcgctcaaatttaacgccttttaatttatccccttttgcgccttcataggctgttttgattgcttctttcatcgctttaagggtttccttatcgtcttttggaataatcaacatgcaagaatattttttctcttgcccttcttccatcgcatgaggttctaacacatgcacaaaacttaatctcacttgatttgtaattactttcgttccagttacttttgccattttaaattcctactttcttatattttttagttaaataattcgtcttcttctaaatcatctaacgaattagaagcttgttctgtaaaatactgtttaatgtccgagatgatttgttctttcatctctaaaatagattctttatagttttttaggttcattgtccacgtttcatctacaagcaatgagttagtaactaacgacgataacgccgcttcaatcgtgttaaaatatcctttaaataacactttattctcactgaatacataaagcccaacattgcgtgtatcttctcttgtgatgtaataacctttaccgctaaaaatcacaggcttttctttacatgatttttgaggcattttatcccccaccttctacttaaatacatccaaagtaccttcttgacgttctaagataaccaccgtatctgtcaccttaatatttacagggcgatttcctgtgctgttttcaacggtaacaataaccgcatttaaatcatcaaaaggctgtatgacagtaaattcatcctcagatacgttaattcctgaatgctccgctttctccattcccttttttagagttgaagctattgcctcttgtgtgtcaatttttttcatagccattactccaccccttcaaaatcattaagcgcattttctacgctgtttaacgctggtcgcttgtcacttkcaggaacaagaacaggctttccttctggtttgataatgaagtctgcagctaattccgcaaattttttcttgccgacaactttttctaattgcccaatggctttcagttcctgcggttttaaaatgtcttcatcttcaaatccttcggcttctaaaaccatcagtagcccttcattatctgaaatttttcgattacttcgcccagcaactactttccaaccagggaactcttcgccttcgtcccttgctttctgtaaagcgtaagtttccacatgttccagccatttttttatctctggcgcacgttctaaaatttcagcaatttcctcattggttaaaagcggtgcttctttcagttcgtgcttatcaatcagctggaaatttctctccgcacgtggccgtagttgggcacgaacttttgaaaacttcacaacgtcgtctgtaatcgtccattctcctgtaccttcccaagcctgcactgctcgaggcgccacgtaattatcagcccagtataataattcttctttttcaatttcaaaggtcgaaatattgtctaaacgaggttgaataatcgtcattcgcacggtttcaaattcgtaaataatgtcgtacttatccaccgcaccaagcgcatataacatcagttgagggtttaaatacgcatcaacaggaacacctttgccgtatttcaagtcgataatttcaatcgtcttatctgataagacaaccacgtccgaagttccaaatccttctgggacccattttgaaaaatctactttttgttctaattcgactgtggcattttcgtattgattgacacgttcttctactaaatcacaataagcggtgacgtattctttcatggattcatcacaatacggatggtcttgttcaaaaaatttcaatcgtgagtttaccgctctagcggttaatagcttaaaccgcttcgccaaatacaactctgctaattcgtgtgcagttgttccctcctccgcataagagctgccgcgatcttttactttttcctctagtcgtgccaaaggtgggcatattagccaccgatgcgcactactcgcccctaataaggcatgatttcctactggcatgcttattcacctaccaacgtttctaagtcagtgataaatttaccgtaatgctcttctttcaagtctgaaagtttttctgcgttgtaacgactaaagcaggtctttatcataggtcgcttgcctttatccatagcctttctcatcgcttcttgcacatctgcttttgttgcccctaggtgtaaatcggctgttgctgatacttcttctgtttctgaatcagtaggcgcgactttctccccagttttcgatggttcggtgtctgaggttgaggccgtagaaacttcttctttcttcttcgcagttgcttttttcttttttgcaggttctttcttcgctgctttttctacttcttctgtagcttttttatccgctgtatttaaagattgcgtgacttctacaacgttgtctgttgctaactgcgataaaatttcttttaactcttgtgctgaatctgcttcaatatttaaatagatgtttgccattttttattcctccagttattttaattggttaatgtcttcatctgttacattgaaaatcgctttaaaatttgcgtgataatgcaacggtgggtctacattacgtttttcataaacttttatcagcttcacaggaagtagcattctttttgctaattcttcttgtgacatgcccgcttttcgtctaattttcttgtacggcgataacatgagttgctacacttcctatctggtttagctctagggttaaacattcccatgcttcaaatgcttggattccctgttttctaaggcaattaacaagcgttgtttttcctgtaggcccctgctgacctttcacaatgattggttttccccatttatatgcttttaatatctgctctttttgcttcgatgttaaaaagtcaggaagtactatctttttatcgctcatcaactttcaccgccaattcccgataaaatccaggtacttcttcttttagttctgtttctgtgaaacgttgttttagcttgtctgattttgctgtacaaacaaaacgattcttttcagtgttgtaagataaatattgctgttttcccgtagcatttatcgcgtatggcaaaggaatttcatacattggttcttttttcactgtgtaaccatcaagaatcgcacgtgtatgcagttctcgattttcttctacttctttcgtccactcaaggcctttcccggtaagcaactcttcatctgtaataggatcttctaaccaatgatcccatcccatcttattaatttgccaaatacaccaactcttataatcaatatgtgcttctttacttttctgtacccatttatcaaattcttttgagacttcaattgattttttaggtgaagttgctgtccattcaataaaatcagtaattcctaatatatgctctagaaaaggagcactaataattgacaattctctattcgctttatttacttcaataactgttttttctttatgccatttccataaatcggtttttgtaggctcaagtcctgtagcccagacatacccttgttcttccaaaaatgccattaagttatcatatgcttcttgtgtttttacgtgataatagtttctcatttgcgtttctcctttttcgtgctattatttacttgtatattttttgtttagtagcttacttcgttggcggacgaggtaggctctttttgtttcaatacagcaatcatcacctaacaccccacttcgttgagcattttttgataagcaacttcgtaacgttctaactctgcttgaaaatgctttagcgtgcggaggtcctgcattgtcggatgctttgcactttcgtgacgtactgcatctcttaacgtttcaatcttttctcgtactgcttcacgtactaaaaaagcttcattagctgttaacatttatttcacctcacgatcttcaagcgctaaatcataaattaaaagccaaatgataaaaaccgctatataaatgttttggattaatggtccaatattgccacctaccaatagacctagtccgaatacaaccaacagtgccgctatacgtcttaattgatatatttttttcactgtaatcatcctttctttccaatgtaaacatctgcaaatctttcatcgtacacctcataaattgagatatttttttctggatctgtgcagcaataacgtaaattaatctttctttcaaattctttaaattgagcggcatctaaaagtttgtagtcaattgatccataaaatgtttcataaaattccacgctagccttttgcaatattttgtgtaattttttcattgctttcacctccctaaaaccatcacagaaccgttaaaatttcggattgcttttgcttctggcaaacgttcatcgccgcctacaatttcatttgttcgatggttatacactcgtttttgccctttaaacaacacaactgaaatgttgtcgtatgtgctacaagtgtcttgcacttttaaatcttcgcctttgtagcaaataatcatttttgtaaaacctcctacggaattaatctgtgcatgcggttcttatcttctaaacgacttaaaaaatctaattcgttttgaatttttccgcttctctgtctgttaataaatcagcgcttctaagagctgccctatctgattgtttttgcttgcgatctttttgaatttggcataatatccacgcttcttgttctgtcgtataagccacgtactatccgccctttcttttcttgtaacggtttttatccatccagcgaacaaactcatcaaacacatctaactcaattaatacaatcttatgtgttggatgaattacaccagacgaaaattgcggcgtgtcctgcattaaagccagccatttctctaaactagatttagtgattgagtacattttttgtactacggctttatttccatatttaattgacgcacgatctggattctgttcgacagcttccagatcaaccttaaccggttttggcataccccttaccccctctcatgctttagctcgtttagttcaactagcacagccacataatcggtaacaaaagaataacggtcctgatgtagtttttctgtccatcgataagacacatctaactgcagtagttgatgaagtaaaaaacttttttcacgaattgatgcatctagattttcttgtgctttccaataacgatttgttccatcgcataatgagcttgatgaaattttttctctgcatcgattaattctgttgttcgttttaaaaacttctttaaatagatctttgacaattaaatgcagtcttgatttaacaatgtcttctgccgttagtgcgggcatttcgtgtgcatagttcattttctaagctccttttgttaaaaaaatagtaattaccacttgcgtaaataagaattacgttttataataaaaaaagaattaagaattacgaaaatcgtattcccacaaagtttcaaaatctacattaagtaattttgctaacataattgatagtttgaaactcgggcaggaacggccattctctatattacgaatagttgtttcagtaacaccagttaactcagctaaacgtttttgagttaatgactttttgattctcgctgctcgcaaagaccctcttgtacaattcatatgaacatctcctctcatttaatttacgtaattgccaattacataaatgagtatacaatgtaattaagrattacgcaagaggtttatttgctatttttacaaaaataacataaaggagctttaaaatgacctcatttgcgctgagattaaaggaattaagaaaaaataaaaaaatgtcacagcaagaacttgcaacttttttaggtatgaaaagagaaaatatttctaactatgagcgaggggtaattaccaatgtatctagtgatacattagaaaagatttcagaactttttgatgtatctatagactatttgctaggaaaatcagatacatctaatcagaaaaatgaatcgatggctaaacaagtaatgatgcgcatggatacagatggactttcttcaaagcaagtaaaagaactagaggatgagatggaacgtttcttttcatggagaatagaagaaataaaaaaagaaaatttaagtgaataattacaaggtggttttcaggatgacagtagaagtagacgagtaccttaacttttgcggtaccattaacgaatttatttcagcacacatgttatgtttgggaatgagtgttaataattatgagcatagatatatttgggatgaaatattaacatctaaatcaattaaaataaggccctttccatttgaaaaaacagcacgtagatctatatcaggtatgattattaaagatgattacgagactacgctagcttataattctaacatgggcgaaaaaagaaaaaatttcacgatatctcatgaacttattcacgccatgtatcatttagatagcgaaaataaggtattcaccgacacaaaagatactttatcctattcactggcagatatcttaccagaatttcaagcgaacattggagcatcttctatactactacccgaacctgttcttattaatgagctgaaaaaaggaactcctccttattttatctcaaaccgttacggtatatctgaacaagctatttttatgagattacttcagcaaatgcaggctagttttgaagcatcttacgttgccgcctatgatacggccaataagataatgaacggcaactctaaaaatttggcaattgaattaggacgaaacttagaaagaaaaattttatacagcaaccctttttatgaagcaattacgctataatgaatttatattaaatcgaaagaaggatgatagaaatgaaaaaaatgattaaatttgcaggcattgctcttatttttgcagctcttctctctgcctgtagcaacgcaaaaaataatacacaaaagaaagccgaaactgctgcccagtcaagcactattgaagcttcagacagtaacgaaaacgagcctaatacagaaaacataacccaagcagttaaacagttagaagaaaaatttaactctgacgagaaattagtaaaaatagatgttaaaaataatgttaaagatgacacatcagataaccctcacgctgtcattacggttaaggtaattaatgatgaagcaaaaaaaaatatggaagaaatgcagactgcgatagattccaactcaggtacagaggcacaaaagactgccatatacggaattcaattaaatgttgaagaagtagccaaaacattagaaaatgataacgatgttatttctttcatcacaccttacacgaatgggaacgacagaaccatagcaaaatcaactaaaaatgaaaatattattccgttagtaaaataaaaaagtgcatcccccgccggcaagctagtggatgcaccttatcagaaaataaaccaaaggcttatttaatgctattatatcaaaaaataagcctcattacgaggtttttatacacctccaaaagaacgtaagttcccataaaaggagagttgaatatgtgggtagaaaagaaaaaggataaaaaaggaaatatcacataccaatatcgcgaaagatacaccgaccctcggaccggtaaaacacaaaaagtcaccacgactttagcaaaaaatacaaaacaagctgagaatgcagcacgtcgtgagttagaaataaaaatccaaaagatactgaccgactacgaagaagagaaacgtctagaaaatttaatcaaaaacgagggcgtaataccaaatgataaaacgttagaagatatgataaaagaatggtttgattatattcaggatccaaaatcaaaagaacgtaaaaaaggttccacgctctcgggatatagctatggcattgattcactcttaaatgagttcttagtaatagaaaaagataaacgaatccaggatttaacttttgatgatatacaagcattttatgaccgtatgatttttgactttgaatatcaaaagtcctatataaaaagattccgtgcgattatccgtggtgcatttactctcgcctataagaaaagatacattaaaaatcttgatgccattaatctttctaaaatagtaacgccagcaaaaacggtggatgatcttattaatgagcaagtacctagatacttagaaaaagccgaggctgaacaaatatttcaagttttaaatggatacaacccactttatacgcaaatactcgaactacaatttcacactgggatgcgttttggtgaattgattgctttagaatcaaaaaactttcacgacggatttttgttagatattcatggaacttacgatcatgcaacacgtagtcacacccgaggacaaaaagtcccgccaaaaacaagaaaatcatttcgtactattgagttaggtgatgctgcagtacagattataaaagacc

SEQ ID NO: 101 - DNA, 7964 bp; double-stranded, linear
agtgagcgggtcactctagagaaaaggagtagaaaaaaatggcggatttaaaacgactgttcattgggaaaccattgaaatcagccgaaaatgatgaacataaattaagcagatttgcagcgcttgcgttgttatcttctgatgcactttcatccattgcgtatggtacagaacaaatagtggtggttctggttactttgtcggcggctgcgatttggtattcattgccaattgctgcatttgttattattttacttatttctttaacattgtcgtaccgacaaattattcatgcgtatccgcatggcggcggcgcatacgttgttagtagtgaaaacctcggcagaaatgcaggtttattggctggtggttcgttgttagtcgattatatgctaacagtagccgtttcagtttcagcgggtgcagaggcgattatatcggcgattccagcgttatatggtcatcaagtagcaatttctattgggattgtgatattgattaccttaatgaacttgaggggcctgagagaatcagcttcgttcttaatgttgccagtgtatagttttatcgcaattattaccttactgattgttgttgggctatttaaaattgtgactggcgcacagccattgaatgcgacagctttaccaggagccgtggttccaggaatttctattgccttggttttacgggctttttcatctggttcttcttccttaacaggggtcgaagcaatcagtaatgcagtgccattctttaagaaaccacgagcaaaaaatgctgctgggacgttagcgttaatggcaacgattttagggttcttcttcgtggggattacgtttattaactattggtatgggattgtgccaaaagaagaagtgacagttctttcacaaattgggaaagcggtctttggtcaaaatattttatattatttattacagtttgcgacagccttaattttagcggttgccgctaacacaggattctcagcctttccagttttggcttataacttagccaaagataagtttatgccgcatatgtatatggatcgtggcgaccgtttgggctattcaaatggtattttaactttagctgctggttccattgttttattattgattttccaaggttccacagaacgtttaatcccattgtattccattggtgtgtttattccgtttgctttgtctcaatcggggatggttgtaaaatggcgaaaagaaactaaaaattggttgccaaaatcaattgctaatattgtcggcgcctttatctctttcgcgattatcgccattttgtttatttatcgattaggggacatctggccgttctttattattatgccagtgttgatttatgcattttatcgggtcaatactcactataaaaatgtggcggaacagctacgtttagaagatggggcacagttacatgagtttgacgggaatacagttattgttttagtagggaacgtaaccaaggcaaatgtcggcgccttgaattatgcgcgttccattggcgattatgtcgttgccatgcatgtctcaatggatgaaaatgttgagaaggaaaaagaaattcaggaagagtttaaaaaacacttcccggacgttcgtctatcaattgtccattcttcgtatcgttcactgcaaaatcctatcttacgttatgttgatttggttagtaaaaatgccacgaagcataactacagtacaacggttttagtgccacaatttgtaccaaataaacgttggcaaaatattttgcataaccaaacaagtttacgcttgcggattcgtctagcgtggcgggaaaatatcatcgtggctacctatagttatcacttgaaaaaataaataaaaaaatctgccatcttttgatggcagatttttttattgacgtaattgtttttgataaattctagcgcaagactgctcttcggtggttaccattgtcaaaaattcccagtcatatctttcataaaaagtagtatggtctgtgagcaaataaagctttttaaatccagaattagctagaaaatcaccaactgttgttaaaagaattcctgctaagccttggtgacgaaatgttggttcgacatacaatgcacaaaggtttggcgtaaggtctgcacgattgtggaagtcattatcaattacgcccacgcctgcaacgatgtcctgctgtttattcaagcagacccaccaatgtggtacgtggttttcgctagttagcatttcctgcatacttgcttgatacgcttcagcggggatttgccacttttggctaaaccattgagcagctgacggaattaagtgtggttgttggtttaaatcgataatagtatagttagacattattgatctcctagataaaaaaacagatcccattgaaaagaaacaatgttggatctgctctgtattttttattaattggaatgtttgctagctgggtctaaacgccgttcaataatccctagaacccaatctgtgataatcgccataaaggccgttggtaaggcaccgactaaaatgatagaagcaccatctgtggcattggttccacgaataataatatcccctaaaccaccagcaccaacgaaagcaccaatcgcagtaatcccgattgcgacgactaacgcatttcgaatacctgccatgattactgaaacagataaaggtaactcgaccatataaagaagttgtacttttgtcatacccattcctttaccaacatctaaaatattgcgatccacttgaatcatgccagtgtacgtattcttgatgattggtaggagagaataaaggaagaccgttacaaccaccgtgttgacgcctaagcccattcccaacattaaaatcgaaagcattgccaaagctggtactgtttggataatgttcgctaaacggataatccagttggctaagctacgtttacgtgaaatcataatcccaataggaatcccgacaattgcagcaaagattacgccataaatcgaaattaaaaagtgacgtaaaaattgttgaaagacgtagccgccattttgttggaaatagtagataaattgttggaataaatcatattattcatctgktactccccctcaaaatagttattttcttttaagaaacgttcggctacgacagcaggttcaattaaatcattatctgcttgatagttcaattcttgcatttttttggtagaaattttaccatctaagcgatttaagacatctttaatttccggcgtttcttttaataatttgtcactaaccacaggagcggcatcataaggcgggaagaagcgcttgtcatcttttaacatgactaaatcgtaactaccaatccggccatctgttgagtaacctaagatgacgtccatttttccagcgttgactgcatcgtacaccaagccaatttgcattggtaaaatagatttaaattggaagttgtattcctttttaaagccttcataaccgtcgccttcacgtgtgatccacgcagtatcgacaccagcaactaatttgtctgcgactttccctaaatcactgactgtttttaaattgtatttctcagccgtttcttttgtaactaagaatacataagtattttcaaaaccatatgaagggaaccaagtttgttgataacgtttttcaaattctgattgaactagattgaacgcttttttagggtctttttccgctggtaagccaagcgtagtagtcacgtcagtaccagtataacgagctgcagaaattgaggcatctccgtttaacattgcttggtgattgatggtagtagtggctaagttgttaatcacatttgtttttttatctgtgtaatgctccaccatatccgctacaatgctccctaaaatctgcgcttctgaagtaatcccacctgtaatggcaacagtgttatcatcagaagttgaagcgagaccaggtaaagaacaacctgccaataaaagtaaactgcttaagaagagtaagcttaacttgagtttctttttcatcattattcgccctcccttaaagcttttggcgttaaacgattttctaataatccaagaagaacatctgctaaaagcgctaaaatagttaccggaatagtcccgccaaagattaattctggctgatagttatttaatccactgaaaatcatatcaccaagaccacctgcaccaatataagaagccagtgtagcccaagcaatgacatagacagcagctaaacgaatgccggccataattgttggcatggcaatgggtaattcaacactaaaaatagactgtaaattggtcatgcccatacctttagcaacatctcggtaattttcatcgacatttttcattccgatatacgtgtttcttaaaataggtagaagggaatagatgaatagcgcgataatagcgggtgttttgccgacaccaaaaattggaatcatcaaagctaataaagccaacgaaggaaccgtttgtaaggcacttgttaaaccaatgacaatattggctactttgggcaaacgtgttaaccaaacgccaacgggcacagcgatagcgacccctaataaaagtgcaaagaatgaaatataaatatgttcaatactttttgaaatcatttctgatccatattcttgaaagaagctactcattgytacgcctcctctttatcagtttcggactcgctttgttttgcttctacagcttcactaatcgttgtttcatcgccccagataacatcataaacaatgtcaacaagggaagcacgtgttaagatgcccaccactcgtttttgttcatcaacgactggcacatattttaagccgcgttttaagattctttgtaaagcatcacgtaaaagagcggttttttgaacaaagaagacatctttattcaagatatcaccgacactagaagctttgccacgttgctgatctaatgtttcaacatcgataaagcctttaagcacatgggaattatcaacaactaataaggtatcaacccgtttttcacgcatcaatttaatcgcttcttgtaaagatttttccggcgtgatagtaatagctgaatttaacatgacttcatcaacagtggtgaaatcaggtttggcttgtaataggcgatcttctccgatgagttcttctacaaattcattggctggatgacgtaagatattatctggtgtgtcaaattgaattactttgccttcgctcataatggcaattttatttgctaatttcaacgcttcatccatatcatgggtaacaaagacaatagtttttcctaaacgttcttgcaaatctttcactaaatcttgtaatgaatcacgggtgataggatctaaagcaccaaaaggttcatccattagaataatatcttgattggcagctaaagcccgcacaacgccgattctttgttgttgtccgccagaaagttcattgggatagcggtccaacatttctcgtggtaactcaaccaaatcaatcattttttcggctatcttattgcgttcttccacaggtacttttaataatttaggcactaaaacgatattttcacgaatggtcatgtgaggcatcaagccgatattttgaatgacatagccaatttggcgacgtagctctacaggattgattttttgaatatctkggccatcaattaaaatttttccttttgaagggtcggtcatgcggttaagcatccgcattgatgttgtttttccactaccacttgttccgatgaagcagataaattcacctttatcgaaagacaaattaatgtcatcaacggcgacttttccgcctttataaaattttgatacatgctgaaattctatcaacttactcacctcaactaaatattttgaaaatgtatcttattactagtatgctataaaaatgcgatttcgacaaatgtaatctatttttaatgggaaaaagaaggcggtaaaatttttttaattcgttctaaaaaaaagaaaagataactattgtttagtaaaagttatctgaacgaaacaagatgttaaaaagagtattctgagaaggaagaaaagccgctataacaaagaaaagtgtcctttgtagcaagttgacgggagctgagtttttcattagaatggaaagagaacaagggaataaaataaaaaaaggcgcttcatgatttagcggcaactaaatcacgaagccttgaatagtcacctgtgcaagtggaccatcaagttgcccgttcaatcaatggaaaccattgatcacttttattttactgaatttttgaaaaaattaccagtttttttaagaagtaagaagtggaagaacgaaggatgctttttatggaatgtgcaatgacgtttagaaaaatctgaaggtcattttttattctcttgttcaaacattcaaacataggggaagagagacggacgtaattttgtcaccgattattacgtccgtcttccgttgttttctaaagcgttggttacatgtctttgtagaggttggcttcaattgcagtccgttttggttctaaaaaaggcggtaaagccaacgtttcccctaaatgttccagaggctcatccaatgtaaaaccaggagtcaaagtagcaaattcaacccgattcccgcctggttcacgaatgtataaacttttaaaatatccacgacttacatacatttcaatttcccagccttgtgctaaagcgcgcgtgtgtagttcttgtaatgcttcatcatcagccacagaaaaagcaatatgatccatactgccacgccccattcggcttgttttatccgacgttgtttgatgaacagaaaagctttccgtctcacttaaaataatcgtattgccaactgcttgccaaccaagaaatgtttcaaaaaaggccaaggttttttcagaatctggcacatgaaattcagtagaggccaaaccgataatttgaaccgctgctggaatgtcgttagaaacaacgagtgtttcttttaatggattttcaggaacttctgtcaggataatatgcgtatcatctggatcactgaaatgtaggctcttttcttttttgttaaatggaattttgttttctgttaaacgttgttcccaaaaggaaaggctgttttggggaatttttaagccaatcgtggctaaataatttttttcttcatagcggttgcctaataagggcacgataaaaaaagttactaagcttcccggcgtgccttgataatcgccataaaaataatgaggcatgcgattgttgtcttgatttacggtatttttgacaaaacgtaagcctaacaattttgtatagaatgattggttttcttgaccatgacgcgctaatagtgaaacatgatgaaattgagcatgcattttgagttcctcctctaaataactatgtatacttacttaaagtaagtatagtgcttctgacattttttgacaactatttagtttgattcagaaggctgacatagccagaaacmagaaaaagtgttagaataaccaagatwaaaactagtagaaagagtgacggaaatgctaagtacagaagattttgattttgatttaccagaagaattaattgctcaaaccccactaaaagatmgcgctagttcacgattattagttgtaaataaagaaacaggggacatggaggataaacatttccatgatattcttgatgaattacagcctggggatgcattagtcatgaataatacacgggtactgccggcccgtttatatggagaaaaacctgaaacaggcggtcatttggaagttttacttttaacaaatacagaaggcgatacatgggaaaccttgattaaacccgcgaaacgtgcaaaagtcggcacggaaattcaatttggcgatggtcgcctaaaagcggtggttaaagaagagttggaacatggtggtcgaatcattgaatttaaatatgatggtattttcttagaaatttt

SEQ ID NO: 102 - DNA, 7215 bp; double-stranded, linear
agaagtgaaaagagcttttgacttacgctnntattatgaggaacgaacctttcaggctgggaaaataaggaggtatcaaaagaatgaatttgttcaaaaagaracaatcaaagaracagacgttatctagtaacgttgaaaaagtagataaaaaagtaaaaaaacgtgtacagcaacaagcaaatcctaccgtacaggagagtattttttatacgagtcagtttgaagaagngctcatgcacattgtagaggatgagttttctaaatgctataaacttggagaagtggactacgaaattgctgtagaagaagatcmattaaacacggtaatggggtatgcagaagggttaaatacactagacaaaaaatctcggtatcagctgctggttgttaataaaagagaagaagagtcgttgatggaagacgttttattggcgtatcagggagatcacttagataactaccgtcaagaaatcaatgaaattataacgaagcagtatgaacaagacgaacgaaactttaagattgaaaaatatgctattttcaccacaaaaagttcgtccatgaaacaagctaacaaagagttagaaggaatcatgcagaactttgccaatcgttttgaagccaaccaaattaaattagaggtaaccccaatgactggcttagagcgattgtctttgttcagctattttttgcgccacggacaatattttggcacaagctatcaagatattgccgtatcagggctaacgtctaaagcgtttattgttccaagtaaaatcaagtttccaaacaataaagcttattttcggttaggagaaaactacgcagctgttttaaccattcaacaatacccaaaatacctagaagataagttaatcaaagaattatgcgctacaggaagagagttagcgattagcattcatgccagaccttatgacatgatggaagccagaaaggcaatacagggaaccaagacgttaaatgatgttgccattcaaaagcaacagaagcaaaacttcagaagtggtgtttcagaggatgcgatttcaggagaagcaaaggaaatccaagaaacaacgaacgcgttaatggatgaaataaaaaataatggccaaaagttatttaatggcctattttcagttttcctaattgcagaaacagaaaaggaacttttagaagctgttgaatcggtgaaaaacgtaggagcaacctggcaagttgtgtttgatacggtagacaattacaaagaagaagcactcaatactatcttaccgattggaaaaccttacttagacgttgaaatgagttatatgcgtgatctaacmacmacmaatattgctacacaagtaccttttaccaatgtggrattacaagcccacaggtcagttttatggccggaatcmgttgacgaagaacatgattactattgrccgaaaaaaagwttaattwcaccagtgggcttatttcggacgcyggttctggtaaaggatggcgaccaaatgggaaattctttcaacgcgtttaaaatttccgaagatcgctttttaattgttgatccagaaagtgaatacttaccgattgggaaagaattggatgcagaaatactcgatatctcaactggtacgaaaaaccacttgaatattttaggaatggtagacaagcagttattggatgaagaggaccaggaacttgatttagttaaagaaaaatctaatttgttatccactatgtttgaatcgctactaaaaagctatacggacgtggatgcgggacttgttgatcgtgtgacgttgttgacgtatgaacgctttgaaaacaaagagacagagccaacattagtcgattggtttagaatcttaaaagaacaaacggatgaaggtgccaaagaattagcgaataaagtggaaacctattgtgtgggttcacaagatatctttgcgcaccaaacgaatatcgacttaacggcaccctttattgtctttaatacaaaaaaattagatgatcgcttgaaaaagtttgccatgaaagtgattttagatcagttgtggaaacaagtagtatccggacaaggaaaagtaacgtcacgtttgtattttgatgaattacaagtcaatttcacaacggaagaagaagcagaatggttcttaaatttatgggcgcgtattcgtaagtatggcgccgtgacaacaggtatcacgcaaaaccctacgacgttattagacagtaaagcggggcaaaaaatgattgccaatagtgaatttttgattttattacggcaaaaaccaattgattcacaacgattagtagraattttaagtctgacacctgcattgaagaagtatatcmatgatcgagccccacaaggracggggctaatttctgcaggtggggtagttgttccgtttgaaaatcctattccaaaagaaacacatctatttgaaattatgaataccgacgcttaggatgtgaggacatggtagaaagtaagcgtacttggaaagaaaaagtacatgttgaatctcaagtagaagagcgtcttagaaaaaatttgaccttaaaatcaagagaagcgacgaattgcaaaaaaaagcattaaagacgactaaaaaggagtttaaactttctaagaaaaattacaagcaatcactaaaaaaacataaacttaccttgaaaacagggaaggaaccattaagtattaaccatttactggataaaaagaaatttgtagagcaaaagaaacgcaaaaaagcacagaaaattgcttacaaacgaacgaaaaaagtagatgaaacgcgtgtcgttaaccaagtgaaaagggaaaccaaggaagggttgaaaagagaagcgacgcaaaaagtacgaaccacgttaacgcaggaagatacactgaatgaagcaatgaccctttatgaaaaaacacaacaagctaaatttaacatgcgtacagctttgaaaacaggaaaaacggttaagaatctttcggtgaaaactgcaaaagatacgtacggattggggaatcgcttatttaacttttcaagaggacgtgggtttcagcgcacaccaaaagactttacgttaaaaaaacaacttatgaaacaactacggaatcgcgctatgcgctttaaagcagcaaaagaagcgaagaaagccgaacaaggtattggcttgattcgttctttttttaatggtcagaagacattagggaaagtcgctgcattgattctaaaaaatccaatttcttgggttgttttattggttctttttcttgtttttttattgagtggcgttgcaagtagtacacaaaaaccagcgattgttcaagaagaggaagatttaaccgcttcatggacgtattttactaaattagatgcgcaacatacagacgataacaacctgttttatagcaatatcgatgatgttcttttctacatgaattatcggtacgatgattttaaattattagatatggattccactggtacaaagaattttgaaacgattctatctgaactttggacggcactaaacggaaagaaacctgattatcagttgaaaacaatgcaaagtttagagacagataagaaatcgagttattttatcgaagaggaacaagcaaagcattatcaagagataaaaaaagagttaggctaccaaacattggatgatctcctttcttttccagtaaaaactgacgctttaattgtcaataagcgttatggctatgacaatcmaaagagaagctcaccttatataaaggcattgatgtattgattgaagataatcagccgtttcattcaccaatgaacggccaaatcgtttcagtgcctgatacagaaacgctggttatcgaaaaagagaaagtagctaggttaacgattcgtggtgtgaatacccttcgactaacaaaaggtatrgatgttgaagaaggaacatttcttgggaatacaaagaattcaacagttacgttccaatatgaaaaatataaaaaagaaacgaaagactggttttttgtaaatccagccttttattttccacgtgtaacctacacgcaaacgactcttttaggaagtgcagaattttctcctggagcaagtgtcgaaaaaagagcgcaagctgtttatgattatttatcaaaaaagggatacaccaaagagggaattagcgcgattttaggcaatttttcggtagaaagtggcattaatccaaaacgtgcagaaggggattatttgaatccgcctgtaggtgcgcatgggaattcatgggacgaaccgagttggcttgctatgggaggaccgcaaatttatggaggacgttttccaaatattctccatcgaggactaggtttaggtcagtggacggatacagctgatggtggtcgtaggcatactttgttattagactatgccaaaggtaaaaataaaaaatggtacgatctgcaattgcaactggactttatttttgacggcgatgcaccaggttcacgaacagcagcagacaatgtagcaagaagtaaggtggctgcaactattccagaacttactacttattatctaactgtttgggaaggaaatcccggagacaagttaggagaacgaattcaagctgcacaaaattggtttacattcttttctcgatcgggtacaccaatcggtggttctgggagtgaggtctttgcgcagtataaagaaaaaatgcaaccattacccacagacagagaamcaaaagcaggacaaggctggccaggcmatgcgtatgcgccagggaattgtacttggtatgtgtttaatcgtttgcacagttaggaaaaagcatttaccctactatgggaaacgccaatcaatgggtgcataactacagtcmaacgcccggagcsacacttgaatcggcccctaaaaaaggggatgctgttatttttacaaatggtgtagctggttctagtacgcaatatggacacgtggcttatgtggagcatgtaaactctgatggtagttttgtcatttctgaaatgaatgtcagtggtgagtattctatgaattggcgtgtcttaaaaaaagaagcaggcgaatactttatgcgcctaaactaaaaagaaaggaaccaataagaacaatgtataatatggaaaaattaagtagatacaagaaaattggctttattggtggcagcttactgcttattgtgcttatttttttgattgggcttagtgttgggcaaagaaaacaagtaaacaccaatgaaaaacaagtaaaagtcgagaaaaaagaggaattaacaacaagtacggtaaaaaaatttttgattgcgtattatacaaaaaaagatcttggtgaaaatagaaatcgctatgaacctttggtgacaagcgccatgtataacgaattagtgaatgtagaaaaacagcctgttaatcaagcgtataaaggctatgtagtcaatcaagtacttgatacgtataaaatctatattgatactgaaaacaatgaagtcattgtggacgtcacgtataagaatacacaacgaaccaaacgaaataatgatgaaggagcgttgaaaaatcagagcaatcaagaagcgatgaaattaacctttgtaaaacaggcgctaattttttagtggataaatggcaccagtaacacttaccaatgaattmcaagaggagccaaattcttataatacacatgtagtaacgacagaagaatcaacaaaggagagtgcaaacagtggggaaaagtaaagtaagtgaattagaaaaaaagaaggatcgagtggagaaagagcttaataaagccaatgaacgtctcgatacattgaaacagtcgattgctaaaaaagagaatgaattgaaacaaatagaagcggaaattgtcagtgctctattaacagaaaataatttatcttttagtgaattgactgcgttgttgagtgaaaaagaatcaggtggtgaagcmagtgtttatagggaataaaacaacctatcgctatgaacttcttcattcaaaaaatattaaaggcgaggcgatcgactctaccgctacacttgttcgttatgtgattggcgtaamcaacgatcttattaagaaggaagaagaaggatggctttatgtcgaaaaaataaaagaaggaaaacaagaggaccaaatcctttatggcaagcgtatagatttaccaattttagaagacaatccttattttcatgatcttttagatccgtttgatacaaaaaaagtcattccttttgtagagctattgccttcagctgtagaaaatcaggtaaagccagaagaaaaaattaaagaaccacaggatattgtagagttagagaaaaataacaaaaccactattactactgaagaaaaggaaatcactgaattaaaagagcaaccagatgaaatggccgataaagaaacacagaagaaaattctggaacaaaagattcagtttaaaaaagacgagttagccacattgaccgaggagattgcgactaagcaggaagaaatcaatgacttagaacaaaaattaagtacattttcaaagaagccagagggacttcatttataaaaaagagtttttaatcagctagtaaaaaagcytcttctagctaagaaayaagtattatcactttmcccttacagttgtttatggcctatcamaaaagtagagaaataaaaaagactagcaaaagttgctagtattttttttgtaaaggaggagaattttggtggaacaaagagaaattgtacaccgctattatgttttaggtactagtactttagataaagtattaaaagtgctgcttaatttatccagtgatggtgtattggcgctaaaagacaagtttcttcctttaaaaggggaaaataatttgtataagctaatgaatcgtgaggatccactgacttcggcgcaacttcatgaaaaagtgaatttaaataagttaaaagaacagttggaagcccaagggcttccttttgcgtttaaagaaaccaaagaagggactaacttctattttcgagtaaaagatacggaactcgcaaagaaagccttagaacgcgtattaacggatattaagaagaacccacaaatgattttgcgtaaccaaataccatgacttttgatgaacggttagcctacactgcagccaataaaaaatacgtgggtaaaatcgatcaaaccaaaagccatccccaaagggaaggaaactgttgattgcng

SEQ ID NO: 103 - DNA, 5504 bp; double-stranded, linear
tgttcgcctaagagattcaccataaccactgattgaagtaattggggtaacccaatgccccaattgctaatccctcgaatatgcgcatcaaattgactaaatgagcaagcttcaatagagtaatgacctgagttatgaggccgtggcgctaattcattgacgtacaactcttctgaatccgttaaaaacatttcgatagctaaaaccccagatagatttaattcctcagcaatgtattgcgccaattccgctgctttttgttgcacattctcagaaattcgtgctggcacaattgattcatgcaagatattctttcgatgaatgttttcagatacaggaaagctttggtaaccatgcttattccctgcaacgatgattgaaagttctttagtgaaaggcacccacttttctaattcacaagtggcgttagctaataatttagtcgcttgggagaaatcctcttcgcattttaagacgacttgtccttttccatcgtatccaccttgaatagtttttaagacacatggaaaaccaatcttttctattgcttgtggcagctctttctggctttttacttccgcaaaaggggcaatcttacagccaatcgattgaagaaacgttttttcaagcaatcgattttgagtaatttttaacaattctgttccttgtggcaacttttctagtggaatggccttttctagggaggccacttcaatattttcaaattcataggtgatcacatcgcttaactctgctagttcagttaaagcagatatctgatcaaaggctgccacaatttgacggtcagctacttgaccagctggactattgagcgttgggtccaacacaatcatttggaaacccatttttttaccactcatgactagcattcgccctaactgtcccccacctataatgccaatagttgctcctacttttaaaggtttattcaagttgttccccactttccataaccgctttttccaatgattgtcgtcttgcttggattctttctgctaactgtaaatcatcaatacttagtatttctgcagctaataacccagcattggtagcacctgctgagccaatcgcagttgttgctacaggaactccccctggcatctgcacaatagacaacagtgaatcaataccgtttaacgttcgtgttttaactggaacaccaatgacaggtaaggttgtctttgcagctaccatccctggtaaatgggccgctccaccagcgccagcgantaataaccttcaatccttttgttcgtgattcctctgcaaaacgaaacatcaagtcaggggtcctatgtgctgatatcactcgtttttcataaggaattttcaactcttccaacacaagacaagcagctttcatcgttgcccagtctgaggtacttcccataatcacagcgactaatggtttcatgaatgtaataactccttccgccttttttcactgttattctaacaatgagaaaaagagatgtcaargaaaaaccgaaatattatagattaaaattatataatgttcgtgtttatcaaaaaaagagtcatcggaaagatgcttttttgctatttttagcgttgcttcctctttaagaagaaacgtcgcctgtattaataactggttgtgtgcccttakcagtaatgattgagactagtaaattattaataagttgtacttttcgttcatcggtaaaattaatttcttgcccttcttcaatctgttctaaggccatttgtgtcatgcttaccgcaccttcaacaattgtttgtcgagccgctaagattgcttttgcttgctgtctttgcaacatggagctagctatttcagttgcataagctaaatgattcaaccgtgtttcgataacctctacaccagccactgctaagcgttcttgcaattctttggttaactcctcggaaatttgttcggtatttcctcgcagagttacatcattatctgaaaaagtgtcataaggatattgtgttgctacatgccggattgccgtttcactttgaatttccacaaagtcttgataataatcgacattaaataacgccttagctgtatcgacyacccgaaaaacgatgaccgcagagatttcgattggattcccgtcagagtcattgacttttaatagagaactattgaaatttcgcactttcaaagaaatgttcattttttgcgtaaatggaatggtaataaacaacccattttctttaatcgtacctaagtagcgaccaaaaaataaaatagctttcgcctggttgggactaacaatggttaaggaacttaaaaataaaatagccccaactaacaaaataatacctaaaacaacaagaacaccattggtatgactcgctccataaataaataaaccaattcccgcaattaaaataactaataagctcgcaattcctacgtagccactcatataaaatgtttttttctcttccatctgtttcactctcctaactcatttatctggtccttattatacacctcattgccttcaatagagtaacttttaacattaaataaactgattttttcggggctcttgtagtatactgagaacaaagaaatcccaagaaaaggagtgatagaatgcgctatttaagcaaggacattttagaggaagtcatcactcaacgcccctctgactcttataaaagtaattttgggcgtgttgtattaatcggaggaaaccgacaatatggcggagcatcatcatgagtaccgaagcgtgtatcaatagtggcgctggtctcaccactgtgattactgatgttaaaaatcacgggcctttacatgcaagatgcccagaagcgatggtcgtgggctttgaagaaacagtccttctgacgaacgtcgtagagcaagcggatgttattttaattggtccaggtttaggcttagatgctactgcacaacaaatattaaagatggtactcgcccaacatcaaaaacaacaatggttaattatcgatggctcagcaattaccctgtttagccaaggcaatttttcccttacctatcctgaaaaagttgttttcacacctcatcaaatggaatggcaacgtttgagtcacttacctatcgagcaacaaacactggcaaataaccagcgccaacaagcaaaattaggcagtacgattgttttaaaaagtcatcgcaccacaattttccacgcaggagaaccttttcaaaatacaggtggcaaccctgggatggctactggcggaactggggataccttggctggcatcattgctggttttttagctcagtttaagccgacaattgaaaccattgctggcgccgtctacttacacagtctcattggagatgatttggccaaaactgactatgttgttttaccaacgaagattagtcaagccttgccgacatatatgaaaaaatatgcccagccccacactgcacctgattctgaactattagaacagaagcgttcgagataaaacccgaaaaggctaaatggtgacaaattttgggttaaaaagcaggatttaagcctgggccgaaaatcaaaagcgattttcagcccaggctctctttttatttttccttataaacattttttaacgttaatggagcgccaaaggtatgaaaattcaagcctttgactttatcattttgcaggactgtttgttcattttggctaagtggaatcatgccagcagtcgtttcaatcacttctttttcagctgcaatcagtgtcgcccatcttttttctggctctaaggcataggttgtggctgcttcatctaataatttgtcatagacagggttctgataattgcgatcattgcccttgtataaagtcatcagggtagaaatagggtcttgatagtctggtgtccagtaaattaagaataaatcatagtcactttctcgcccaaagttcaatgcagcttcagtcggcaatgcggttagctctattgtcaaaccaggaaacaattcttgtagcgagccttgcaaactttcaccaatttttttgtaagaaccatcatctgttaccatcaattcaacgttaaccttttctcctaattctgcttgtgcttttttccaataactttgcgctttttctttgttataaaccattaaattacctgcttcttgacgaaaatcgagacccgttgtgggattcgccacaaagccttccgtaatcgcaccatgtagcgctttagaaccatctgcaataatattattgactagattttctttatctattcctaaagccaatgctttacgcaggttttcgtttgcaagcggcgtkgcttgcccttyccgtttttgatttaagcgcaaatagttcattgtcgctgttggatacgaatgatacaacgtattatttttattctgttgcgccagttcaccacttagtgtagccacatctaattgtccatcttcaaaaagattcaatgcggtagatgtttctttgataactgtataattgataatgtctgagcgcacgttctggtgatcccaatagcgattattttttgctagttgccagtccatctttgtttgctgccaatcttttaccacgaacggaccattatagacgactttatcactagcagttccatagtccgcaccaaattgttcgactacttttkgattttgcgggaaaaatgtcggaaaagctaacaaggacgtaaagtacggttttggctctttgagcgtcacctttaatgtataatcatccacagctgtgacacctagttcattgggtgctaatttccccgctgagatttctgcaccattttgaattgtttcaacgatgaggaagctataaacaaagccgtttttaggatcaatcatttttttccaagcatattcaaaatcatgtgctgtgacaggatcatcgttactccaaaccgcttcttttctcaaagaaatcgtgtaggtttttccatcttctgaaatcatcggcaatgcttttgctacggctggtaccaattggtcttgttcatctaaactatataacccttcaaacgctgcagtttggacaatagcatctggaaaatccaataatacagaggtgttgagcgttgttaattccgagggtgacatcagttgaacggcttctttggtatttttctgtttctttttattttcatttttattggtacacccagctaaaaatcctaccaataaaatacaaaccattgtgatttttaaatactttttcatcttctttctcctataactcttcatttttttatgctcttacttacagaaagacagctccccttttattttgtcctttccacaagcatccagacaacgaccgctggctccaacccattattataattaatgtgcccctcaccagcttcaattaattgggcttgtccagcttttccaactaagtcttgaccatcttctaaaatcgtatgtgtcgccagaaatcacataagaatattcatcctgttcatggcgagcatatccagctaaaggccgt

SEQ ID NO: 104 - DNA, 6433 bp; double-stranded, linear
gttgcgactaaactatagccaattgctgaaaaacgcttagcaatttctaacgcctcttcttttgtttcatcagcaatggtgaaaagtacagccccataacttggcaaatgcaagccagatgcttcaaaggctttatacaaggctttttctaaataataatcactacccataacttccccagttgatttcatttcaggccctaagtacgtatctactttttgtagtttcgtaaaggagaatacaggggctttcacatgaacttgtttactttcaggatataatccatcttgatatcctaggtcagtcagtttctcaccaagaatcgcttttgtagcaacttgggccatcggaatccctgtgattttacttaagaaaggaactgttcgactcgcacgaggattcacttcaatcacataaacacgattttcatgaataacaaattgaatattcatcatacctacacagtttaaaccaagtgccagtttttttgtataatcggcaattgttgcttgaatttcttgagaaagatactgcggtggataaaccgccattgaatcaccagaatgcacgccagctcgttcaatatgttccataatccctggaattagtactgtttcaccatcacaaatggcatcaacttcacattcttgtcccaataaatagctatcaaccaagacaggatgttctggagaagctttgactgcatgtcgcatataatcttccaaatccttttgattttcgacaatttccattgcacgaccacctaaaacataacttggacgaactaaaacgggatagccgatacgatcagcaatcacgactgcttcttctgcacttgtggccgtatctcctggtggttgaggaatcgctaactcttgcaaagcttgttcaaataaatcacgattttccgcacgatctaaatcttcaatcgttgttccaagaattttaacgccttgttttgtgagcggctcagctaaattaatcgctgtttgtccaccaaattggacgatcacgccaatcggattttctaaatcaatcacattcatgacgtcttctaaagttaatggctcaaagtataatttatcagaaacagagaaatctgttgaaactgtttcaggattactattcataataattgcttcataaccagccgcttggatcgctttgacagaatgaaccgttgcataatcaaactcgaccccttgaccaatgcgaatgggaccagaacctaatactagtacagaaggctttttcgaaacattgctttcgttttccacttcatacgtgctataaaaataaggcgtgtgtgattcaaactctgcagcacacgtatccaccattttatagacgggcacaatttgattggctctgcggaagtcagcgatggcttgttctgtttgtccccaaagtgctgcgattttccgatcagaaaaaccattttgtttggcttctttcaaaacagctacgttgtccacgtgactttcaagggctgtttcaatttcgataatgtgtaaaagtttatccaagaagaataaatcaattttcgttaaactttgtaattcttcgatgctatatcctctgcgaatggcttctgataagtagaacaatcgatcatcttgcgcatggaccattttcttcgttaattccaaatcactgacatgacttagttctgctaactcgttgtgataagcaccaatttctaaagaacgaactgcttttaataaggattcttcaatattgcggccaattgccatgacttccccggttgctttcatttgcgttcctagttctcgagcacctttttcaaatttgtcaaaaggccatcgaggaattttggaaacaacatagtccaaagctggttcaaattcggcataagtggttccagtaactggatttttcatttcatctaatgttaaaccaacagcaatttttgcagctaacttcgcaatgggataccctgtggctttactagcaagtgcagatgagcgagaaacacgaggattcacttcaatcacataatawttaaagctatgcgggtccaargytaatkgaacwttacagccaccttcaatttttaatgcacgaataattttcaargacgcatctcgcaacatttggtattcataatctgataaggtttgactcggagcaaaaacaatcgaatccccagtgtgaatgccgacaggatcaaagttttccatgttacaaaccacaatcgcattatcagccgaatcacgcatcacttcatattcaatttctttaaaaccagcaatacttttttcaattaaacattgtgtaactggtgataatttcagaccgttttcagcaatttggcggagttcttcttccgtatcacacatgccgccgcctgttccacctaaagtaaatgcgggacgaacgataattggatagccaattcgtttggcaaaagccacggcttgttccaccgtattgacaatttcactttctggaatcggttgttctaattcttccatcaattgtttaaataaatcacggtcttccgcttggtcaatcgcactgagctttgttcctagcaattctacatttagctcatctaaaattcctgattccgataattccatcgccatatttaatccagtttgaccacctaatgttggtagaagagcatcaggacgttcttttcgcaaaattcttgaaacaaattctaaagtaatcggttcgatataaacatgatccgcgatttccttatcggtcatgatagtcgctggatttgagtttactaagacaacttcatacccttcttcttttagcgctaaacaggcttgtgtgcctgcatagtcaaattctgctgcttgtccaataatgattggtcctgaaccaatcaccatgattttcttgatgtccgttcgttttggcattagttttgctccttccatgcatccattaattccataaattcgtcaaataaatgaagaccatcgtgcggtcctggagccgcatctgggtgatattgcacagtaaaagcaggataatctcgatgacgcacgccttcaaccgttccatcattgacttccacgtgggtcacaagtaatttttctggatcaattgttgcttcatctacggcatatccgtggttttgtgaagtgaaatcaatgcgtcctgttgcaatttctcgtacaggatgattcaaaccgcgatgtccaaacttcatcttatacgtatccgcaccattcgctaatgaaaataactgatgacctaagcagatgccgaaaatcggaacttttccttggattgcttgaatcatttcaatagcttcaggcacatctttgggatctccaggcccatttgtcaacatgacaccatcgggacttaattctaaaatctcttcggccgttgtattataaggcaacacggttaagttgcattgccgttttgataattctcgcaaaatactatgtttcaacccaaaatcaacgacgaccacattacgcccaatacctggactcggataaggcttagtggtggagacttgtgccacttgatttttcggcatgactgtcgcttttaattgatcaaacgcatgcggcaaatcatccacggcatcaatgatgctccctttcaktgttccagctgatcgtaacttacgagtcagcgcacgcgtatcaattcctgaaattcccggaatccctttgcgctttaaaaattcatccaaggtcatttgttgacgccaatttgaagcaacccgcgcatgctctttaacaatgacacctttacaggttggtgcaatggattcataatcatctcggttgaccccgtaattcccaactaatggatacgtaaaagtaatcatttgtccattaaaactttggtcagtaattgcttcttggtaacctgtcatgccagtagtaaaaacaacttctcctactacattgccttctgcaccaaacgcttttccttcaaatactgttccgtcttctaaaatcaataaccttttcaaacctactgcgcctcctccgaccaagctaatgctccgtcaacaaatgtcataagtgtctttcctttgactgtccaccctgtaaatggtgtattgacagccattgattcaaatgcttctgcatcaattggtgcagctgttgctaagtcaaaaactgcaatatctgctggtgcaccaattsttagtgttcctgcgtttaatccaaaaatttctgccggtttcactgccatccaatcaatcacttgttctaatgtgaaaatgcctgtttcgacaaagttcgtataaatcaattggaaggccgtttcactaccgacaataccaaaaggtgcgtttaaaaatgattgttgtttttcttctaaaccatggggcgcatggtcggtagcaatacagtcaatcgtgccatctaacaagccgtcaatcaatgcttgtcgatctgctaaaccacgtaatggcgggttcattttccaaaacccttcgtcaccaggaatatcctcatcgactaaaattaaatggtgtggcgaaacttcggctgttacgtgaatccctgcttttttagcatctcgaataacgcgcacgctttcttctgttgaaacatgacaaacatgataatgaacgcctgtttctttcgctaaagtaatatcccgagcaatttgtgaagcttccgttgcacttaaaatccctggtaggcctaatttcttagaaacttctccttcatgcatcacaccaccaaataataaagattcatcttccgtgtgcgcaacaagtgccatatttaatgcagccgcttctttcatggctaagtacatcgttcctgccgtttggacaccaacaccatcattcgtaaatgcaaaggcgcccgcttcttttaaggccttctgattggttaaaacttcactccgtagctcttctgtaatgggggcatattgtaaaactttcacgactgcatctttttgaattaagtcgtaaacctcacttaatttttcagccgtatctggtactggattcaaattgggcattgcgcaaaccgtagtaaaaccaccgcgagcagcagctttactacccgttttaatcgtttctttatacgtaaagcctggttctctaaagtgaacatgcacatccaccaagcctggcgtgattagttgcccgttcgcatcaaacacttgctcaaaatctgcttcgtcaaacgattccccgattgcgtgaatcacaccattttctagccaaagtgctgcctcaatcaattgattctcttttttgatgatttttccattcttaattaacgtcttcatttctccacctaggcctttccatgtaaaattgcttccaaaattgccatgcgcataaagactccgttactcatttgcgcgacgattcttgattgcagactttccactaattcatctgccagttcaacatcccgattgactggcgctggatgcataataattgcgtgtttctgtaaacgagttgcccgttcgttggttaaaccatattccaaatgatagccttcttttgaaaaactttccttaccatcatgacgttcgtgctgcacgcgaacaacatcatcacatcgactttttcaacaatttcatctagcggcacatattgtccatagacatcaaactgatgatcgtaccactcttctggacctgaaaaataaatttcagcgcctaaacggtttaataactgcatatttgatttagcaacgcgagaatgtgtaatatctcccacaatcgccactttcaagccttcaaatccaccaaattcttcataaatagtcatcagatccaataaacattgtgtagggtgttgtccactcccgtccccaccgttaataatagaacattgaatcgttttactttgaatcaattcatcgtaataattttctttaccatgacgaatgactgctacatctacaccaattgccgacatcgttagtactgtgtcgtataacgtttctcctttttgaacagaacttctacttgcttcaaactcaatcacttctaagcctaattttttctcagctacctcaaaacttttatgtgttcgagtactattttcaaaaaacaagtttgttgcaaaatattgacgttcttctgggtgccattttgccccctgtttaaattctcctgcgcgacggattaaccccatgacttcacggtcggttaaagcctcagcagttaaaagatgttttaaactaattcgttcagatgtaataatcattcgtccagtcctcctactgttcttcgctacgtgcgttttccggtaaaattaaattcaaaacaattcctaagacagttgctaatgccattgaagacaattcaaaagttcctactttgaagactaagccaccaatgccgatgactaaaattactgaagcaatcaataaattctttttcttatcaaaattaatcttattatcgattaagattttcaaccactggggnaacaaaccga

SEQ ID NO: 105 - DNA, 5855 bp; double-stranded, linear
atagaaaccgcctctctctcgacacgcaacttgcgtgttatctgtacgatttgtttacatgttgcattgtaaacagtttttaggcaatcgtcaagcagaaaataattaacgttgcatgaagaaactaataattgcaaaaatagcaatgtgagctggatagaaaatataaaagaaattccgcatgccacggcctttttcaccattataaagaacaattggaatcgctgctaaaatcatcatccattggtggttcaccccgaatagttcttggaaattatagctggctgctgaaatcaacgcaacaacgccaattgctgaaatttgtaaccactttttgccatggaataaataaaaagctacggccaagagaacaaataaaaacccaccttctgtcatcattagtgatggcacaatcagattgaaaatttggaaaccaattaagatagcagggttgcttaatatgtctggagaactaaaaacaacgagaggtagggcactgattaataaaggcacaataaaccaaagaagccctttaccaatttgtttttgtttaaaatagtccatagactgcatgtagaccgtacctaaaaataacgtcccaaaaatattattgataattaagccacctgttgaaaaatacgcatttaaaaagccgttcagaatccccataatccagaagcctaacaataaccggaacatgtattttcgccgattgcttgtgtgaatgaagccttcagaactttcaaataagaaaataggtgcagcaattcgtccaatccatccgaaccaaccaggcacgcctaaaaaactaaaaaattgcaatagatggtcaaagaccattgaaataaccccaatgactttcaaatgaaagccagttaatgttttacccatagtataaacgcctctctttcataaagaacaatataacaaagtccagaaaaaccaaccatttatttgcctaacagttatcttacaaaattgtttgatttcttcagcttttgatgaaagaaaaaagtgccaagactagtttttataattattctatgctatagtaaaagtacattttaataaaaaacatttggggtgctgttatggctgagatgatacccattgaacctgatgcagttagtactgtcgcagggaaatgccgatttactttgatttttcacgcactcattctgtcctaggatgagtgtgttttcttttatcagggtttatttaagtcactccttttgctttttgttaagagaaaggagtttttttattgaaaaaatggtcattgcaacaagtcgtcttactcgcttttttagcctttttgtttggcggtgtttttatgggggcaggattcctctatgcgttattgaatgctgcgctgttaccattaggactgagtccatttgccaatgagcttttatttggaatgtggaccatggtggcaccaattgcagcgatgctgattccacgagcgggaagtgctgttttggcggaagttttagccgctttggcagaaatgctttatggttcgtatttcggtcctagtgtattaatttctggtgtgattcaaggtctaggtagtgaaagtggctttttggtgacacgctacaaacggtacgatacactaacgttattttatagtgcgattgggacgactatttttagttatgtgtatgaatactttaagtttggttatggcaattacggtctggggatgaacattgctttaattagcgttcggttcgtttctatttgtttctttggtattttcttaacgaaagttattttacgaatgtatcagtctgcgcaagggttagctgtgaaggcaaaatgaatagtatccaattaaaagctgtgtccttttcacgagaacaacccttgtttgaaaagacaaatttagcaattcctcaaggaacgttttccttattaattggcgatagtggtagtggaaaatcaacgctcttacgattgattgccggatttgctccgcttgattaccaaggagaaattttgattgaaggaatggaacgtcgacaattatcaactcgtgaaaaggcgcaaaaaattggcatgctgtttcaaaaccccagtcaacaatttacaatgaaaaccttggaacgagaactgatttttgctttagaaaatttaggaatcccgcctgaagaaatgaaccggaaaatccaaacagcgcttcaacttgttcagactcaaaccttattcacacgagaattagcgacgttatctggtggtgaaaaacaaaaagcggcgttgacagttctgctagcaatgaacccagatattcttttattagatgaaccttttgcaagtattgatccaacctctcgaaaacaatttattcaaatattagcaagactccatcaagcaggcaaaacgattttggtgtgcgaccacgatttcagcgattacgctgatgttgtggaccaagtcgtcacgttgaaaaatggccagtttgaaaagcaaccgttgacgtttatcaaaacaaaaccacagacatttcagcttacaacttctgtggtaaaacaaccaatgctccaattgaaaaattttcgtttgtctcagggaaaacgagtgctacttgaagaaaaagaagcgcttttgtttaaaggaattaccacgttgacggggccaaatggggcgggaaaatccaccttattaaaagccatcgttcagagacaaaaatatcaagggaaaatgttcttggcaggccgccgcttgcgggcttcaaaaaaattgtatcaacacatgacattagcggtgcaacaagccaatcgtcagtttgtcacgttgactttacgagaagagcttttgtttggtcagaacatgacagcagaaaaaagaagaaaacaagaggaagccttaacttttttaggtttaaaagaaaaactagagcacagtgtttttcaactaagtgaagggcaaaaaaagatggtgcaattaattagtttgctgagcttagatttggactgtttacttttagatgaaccttttgctggattagatgagcgagcatgcaattattttgttgaatggatcaaagaaaaaagtgcgcaacaagattttctaatcgtcacgcatcggctagaacctctctctggcgtgagcaattaccgaatagaattgctgcagcaacaactgattatctggcaggagggaaccacatgcaaataaagcaaacaaatgcagcaatttatgcttctttgattcttattttgacctttgaattatctttttctcagtcaattttggcaaatttggcggtttttatgggttgtgtcatttttttaataggccagcgaaaatcccgcttactgctttggttatttttcttgccacttttaccagcaatcgggacgttttggtctatttatttgcatggtacgagtagtcaacaagcctggcttttgtttagccgaacgtatgcctttgccggtttaggactagcttttgctgtaggtgttgattttgaagaattattgttgttattggaacaaaaggggctagcaccgaactttgtttatggaattttagtggtggttcacgccttaccggaagtgaaaagagaaattaatgatttaaaagaagcaagcctactccgtggcaaaacgtttcatttttggtcgccgatgctttatgttaaaacactgctcgtcgctgtttcttggcgagataaatatactgaagcaatgtctgcccatggctatgaagaaggagccaccagaagtcgaaaagagcattttgtgtcagcaaaagtcagtctggggcttgctattttgatcatcatttttacaaatttgtttatttttctaacgtaaaggagaaacctatgacatttacagaacaagccaaagatcaagcgcaagcttcttggcaagggagttttcagcatccttttatcacagaattacatgaaggaaccttgagtccaacgatttttcgctactatttaattcaagatcattactatttaaaacactttagtcaactttatcgcttgattgcggcacaaacgcaacaacctcgattgaaaaaattactcttaacaaatgcggaaaatctcgcgttgggcgaattagctattcgtgaaactttttttgaagaactagcgattacggaagaagaagttgcagcgacaccgattgcaccaaccgcgtatcactatgtttctcatatgtatcgccaacttattgaaggaacgcctaagacggccgcagcaagtatgttgccttgttcttggctctatcaagaaattggtgcacagttagtcaaacaacactcaccagagccactgtaccaacgttggattgaaacctatgctggggaggaagcgtaccaacacgtccaagaggaacgccaactgttagaccaattatatgaagaaagttcaccacaagaacaagcagctatgatcaccgcttttgttatcagcagtgagatggaatacgctttttgggaaatggcctatacacacgaaacctggattggttaatacaaaagcaagtcgtttagtgctcgtaactaacgacttgtttttgtattagaaagcagtaattgtcagttgcttttttgacagggcgtgataagatattcagtgacgcaaaatctgttgtaactcgctcagtaataacagaaacgccttgctaagaaaggactgtagaagcctcatgaattatccagaaccgattgcaaaattgattgaaagttatatgaaattaccaggaattggtcaaaaaacagcgacacggcttgctttttatacaattgatatgaaagaagaagatgctaatgcttttgcaaaagcgctaattagtgtcaagagagatctccatttctgtagtatttgcggaaatattactgaagaagatccttgtgaaatttgccaagataaaaatcgtgaccgtagtattattttagtagtggaagaaccaaaagacgttatgtcaatggaaaaaatgcgtgaatatcaaggcttgtatcacgtactccacggggtgctttcaccgatggaaggaacaggaccagaagatattaatattgcctctttgatcaaacgattgcacgatgatgaagtgaaagaggtcattatagcaaccaacgctaccactgaaggagaagcgacggcgatgtatttatcacggctcattaaaccagctggaatcaccgttactcgtttggcacacggcttgtctgtcggcagcgatattgaatatgcagacgaaataaccttgctaaaagcagtcgaaggacgtcgagaaatttaaaagaaacatcgttggaaaaagaggttgaaatcgaagtaggtcgtttctgtgagaaaatgtcgcagttcaagctttwccgtacttctttttcagtttctttttttcagcggatgcatcactttaaataggacataaggatttcaattagactgatagagcaagatgaagtataatagatacaagtaaaaattgattggagttttcgcacgtgcagggtatttttatcacatttgaaggtccagatggtgctggtaaaaccagtgttttgaaggaagtttctgaanattagctaaagagtcaaaacgaaaaattgtcactacaagagaaccaggcggcataccgattgccgaaaagattcgaacagttattttagatccaaganatgacagaatggatgagcgaacagaagctttactttacgcagctgctcgtcgtcaacatttagtggaaaaaatattgccagctttggaagcgggtcatttagtcctatgtgatcgttttgttgacagctcattagcctaccaaggcgctggacgtngaattggggatggcccccatgcctcaattaatgcggttgcggca

SEQ ID NO: 106 - DNA, 8519 bp; double-stranded, linear
gtttcataactgtaccaattggaaaaactgacatggaacggcgtaactctttttctctcatctccatcctcctctcttagttatttcttagaataacaatagaatgacaaattgtcaagaacttatgttagattttctaacataaaacaaaaaacctgataaatatggacttttccatcttttcacggctgattttctcctactaatcaaaaaaatagaaatgatttgtttttacaaatcatttctaatcaacttaccattttttattctttttcggattcagccaaccatttagacttttttttcgcaaaacctttcacgatataccgattttcattttcagcatattcttctgaaatcattagtgtcatccggcgaagttcacttaatagttgtccgtcagttgggctaatttctaattgataaggctcgagtaattccatcatttgggcacggatagcttgaaccagtcgttctttatcttcagaaattttagttgagatcaatacattgggaaataaggttgggacaaattctttactgtccacttgatctcttttattataaaccgtcaagcacggaatattttccaacgctaattctttcatcaatgtttgaactgtgcgttcatgttgtaaacgatctggcgcacttgcatccaccacatggagcagtaaatccatcgtccgactttcttccaatgtcgactgaaaggcttcaatcagctgtgttggtaaatcttgaatgaagccaaccgtatcggtcagcgtaacttccatgccttgaggcaattgccattttttggttaaaggatctaacgttgcaaacaattgatcctctgaataagttcctgctgttgtcaacatgttgagaatagttgatttgccagcattggtataaccaatcaagccaatttgaaatagttctgaattttgtcttttctggcggcttcgttcacgatgagcagtgacttcttttaactcacgacggatgcctaagattttattccgaatgtggcggcggtccgactctaatttcgtttcaccaggcccgcgtgtcccaatacctcctccaagtcgggacaactgttttccttggccagccaagcgaggcaataaataatccaattgtgctaattcaacttgtaactttccttctttggagcgcgcacgcaaagcaaagatatccaaaattaattgtacacgatcaattactcgtacagctaacgcttcagataacagttgattttgacgcggtgtgagctcatgattaaaaatcacaagatccgcttcataggcatctgttaattgaattaattcttccaatttccccttaccgattacggtttgtcgatcgacttgtggtcgtttttgcgttaaaacaaacaccacttctccattagcggtttccgttaaattcgccagttcttccattgatgcagaaaatgtctgataattttnttccgtttcaactcctactagaatcactttttcatgagtggtcatcgcctactcactctccttctgttgtagccattccgctacttctttttccaacttgggcaaatctgttggctgctgaaccaaattccaccaatgcgcagccattcgatttctaaaccaagtcaattgacgtttggcatatcgccgcgattgctgtttgactgtttcaaccgccatctctaatgattgttcaccagaaaaatacgggaaaaattctttatagccaataccttgagctgcttgtgcatgtggttgctgaaacatctgttttgcttcttccaacagcccttctgtcatcatttgatccacccgctgattaatacgctcatacaataaagcgcgatctgtttccaaacctaacaaataataatcatagagacgagctggtttttccttcggggtcaaaatactataaccggttttatcaaagacctctaacgcacgaatcacttttttgcgattattaaaatggatgctgttagccgctagaggatccttttgttgtaataacagccataaggcttgattccctttttcttccgcaaataaattgtacgtttctctaatttcaggcgagtcatctatctcacgacttcctagttgaaaatcataaaggagtgattgaatatacaaacctgttcctccaacgataattggtagtttccctttttcagtaatttctttgattttttgacgaccctctttctgaaaatcagcggcagaatatgtttcgctgacttcacggcaatcaattaaatagtgaggaattccttctttttctgtttctgtgactttagcggtgccaatgtctaacgagcgataaacttgcatggagtcaccgctaataatttcaccattaaatttttttgctaaagcaatacttaatgctgttttccccaccgcagtgggtcctacaataactaatactttctccaattatgtttctccttcttcttgccaattttgacgagcaaattttgcttcctcaggaaaatcagtatgaacacccgccaattttagctgaaaacaattttccatttcttccatccgattaacagtccacggccgcagcggtttgccaattgtgataagttctttttcatgagccaacacccaagacatttttggatgtaaactatcgacaagcgcgaatgccggtcccgcttgacttaaatcctctgcagattcataaataaaggcaatttctgtcttaggatcagctttttttaatttaactaaacttggaaaataaaaactggaatataaataacgaaacggccagtttttttgcttcatttgttggacgatttttttctcaattccttcataatggataatatcggttttaagttcaatattcaaaaaaccattgaattgttcttctacaagacaatttaaaacatcttccaatgttggaacacattgaacagaaggatttttctgaaaccagcttccagcatctagttgttttaattcgtttaatgttaactgttggatttcaccatgaccatctgtcgtacgatccactgtttcatcatgcataacgattaaataaccatctttagataggtgaacgtctaattcaattccttcagcaccaacacgaacagcctctctgaaagcaatacacgtattttcaggatgggtgcctttacttcctcgatgtgcaataatatctgtcatgctctcactccaatcttgtttattgtaccattggagtgaggtgggttcaaataatgtagaaaaaagaagcctctcacaaatgaggggcttctttttaagatataacaactaacgcattcctggagcatttttttctgtaatatcaaaatttaccgaatcaataactttgttagtattactatcaataatcacaaagttcaaaccttttttatttctagacatttctgtatcatttatttttacagaagcaaatgtttgattttcataattagtataacttgagaatacatcataatttaaagcttcaattttaccaattagtctcgataattctgcatttgtttcaaatgttttattatcttttgaaatcactgcacttaaagtccacgcattgttaccttcgaattttacgtctacccctaagtcttttaaaagcgactcttccgcttgtgaaagatagacttgattaccataaccacttaataaaatagtatattgcgtatcaattaatttttgtaaataatcattaagattaaaaatattcatcaactctgggttaccatttctatatatattgtcccaatctttttctgaaacacttcgcacagactccaagccgtaatattttgcaacagaacgattaacttgtgcatctgaattagtttttacatgcgataaatgattagaataagctgaatattttgttgtattactatatgatatatctggaaacacaggattgatatttccttttttctcttgctcaactaaataactatattgttttgtcaaatctaattttgacaagaatacatcacttacaccaaccattacgttcatgaagaatgtacataccaaaatcacatacaaaacactgtaaattggagaaaacctgatatttactttataatttggcagtgacatagaaaaagcgataatcaagaataatacggctccataatatgaacgtccgtaatctaatgctgctggagagatggctaaaactagcatagtagccattccagaaataaaatatacaacacttaggtatactctttttttatcttgactaatataagcatataaaacaagcaacaagatcagtatcaataaaaataatgataagtgttctttcatttgctcaaatattgtaataattcctgtcattaattttcttggtaaagaccaagtactcctagcaaaataagtagcgcgaatcttatttcctggtgctaaagccattaacgctaaacctatagtattaccagcaacacccgtaaacatccataaagaaagttttcgttttgtataaaactgccagccaagataccctaaaacgataagcaaagctcctccagaggtattttcattacaccaaccagccaaaattcctaaagcaaacatcaaaaaaatcattaattttgttttcgtaaagacgtgttcttcaatgatttctctatgatacacataaaggaacgaaagaataattaaacttccccaaagataattagctgagcctgtctcccacaaaaacacttctccaaaggctggggtaaacaaccaaaatagcacttgaataataataaatttaaatgaattatactttttatcttgcttttgtaaagtaagtctataaactaaatatgttactattgtgtatgccaaagcattaaaaacattaaaaatcccttttggtaacaataaaaatattcttgcaattacatggaccactgaacgtcctgtccatgtcatgtattgattgtattcatctataagtatcgtcatccaacttttcgttttataaaggtattcatagtcatctgcaagtaatggtgttaaattatttaaagtaagcatcaccaaaaatgtaataataattgagcatataaatatcttctttttattcaatttaactttcatctctgcttaccttccgcttttagttcatacttaacatatttatccaaaccagattgaatactatatttcggttcataaccaatggcacgtaatttrgatatatccgctaaggaatcttkgatgtccccagctcgcgcttctttgtattcaactggcaaagtgactttcataatatcatttaaagaagaaattaactcatttaaatcggttgctttcccagtcccgacattatacacttccccaagtgattggtcagaatgagcgacaagattcaatgcttgaaccacgtcctcaacaaagacaaaatcacgagattgttttccatcgccaaagatattgaatgtcacttcttgattggctaataagcgtttgtaagagtccatcacaatcgaaataacgccagaataaggcgaattagggttttggtttggcccataaacgttaaagaagcgaacagcgcttgttggaacatcatataaatgacaatagtttaacacatatttttcagaagcaaatttatccacagcataaggcgttaacggacgaattactgattcttcctgttttggtaaagttggctcatcgccgtaaaccgctgcagaagaagcaaacaccaaacgttttaaatctttctggtatttccgaattaattccagtaattgtaacacactctcaaaattcacttggtgtgtttccactggacgtgctactgagtctgctacactagcaatcgcggctaagtgaaaaatgtaatcgaactgatactcttgtaatactttttccattaattgttgatcagtcacgctaccttcaatgaacgtgatgttttcagatgcgtttaaattttcagtttggcccattgataaatcatcaatgaccacaacttgattgtctttactataataatttgctaaggttgagccgataaagccggcgccgcctgtgattaaaaagttcctcaagtttcccactccaattaaaataatacattaattttaccatttttaggtgtcaaagactacagtttgttttttcaataaaaaaggagagaaaataactttctcaaccttttactaaatattttaaattctttgcgttatttacaaagctcttatgaatgaataagaaatagataatatacacaattgcataagaaatgaaactataaatactaccgccaaaccaaagattactaaagataaacaataatgtaaccaacgtttccaatgcagtgctatttcctattttaatattcatatctttgcatagaaaaatttccgctaaattacaacgaaatgctaaacttactaatatcaatccaacagttaaattcaagttcccaacaacgaaaatcacaaacaacgataagattaacgacaaggcaagtgtcmatacgttaacaaataaaattgttttttcttttctcaacgtttttaaatacgtgttaattagtaaagacatccggccttcataaataactataggaaatagaattcccataaatttcaaactctcgctatattcgggtaaccacatacctaaaacaaatttgacgggtacatataacagcagaattgcatacgtcaacggaacaaaaacacctcttaatgtgacaaataaagacggcaatcgctctttatttgtccgtcttaacaacggaaacattacaattccaacagcattaataaaagttaaaaacatatttgataaacttaaagtaaaggmcaatttaccaaaggtttcgattgtccaacgctgttgaacaaaaaagcgaatggttcccattattngcntacttgctatactactgagcattanttnactacctatgttaatattatcaactatttcaggagtaacttccttcaaactcatcatgttcacacgcaacatgtctttaactctaaacattccccaaaccgtaataatcagtttagaaagtatatccataatgattagccaataaaaatctcgtcctcctaatgcaaagtaaattgcaatgaacaggacatataaatagcgatcatttctggataattgagcatattccttaatacgatttgttgactgaaaaacatacagaataaacgtttttgcaattgtaattactgaaacaatggccgtcaatatcaaaataatcccttgatattctttcggcatgaaaaagtaagcccaaagaatgacaaaagcagaaatacaacattcaaaaatcgctaaataccagaattgagaaccgagatttcttttatctaaattttcgtattcttctcccccaatttttaaatagataccatcaatccagcctaagtggagaaatccaacatatgaagaataaaaaacataaagttgccaataactgtattctgtaacgcctaacaacttagggacaaataaatttaagagaaccgaaatacccaacgttgcaaaatttgcagccacagtataataaaggtttttagccaccatttttgcttttgaattcatagcattatgctcactttctaattttatatttcatgatatggtagatatctgtgctaaaataaaacttgtgatgatacttaaaaaaggcacatagaatcgggattattttttttctttctaataaagaaactcgcatattcaactctttaatcaaatttgaaagaactttgtctttatattcaaattcttcaacatgtggttgattatttaaataattctttgcagcctctgtacgctgtaatctccggcgtaaagtattcaatctttcctcaaagtgattttgtttcttagctaaatcaatttcttttttaaaggaactttgtccatgtttacgccatctaattaattcttccctaacaatatagagcccatcacttaataaagaacttccccacatcgccatatcatgtacaggattttccatttcagatgcgtatagattaacattggcaatgaagctctttctaattgcatatacacatcccgggcgacgtaaaaataaattgttctcattaaatataatctgttctgctttttgattaggcaatttaactgaatcaattttttttaattcctctgctaatcccccaggttctactaattcagtataatcacttactaaaactttaacatcagtgtttgcaaaagcttcacacatcacttcaattttagatgcatcccaaatatcgtcttgatcacacgtaaaaacaatttctttagtagcagcattcaatagattaaagaaatttttgcgccaacctaaattttccgkgttgatttgcaaatgccacgtttcacctaawttawtttcagaaataaagttctcaattattttaactgtrgaatcygtagrgcagtcatcccaaattaatacttcatcaatttttttcgactgattttttaaggaatccaactgttctaagatatttt

SEQ ID NO: 107 - DNA, 1508 bp; double-stranded, linear
ttttggggggataatcaaattcccctgngttccgccacaagccacacaatgatgcccattctggtcgtacaccaaaccgttctaacaattgaatttcaaaaatatttgtaatgatttccggatctttttgctcatttaaagcggataatgccatgtgggtaaattgaaataagttcggatcatagtgctgatcttcaattgctgcatcgactaagtttaaaatatatgttccatatgcgttaataaatatgtcttgttgaatgtttcgaaaaggttgaacttctttgctgctattgagaaaagataagccttcttctctaaagtttccgatgtagacggcttctgtaaatggcagaatcgctggcaaaagaggattattttttcgatgcgcacctttcacaaaaaacatcaattttccataggattctgtaaaaattttgacgagtttatccttctctttaaaatccttcgtaaataaaataatgcctttggtctcccctaatgccattcaattcacttccatttcttatgtaaattagtgtagtgtttggaaagttcgtttatacactcgcttcccaaacactactttcttaatattcttctttgcgataaccaaaatcttgtaaatagatttttttgtcacgccagtctttttggacttttacccacagctccaaatacactttgtcatctaataaatattcaatatcttgacgcgccttggtaccaatttgtttcagcatttttccgcctttgccaataatgatacctttttgactgtcccgttccacaataatggttgcttggacatggactttatcgttttcatcccgtttcattgagtccacaacaacagcgacagaatgaggaatctcatctcttgttaaaagtaacaccttttcacgaattagttcagaaacgataaaatattctggatgatccgtaatttggtcatcagggaaatattgtggtccttctggcatttgctcaacgagaacatccatcaaatgctscaaaattatttccttcagtggcagaaatgggaataatttctttaaagtccatttgtttcgaatagtcttcaataatactcaataaatcatctggatggactttgtcaattttattaataatcaagtagactggactattattatttttcaatcgttcaataataaagtcgtcacctttcccgcgtttttgatcagcacttaccataaataaagtagcatctacttcacgcatcgcattgtaggcactttccaccatgaaatcgcctaagcggtgtttaggtttgtgaatccctggagtatcgataaaaacaatttgtgcttcaggaattgtataaattccttgaatcttattacgagttgtttgtgctttgtcactcataattgcaattttttggccgacaattcgatttaacaatgttgatttnccaacanttggtctgccgacaatgggctacgaaaccagatttaaggttcagttgtcatggaatncgccgc

SEQ ID NO: 108 - DNA, 5918 bp; double-stranded, linear
atgaagtattcaaaaggacggtacgtccttgtagtcttagtaatggtcttgattgcttggttaatttttattttgtcaggtttagcgaacggtttagctcaaggaaatcgtttagccgtagatcaatggcaagcgaatcaagtggttttatcaaaagaggccaatagtaatttaaatgtatcagtgttagatgaaaacgtgaaagaaacgatttcaggaggcaaaattgcaccgattggtcaacaatctttagccatccgcccagcagatgataaaaaggctgaattaacgaatgttagcttatttgggattgaaaaagaaagttttttaatgccaaaagtgattgaaggaaacgcatttactgataaaaatcaagtgattgcttcagaaacattgaaaaatcaaggatttaaaattggcgacaaattaactgcagggaaatatgatgagcaattagaaattgtcggctttatttctaaaagtagctataacattgtgccagttatttacacttctctggatacttggcggtcaattaaatatggtgacaatccagcaatggccaaaatggttaatggtttcattgttcgcagcaaggacaacacggaagttaaaacgactaataaagacagccaagttctttcaatttcagattttattgaaaaactgccaggatacagcgctcaaaacttgaccttggatggcatgatttatttcttgattgtgattgcagcgttcattatcggtatttttatctttgtgatgactttacagaaaacagcaatgttcggcgtcttaaaagttcaaggggtgccaactagtttcttagcaaaggcagtcatgctacaaaccgctttattggctgttctaggagtggcgattggtcttgctttaacgggaattaccgtgctctttttaccagaagcgatgccttatgcaactaatggaccacgcatgattttgtttagtgtactattgattttatctgcattaattggcggggcattttcaattcgaacgattgctaaaattgatccgttaatcgcgattggaggttagagacatggcaaatgttttagaaatgaaaaatatttataaaaaatatggtgaaaaacatacagaagtgatcgcgttaaaagaattatcttttgcggttcagccaggtgaatttgtcgcagtaattggtccttctggttctggtaaaagtacctttttaacgattgcagctggtttacaggcaccgacaagtggcgaagtcattgttggcgggcaatcactaaataagttaacgaagaagcaacgtttggcgcaacgttttcaaaaaatcggctttattttacaaagctctaatttggtgccatttttaacagtggaagatcaatttcacttaattgaaaaagttgataagtcacgtaaaaatagtgaattaaaagagcaattgttagagacgttgggtttaaaagaattacgaaatagttatcctcgtgatctctctggtggggaaagacaacgggtagccattgcgtgtgcattgtatcatgagccagacgtaattttggcagatgaaccaacggctagtttagatacagaaaaggcgtttgatgttgtcaaattactagcgaaagaggccaaagagaaagataaagggattatcatggtgacacatgatgagcgtttgttgaaatactgtgatcgagtggttcgtattcgtgatggtgaattgacagagtaacaaaacaaataaaagagaacatgatcggattgctggagcaatccgatcatgttctcttatttcttttcaatacagaaaagaacaggtggctgatttttttgattgataaactcataacgtaagacactgtaaacatcttgtggtaaggcttgcgtgtaattcgtgaccaaatcaagttcctctgaaccaccttcgtggccataataaacgactaaaataatgcgacttccttttaccaaatgaggcagtaacccatctaacgcctgtttagtcgtagtgggttttgtaataatttccttattacttttaggtaaatagcctaagttaaaaatagcggcagtgatttctgtttcttcatctaggacagcatgaagatgttcatgtcctaatggaaataacgtagtttgtgggagtaaattaagttctgttaacttttgttctgtattgatcaacgcttctttttggatatcaaaggcgaaaacttcaccagaagggccaaccagctctgctaagaatgctgtatcatgaccatttcccattgttgcatcaatgacgaagtcgccaggttccaccacttcttttaaaagttggtgactaaaatgtagggctgtttgtagcattaattgaaaacttcctttcctgaaatgacagtatattttccttgataactgttgcggcgtttcatttccgcatcaatcgcattgagaacttcccattttttcaagctccacatcggtccgataattgtttcaaagggagcatcgcctgtcaagcgatgaataacaatttcgggtggaatcatttctaactgatcacaaatcactgaaacataggcttctttgctcatcaattgtaagcgtccttcattataatcccgcatcattttggtatttgtcattaaatgaagtaagtgcagtttaatcccttggatatctgaatcctgaatagttcgccgcacattttcgcgcatcatggcaggtgtttccccaggtagcccgttaattaaatgtgtacagacccgaatcccgtgtttccgtaatttagccacaccatctagatatgtttgataatcatgagcacgattaatggcagcgctagtttcctcaaacgtggtttgcaaacccaactctacccataaataaaagcgttcatttaattcggctaaatagttcactacctcatcaggcaaacaatcaggacgggtaccaatggataaaccaacgacacctttttcattgactacttgttcaaaccgatgacgaataacgtcaacgggcgcatgtgtattggtgaaattttggaagtaaacaatgtattgatcgacagttggccatttttgatgcatcaattggatttctttttgaaattgaagcggcaggggatcgctaggtgcaacaatcatgtcgcctgagccagaaacactacagaacgtacaaccacctttggcaaccgtcccatcacgattggggcaatcaaagccaccatcaattggcactttaaaaatcttttcaccaaactgttgacgaagtgcatagttccaagtgtgatagcgtttatttggatcatctgaatagggaaaaatttgcataatcaagacttctttctagcgttgtttgctttgaaatcgccaaacaaagcgtttttctaaataaatagggtaacttaataacaaccaagctaaaccaagacaaaaaccacctaagatatcgctagggaaatggacacctaaatagattcgactaaccccaatcatgaaaatcccaatacctagtaaaatttgcacacaaaggcggaccgttttatttttaatgaaaattggcagaatcaataaaatagtgccgtagaacaaggtacttcctacagcatgtccgctaggaaaactatacgtatgttcagttactaaatgctccaaagtaggacgttggcgcataaagaataattttaataaagaattacctacgccagcaattaaggcagtattaataaagagccataatgcttcagcataatatttccaaacaataaacagagcaatgacaacgattgctaagatgataatcgtcaatgaattggcaaatttggtgtaccaaataaaaaagttatttagctgtggaaaaggacgacgaacaaaagaagtaatcgtttgatcaaagcctttgagccaggttggataaaaacgaacaacatagcctaaaaacataaatactaaaagaaaacaactacctgcaaattgataataaagtttgtttttcataaaaaatcctttcaaaatttaatcgcaacaatccgtattataccatcaaaagggtaaaaaattaaaagataatttcattgcctgatttggaggggatacagatattaaaaaagttctggcaccacaatctctcattgtggtgccagmacagatgttttaactggcacatgtttattgattatcatcatcaggagtatcaacggtaatatctccgaattcgctagaaaggttaaactctgtatccgcacgaccattcttataagatgttcgctctttgtttaaaagttgaacatcgcctaattttgattcccctttgattgaaatgttacgcaaaatttctccagaatttacataaatatctccatggacaagagcgacagttaattttttaggcacagcaggcatgtctaaagaaaaatcaccattttcacttgaaaagttagcttctcctttgaaatcatagacgctaatatcgccatctgtcgttgttgcttggatgtttccacgagcattttgcactcgaatatcaccagaagtagtcgtatttttgatttcatcgaaataggctgaatccaacgttatatcgccgtcagtggtttcaactgttgctgttttagcggaagtatccgctgaaaggtagataccatctgaagagttaagcgtcatttttttggctttaacacccgatagactaacataagaatttggtagattagttgttaattcgtctacgttaaaagcattcaatgaaactggtgaatgggttgagccatcaatcactaactttttcacattattaggaatctggacactcacgttcggtgtgaagtcactaaaaataccaatattaaagaatgacaattcggattggttttgtgtacgagtggtattgatggttgctgttattttatttttttcttctttgacatctaaggtgccttcagcttttgaataaaaggcattattcggtgatcgtaaccccattttgttactatcagttttataaatggtataaggtcctttgccttttaaggataagtgaagttcttcgcctgcttgtttattttttagtgtataactttcttttagcggtgtgactgatttttccgcttgcttgtaataatagacggcgccagatccaccaattagcatcgctaagacagcaatggataagagaatccctgttgtttttttcattagatatcacctcgtaaaacagcaatgttccattggaaataacgcttaaagacatgtgctgaaaattttaaaattggtagaaacagtaaccaaccaatgattgatgcaccaaataaaaagagactcatagataattggaaaaaggaagcggcatttgcttgggtaataacactataaataccataaattggtgaaaataaagttgcagctccggcaatgcmacaaccgacgtacattaaggcaatccctaaaataacccaaaacatgaagraaaaatttaaacagaaaataccaagcacttggaaaaatcgggttagtggccgatgctgtggtcgttgatagtatggagaatcattatcatagtaaaattcagattcttcttcatagggatgatcataagcaggtgtagccgctggaatttcttgccagccattattttcaatttttcgttccgtcaattcaatgccttgttctttcaaaatttcttctgcgataacccgtggtttccccaatgattttgccacttgttcttctgtttcgccttccgcaacacgagcatcaaataacgccttgtatttcgcaagaataatagcttgatcttttggatttaatgcttttaaataaattttcagctcaataataaaatgttctttattcattccgctccctctttctacacgattcatttctcatcttaaactataatttctttttgagcgaataacaagaggaatt

SEQ ID NO: 109 - DNA, 2350 bp; double-stranded, linear
catacccgctcaatcatgaggagactggctaaaagtaatcctagcgtttgcatctttttatttttattaaagaagtgccctgctaaccaaccttgtccgccatgaatcaataacgaaaaaacgaaccattgtggatagcctgacaataaatcaattaagccaccgcttaaagctccgactgtcaagccaccgatcggaccaaaaagtaaactagcaatgtaaatccctgcatccgccaatgtaacaaagccatttgttgctgggacggggataataaagaccattgacacagccactgttaaagcggtaattactgcatatagactaatttttcttgtcattatccgccacacctcctgctagtaatccttcatgccacacacttccaaaagctgcatttagctggaccccagaaacaatggcttcatgaacgtatgtttttgctaaatcaactgcttcaattaacggatatcctttaactaaattcgcaccaattgcagaggcaaaggaacaaccagcgccatcaatggtgtgggccattactttttctttgaccaattgaatatgttgttgtccatcataaaaaaagtcacgtgcttcttgaccaagccaacgattaccacctttaatcaccaccgttgccgctcctaaagagtttaactcttccgccgcttgttggacttcttcgacggttgttaattttctgccaatgagtaattctgcttcttttaaattaggcgttataatcgttgcgaatggaaaaagtttttcaatcaataactgcatgtatcttttttcataaactgaagtcgtttctttaaaagccaagacaggatccaacaccaccggcagacctgcgtgctttttcaaaaaggttacaatttgtaacatactttcttcactgtgaatcaagccaatcttgatgccgtctaaactcccggcaggtatggaagcgagttgctctttccaccaaagaagtctcaaggtcatgaatctgaaaatgattcttgggggctgtagcaaggcaagttaaagttgataagccaaagacttgatgattttcaaacgtttttaaatctgtttgaatcccgccacctgaaaaaggatcggaaccgccaattgttaaaattatttttgtcatttgtttcgctcctttatacactcagttatcatacaaagttttctaaaaagaaaaaacagccaattggcagatttttagctcagccactttttaagtctttcgttatctttttcctttccaaaaaaagagtgacctcatccgtcaatgaagtcactctttctttggatttaacacttattcgtcaatggctgttacatcaatgtttaattcaaacaattgtaatggagaaactaaacttggtgcgttgttcattgggtcaattgctttgccgtttttagggaaggcaatcacttcacgaatattttcttccccagccaatagcattgctaagcggtctagccctaaagcaatccctccatgtggcgggaagccgtaatctaatgcgtctagcaagaaaccaaattggtcttgtgcttcttcttttgtaaaacctaacgtttcaaacattttttcttgtaattctcgtgtatggatccgtaatgagccgccgcctaattcgtagccgtttaagacaacatcgtaagcttcagcatacacagaggctgggtctgttgctaagcggtccacatcctctgcttttggttgtgtaaatggatgatgagcagaaacatagcgaccagcttcttcatcatattcaaacaacggccaatccacaatccacaagaaattgaatttcgattcatcaattaaacctaattctttacctaaacgtgtacgtaccgcacctaaagcagcggctacgatttcaggtttatcggcaccaaacattaaaatatcaccgacttctgcattggtagcagcaattaattcatcactaacttctgttaagaatttagcaatcggtccttttaagccatcttcttcaacttttaaccaagctaagccttttgcgccaaattgactcacatacttacctaagttatccatatctttacgagaatacttatctgcggcgcyttttgcattcaaagccttcacatgtccaccattttccaacgctgcttggaaaactttgaagtctacgtctttcactacctctgcaacatcaattaattccatagcaaaacgagtgtcgggtttatcgytaccatagcgtgccattgcttcgtcatagctcattcgtggaaacggaacagaratctcaattccttttgtctctttcatcacttcagccaacatattttctgtatatgtttgaatttcttctgg

SEQ ID NO: 110 - DNA, 21591 bp; double-stranded, linear
tgaattggcctcgatgacaggtcttctacgaggatacgtgcaacaattagacgtccctgaacagcgtgcactaacagaagaactagccaaaatttgcgagttaatctaccatgtcaatccaacgacccgaacaaaattaacagtcacagaggacgaaatagcctggcttttggaacgtgtcaatgctatgaatgaactgacatacgaagaaaatcgtccttttgttttaccgatgggcacaatctgttcctcttatgcacacattttaagagccaaagccaaagatattgttcgtttactttatcgcatggactatggtggtaaaaaaattgatccgcagctgtatgatgtagtcaacttactctcaggttactttttcatgttagccttgtacctaaatcagctcgaaaatggtgaagaagttccctttgtttctcgcaactattctatttaaaaagtacaccgaccgctaacgacgaattgctagcggtcggtgtacttttatacaggtaagtacgcttctccttttgcaaatagtttagcagtaccaccaataatgactcgattttctttcacttcacaagttaaaaagccgcctcttggggacacttgataggccgaaagggtcgtttgattgagccgttttccccaataaggaattaaattggcgtgcgcagaaccacaaactgggtcttcgttaattcttagtttcgggaaaaaagttcgtgaaacaaaatccaccgagtctcctgatgccgttacaatgactcctactcctaaatccaatgcttttaatgcagaaaaatctggtgtgatttttgccactgtctcttcgtcttttaagacaaaaaataaatcgcgacccaaataagcttcataaattttcgtgcctaaagcggcttcatactctggcaaaattggaatcctttccggtaggatataaggaaaatctagataatagtattcctcttttttggtcactgcgagcggtccactttgactagtaaaatggagtgtttcttccgcaacggaataatagttaaacaacacaaaagccgtcgctaatgtagcatgtccacagagatcgatttctcgttccggcgtaaaccagcgcagggcgtaactttgtccctccttgaccgtaaaagcagtctctgacaaattattttcaatcgcaatgttttgcatcaccgcttctggcaaccatttttccaaaacataaacagcggcgggattgcctttaaaaacttcctccgcgaaagcatcgacaatataatagggataactcattttaattctctccttgtattttttgataaatgtattccgcgcaacacaaatcctcaactgctaagccaaccgcatcaaaaatcgtgcggcctttctgctccgcctttagtttaactttgccagtgactaattcgccgagagaacctacaattttttcagctgaaaaggcaccttctgaaatcggaattaaaagatccccgctttcttttaatgcagccgcatactcatctacaaacacttgactgtttttaacaaggtcgcttgttaattctctggaagtcggcgtgaatgtaccaattgcattgatatgggcattcggcaaaacgtctttttcttctaaaaatgcgtcctgactggaagttagtgtacagataatttccgcttcctggacggcttcttggacagaagaacaaccaataaaggtacattcggggtaattgtgctgttgcttagcgattaattttcgtgcacgttctgctgtgcggtcatatataaaaaccttttcaatcgcccgaacgctttgtagcgctgcgagatgagatgaagcttgttgacctgcaccaatcaaagcgatactttttgcctttggagctgctaaataatcggttgccaaagcagaaacagctgccgtgcgaasccacgtaatcgcattggcgtccatcatcgcgactggtcttccagtagaactatcaaacaataaaatttgaccaagatgcgaggccaaatttttttgtggattttctggaaaagctgtaatgatttttgccccaaaaaagcgattttttcctaagtaagcaggcattaatgcaaaaagattttgatttttcccatctggtaaaacctctacatggcgctcactttgcgaaatttttcctttttgcaactctgcaaagcaacgtttcatcacttgaattgcttcggaaaacgacaattgttgaataaccctctcataagaaataatgtccatctgaattcctccctttgcgctatcataaaccagacaaacaatacactcaatgctataattgtatggaatacaattttatagaaaggaagttcccctcatgccgattaattcctatgagaactatgtgttgtcatggcgccctgttaaagaacgtttaacaagaccttattaccaatcattggttcaacaattagaagcggatatcttatctggtgcgcttcaaaaaaatgtgaaattgccttcgcaaagagaattagctgattacttggatctgaatttcacgacgattggtcaagcctataaacacgctatggaaaaaggcttactttataccaacatcggttgcggcactttcgtttctcccaacgcgtttcactcaattacaatctctaccaaccaagtagcggaccatctaattgatttagggctggttagttcctttgatatgtgtaatcagcggattttaccttttattgaatccgttagtaaaaatgcggcccttaacagtttgctaaattatcgcgatcctttaggtacgcactttcaacgagcaaccgctgccgaatggcttcagacacaaggcgttcggaccaatgccgaagaagttgccattgtatctggtgtccagaatggactggccgtgacgttagccgccgctttttctccaggtcagcggattgccgtagatcgatacacgtattcaaattttattgaactcgcccagctttatcatttagaaatcgtcccgattggctatgattccgaggggatggacccagagcatttactgcaagaatgcaaaaagaaaaaaatacatggtattttcttaatgcccgcatgtaataacccgattggtttccaaatgtctagcgcccgccgaatgactttagctgaaatcattcagcaagaacacttatgggtaattgaagatgacattcattcttttttaacaacttatgcacagcaagcagttttaccaacgtttcaagaactcttacctcaacaaacgatttacttagcggggatgacaaaatttgtctgtacaggcttacgcattgcgtaccttgttttccctccgcttcttcgccaagaaatagagcgtgcgatttttaacattaacgttaaaacttctggctttgatgctgaaattgtcacccaagtcttacgctcaccagttgcaaaagaattagtgatagaaaaattggctttaacaaaacaagccaatgacttatttgataccatttttgggttagctagacctagcaatcccttgccgtactaccgaactattcccctttctaccgaaaaaacggcgccgcaaattgaacaagaatttctccaaaatggggtacgtctttttcactcgagccgctttactgtgcaaaatcagccagatgcttttttacgaatttccttggcctccaatcagcttgaggtattggcgaaaggattaaccattatccaagaactcttaccgacattaaacgaaaagaaaggacattccctatgaattcattgccaatatttgaaaaagcagtgggcacgattaccctgctttccgaagaaaaacaaaatgccgaatatgaaggctttttatgtcaagttaatgaatcgcaacaacttatccgcagtcgcttagccaaaaaaacgccgaaaaaagaaggctattttgtagccttctgggaaaaaaatcaacaaaatcagaacgaagcctttgatgcaacggaagcccctgaaatgttagcaattgtcattgctgatcaagaaaagcaaggtctctttcttctgccaaaagaatgtttaatccaacaaaaaattctcaaaacgcatcaacaaaaaggcaaaatggcggcccgtttttatccttcttggtgccaaaaccttaatcaaaccgccaaaaaaacacaaaaatggcaactaacttactttactgatttatctaaatactaaaaacgtcagctggcttcagaagccagctgacgtttgtttcttctactgtttaaccaattggtggcgtaccttctgcgttcccagcaatcgcttcgatttgaatctgagcaccttttggtaaatccgtcacaccaatcactcttcttgcaggcgtgccttcagggaagtacgtttggtagacgtcatctactgccgccagctcttcaatctctttcacaaaaatgttcactttcaccagatcagctaagctgtgatccacactttcaataatcgctttaatattttctaaacattgcgtcgtttgttccttgattccgccagcgactaacgcatttgttttagggtccaatggtagctgagctgatagatggttgtaatgagaaaaagcaacagtttgtgtcgaaaatggacacttcggtgcgtgctctgtattatttgcttcaataattaatccatgtcgatcttcaatcgcttgtggtggcgtaccatccccatgagaaaccaccgcttctacttgcaccgccgcgcccattggtaaatcagcaacagcaatcactgttcgtgctggcatataattgaccgtgcgcgcaattcctgaatctgggaaaaaagcggcatgtacttgattgacagcttccagcttagataaatcttttaaataaatgttgatcttcacaatatcatcaaaaggcacatcaatactggttaaaatggcttttatgtttttcaaacattgctttgtttgcgttttaacacagccagccacaactctgcccgtttgaggatctataggcaattgtgcagacagattgttatagtgagaaaacgcgaccgtttgactggctagagcatcaattggtgcctgaacagtctgatttgttaatttaattaaatccccagcttgaggtgcattagggatagttccttccccatttgaaacaagtgcctccatttgaacagaagcgcctaacggcaaatctgcgacggcgaccactgttttagctggataataatgggtaaaaaaggccgcatagacctcctcaactgcggcagcatcccgcatatctttgacaaaaatggtcattctgacaatgtcactcatcacatggttgatactttcaacaaccgcttggatatttttcaaacattgtgtcgcttgggcccgaatgccaccttctaccaattgtccagaggttggctcaataggtaattgtgccgacaaatgattatagtgggaaaatgcgactgtttgggctgcgagatgatgctttggtgcacgctctgtatttcttgctaagacgatattttcattactcataactctactcccttttttagcattccaacaaaaatgattccgcttacatttttaagcattaaacttccaacaagatcctttttattttcctgcttttctattaatggtgatagctttccaccaccacttctttcagtctacaataagaacaggaacatttcaataaggcattcctaaattgattgttggcccgcaaacaaatcttcttcagttaaagaagactggcacgaatcaagcttgattcgtgccagtctttatagataactcgttagctttaactagttttatttaaccaccatatactcacgataattttccgagaacgtatccattagcgtataaattcgttcaaaatcatagtcacgacgagggtcatcataccaaacacattgaatacttccaataattggaagattcgggctacctgctggcacatctgtaaatgcttttttcgacatatttgctaaagcatcatcatattgataaatgccagaatcaacattgccagcgacccaataccacgcatcattggtattaaaaattttgtgtcctttttgaacaaagtactcaggtttggctacgtcatatccgctccaaccggctgtccaataagaaataataatctctgggtcaaatgtaccgaaagaatcgtcgctgttgtaataaatgccatcattgaagctcattggctgcatgcccgcatctttaattattttagctaaatcattcgcataagcgacaaaatctttgtagcgcccagaagattgcagtttcgcccaaccgcctgtatcgacatcatttgcatactcatcgccgccaaaattgaaaatttcactatgcgcggaaaaataagccacgtacttactgataatcgcctttgtgaaattcactgccttttggttccctaaatctactgttcgttttgagccatcaaaagcgggatttttaatcgctagtttttccatggccactaacaaggcatccatatgtcctggactgttaatcacgggaatgatgttgatgttgcgcgctttcgcaaaagccaacaaccgatccatttctttttgtgttaacgcgttgccattaggatcattgtaatatgcgttgttgcctcgttggattgcttttgaaacccggttgtggttgtattttttaccattcacattgaccgacatatcatccaagataaaccgtaagccatcatttcctaaaattaattggacatctgtgtacccattttgactagctttggccactaattcttccagttgctccacggaaaaatattttcttcccgcatcaatggaaaagacactttttaaaggttgtgtttgtttctcttttaaattatccaaagctgtttggacctccgtttgccaagtagtcacttgtgcggctgtatacgtttttcccgcaagttctgtggcgactgtctcttttgttgtttgtagtgcttgaatcgtttctggtgtatagctttctgccttttcaatggctgtaactgcttgatccaacgcacgatataaagtggttaagtcaatggctaacaggcctttttctaattcagcatcataggtgtttgaaatcccttggccataatcgccacctaaaatagctttattcacatcataaagcgttgttgcttgtgtcactgcttctgcggctttattttgtgcttcaaggtctgtgttggcgtagctaattcgttttaaatagtgttgcgcagccgctttcatctctgcaagagaaacgcctttactctctgcaatggccgtttttgtccaaagtaaattagaaggttttatctgatttaaatcgtcttcattataggtgcgaccatcgcgatctaaggcatagaggaacatgccccctaaattattttcataagaataacgagctactttatacatgttactttccatatacggctcttttgtgtcataccagcggttgcgatcttgctcttctgggaaagttaatcctggaacaaatcgttccccattgagaaccggacttaaattatttaatgctcgttgcgtgcgttggtcatcgctgccatactgttgatacgcgagaaaatcgaaacagtcactgacatcttgtaaaggtggtaaatattctgcattggtatcatacaaaaatggacgatccgttcccgacttcggtccaatgtattttgataatgcacgaatgacaccattagatagaacaatatctttttcacttggacgagtttccatgtcaatatctaacccatcaattcctaaatcatcgacaaatttggttaacaactctttcgcataagcatcaaattctgcttctgtaggcgttgttcctgcataaggaacttttaatagctcgctgtaatcaatcccacgaactaaacgaacacctcgtgcatgcagtgctggcgcatactcattttttaacgtatcataaaatggctgtgcaagtgcttcttgtccttttggcacataactaaagacattcacaatgtcaataccataaggaatatcgtgcatcgttagccaattttcatctggcaatgttgtattaactccttgcatcgttttgtcacgccaagcccgataataaaccataaaatgtttctcttgggtcggctcattggcttggctgatcattggttgatgaaacagactaaataagataaacgccaagccaaccaataacgaaagacccagccaactgacaattgtttctctgttttctccttttcttgtcgataaattgttccccactttgaacaccattcctttctgcactccgttcatttttgtgtatccacctaaaaagaaagcgcatacacaaccatcaatagaataacaaaaaataacgaatttgcaaaatagaaactggaaaaatgagtattttctataaaaatcttttcccgcctaaaatcacttttgttagacggcgtttaaatggtaaattttgagacttgcaagaaaaacaggcctatttttcttgcaagtcccctttacttagtcgtgatcaaccaataaataatcactgtttgaattttttgggatctactcgtttgaaatttatctcatcatcaataactgctctatgctttaaatctaaatgatatcgcatatcatgatttatatttgaattttttttcagattatcattatatgtttctaaaaataattttaaaactttttcaggttgccttatacctaatacttttcttgatatttctaaaccatttaccttttttataaaccatttttgattgtatttcattatagatgacaaattaaaataagcttggaatacagctcccgcatctttaatttgagtattttttttcaattcattgtattcattcaataaattctttagctcttcataattgtaaaaactgaacattccattcttaacttctgtcatcattttattctgcctagtccaagatcccatgcatacagaaactaactcaactaagggaattttgttattctctatatgtaaatcttttaactttttgtattcttcatttcctaaaattacgtatttattaatatagtctattacccgccacttacatgctgtattatttattttaataatgtcattcatttctttgtttacggaaacatagtatggcacgggtaagccatattttcttgcaatactatatctatgttgcccatcgatgatctgcattgtggagtttactataatgggtcgaataattcctttttgtagaatagaattttccagtttcttgttcagtgtaacttcacgattacttcttaaaaagctgaacatttcatattcttccgttatataaatatcactcatttctctatccattttttatctcctttattaaaaacatactttgaatatctcttattactggcttcccatcaatttcgatttcatatttaattgctttgtttgaatttctatgcaatttataattatatgctttcaaaaactcttccaaaacgactccttggtgaaaaattccttctataacatttttagtttttattttaaatccattaattaacctataataatcgaaatcttttacaataaataattctacataagcaaaaaatgtttgctgtgaacttctcaagttcaactcttcacaaaagtttccgtaagaatctaataatcttataaattccttgtagttataaaatgaaaattgacctgtttttactaattcttgtgaattaccatcatagtgtttatttcccatagccaaagatattaaagaagagggtgagatatttttatacttctttacaataaactgtagttttttatattcgttcataccatccatcgaatatttcgtatgaaatctccaatttccagtcttaatgtcgaattaagctcaattacatcatctaagttcagacctttcgaaataatataaggaatggacttattcaattttctggctatcaaaaaacgagtttgtccatcaataatttcaaatttctcatttacatctataggaactaaaatacctgatttttctatagattctattaaactacgcttttctttaattgctctgtttccctttaaaaatttaaattttgaataatccttagtttcatacaatttaccaatcaactttcccatattcttcactccttataaaatatatttttaatttatatattttataatatcgtctaaaaaaaagaaatgcaattcttttttaatcaatataacaccaaccacacattaaaataacattttggttaaccatccatgtttattaattcggcgattttcacaacaattttcccttgcgctcgtcctgtcaatgaataatctaccgcttcttgaatttggctaaaaggaacgactcggtcaattatcggctgtaattttccctgttcaataaactcagtgagtaaagctaattgctcgccatctggacgcataaacaaaaaatgataactaacatctgtggcttgctccaatcgatgaatcttgcgggtagctattttaaaggcccattgtttccaaagcggcaagccatactctttagcaaaacgttcgttgggaatgcctgacaatgtaacaacttttccctgaggtttaaccactgagaaagctttttctaagattgtcccccccattgtatcaaacacataatcatagtcggataaaacttcttcaaaattttgtgtccgatagtcaatcacttcatctgctcccaacgcttgaacccattctttatttttactactcgttgtggtggcaacgtaagcgcctgctagttttgctaattgaatcgcaatggttccaatccctcctgaacctgcttgaatcaggactttctggcctggctgtacattcataatatcatgtagcgcttgataacttgtcaaaccgactaacggaatggccgcagcttcttcaaacgttaaatttttcggcttcatagctacagccgcttgatccactgcaatatattcagcaaaagttcccacgcgatttttgggtactcgcccgtaaactgcatcgcccagcctaaaattttgaacattttttccaacagagacaacaatcccagcaaaatcactgcctaaaatcagtggcatttgataatctaaaagcatctttactttgccatcttttgtttttaaatcaatcgggttgatactggcagcgataattttgaccaaaacatcattgtcatgaatggtgggtaanggcacctcctcgattgctaattctttttgtccgtatttatgaattaaagcggctttcatcattgaatctttcctctctttctatcccttttatcggtttaaaagtttaaacctttaatcaattagtatcttaacgaagaatgggatccacgtcaagtttcagccctcagcgtattttattgacaaaaaacacgaaaaatggtttaatcgtttaaaaatacgaaccaaagaggcgaaagaatatgaaagaattagaagaaattcaaacagaatttactgcgcttagtgattttttaatcgcattgggtgatgaaaaacgccaagcaattattattgcactgttagaagaccaagcctgtgttggccgtcgtgtcactgagttaacagaggcgacacagctctcacgccccgctgtttctcaccacttaaaaattttgaaacaagccaaattaattgattgtcgcagtgaaggaactaaaaattattactcactttctcacgataccaccaaaattgagcaactccaacaactattgacccacattacgtcgattatgccagggaggaagcaagcatgaaaaaaattctcgtggtcctcacaaacgtctcccgttatcacggcaccgaagaaccaacgggcctctggctaggtgaagccacggagttcgtggaagaagtaaccaaagcaggattttcagttgactatgttagtccccaaggaggctatgtccctttggatccccggagtatgaaatatgtagattcatccattatggcagtttatgaaagtgctgattttcaagaacgagcgctagcacattccctctctcttgaagaaattgagccagatgaatacgcagcaatttactttacaggaggccatggcgttatgtgggactttcctgataatcctcagttgcaagcaatcactcgtagcctttacgaacagggcaaatacctaacttctgtttgtcacggaattgctggccttttaaatgtcaaagatgcgtcaggaaattatttgattgcagataaaaccattactggcttcactactgcagaagaaattttagccatgaaaaaagcagttgttcctttcttaaacgaaacaattgccaaagaacatggtgctacttttgcgaaaaagcgtccctataaagaatttgcgtatcaagatgaccgtataatcactgggcaaaatcctttttctgtccgcgctgtcgcaagattgttaattcaacaactatcaaaatgaaacaacagcgactacttttaggtagtcgctgttgtttcattgcttcttcttttttccgaaagccgaagccctaacataaaaaatttttgattagctaaagagtaacatcgcgccaattaagataattaggttaattaagcctaagacaatcattggtttggccatgaattttgtccaagtggcatattgaactttggaaatttccaaaccacccattacgacaccagatgttggcgtgatcaaattaatcaagccacaacctgaagcaaaaatcataaccatcacttctggacttaaaccaatgtttttagctaacgcacccattacaggaatagaaacgtacgctaaaccagaagttgaaggaattaggaaagataaacctaagtataaaacaaaggcaccgatgacaaataagactggggagagtccttgtaataagcctgccgctttatcaaggataaatgaatctaaatacgttttagacatcaaaacagatgccccgcgagcaactacgataattaaaacaacggataacatatctttggcaccgtcgataaatgcttcaatggtttctttttcagtaaagcgaccaatcaaggcagcaatgatccctaaaaggaagaaccacatcgctaagtcgccaaagtaccagtcaccgaaactgttgcctgttaaaacagacgtccagcctttgaaaatcgtcactccaaagtcgttccatggaattaaggaaacaatcataatgacaaaacagaaagcgaataccattaagatttttttatgacgattcgtaaatggcatttctttcgacgctgcttgtccatacgttttttccatatcctcttgttcttgtaaagataaaattgttgaacctttgtcagccttcacttttttcgcataacgcatcacaatgaaaatagaatagctagtagaggccgcccacaaaatagcaccgacaattaaaataattcctgtattcggctgaatgccaatacctcgcaacgcatccatcgctacccctgtggagaaagggttaaccgttgaaccgataacacctgatcctgcacccaatagcacagtacccactgcgacaaacgtatcaaacccagcggcgaccatggtagcactcaataaaccataaaaaggaattgtttcttctgccattccataagtcgacccaccaatagaaaataaaatcattaaaatcggaatgattttcaattcgttcccttttaactttttaacgactgattgaatccctgcttcaagagccccagtttgcgtcacaatatttaaaaagccaccgagtactaaaataaaaatattaatttcaatggcatctttaaacccattgaatggagccatgataatatccgataatttggcccctaccacgtggtcaaccattttgccatcaatttctcttggggtaaatggctggccatttagcaagaccgttacgatacctaaaacaattaaaataataaataaaatactaaaagacgaaagctgttttttgtttttcttctttttttctgccatatccttttatacaggaacctactttcctgtatctcccttctctatgattaattactcaatcgatcaataaagaatggcgtatctagaaaagttaagaatttatgactgtagctaatacggttcatttggactaattttttcataacactgcttgctgtttcccgcgtagttccactcattcgtgcaatgtcattaatggtaattggacaagtaattgcaacgcgttctctgttgtcaattcgttctcctaaatcatttaataacatcgccagtgatgtcacaatccgttcacatgcatcattggttgttcctttttggattttgatcatactttcttttaaaaggaccgattgttcttgaatccaatgaatcaattgctggggattattttggagaaaacgctcaaacagtttaactggcacaaacacaacctcaatatccgtataggcaatcgcggagtcgtaatgaacctcatcttgaaacagtccgattctcggaaaaagagcctgctttttcataaaatgcagataggaaaaattaccactgcgatcatttttttcaattttaatgacacctgaaaccaataaaattaaatgatttctcggatcacctggataaaaaaggacttggccttttttataggagcgaacgaaactctcgttgcgcaattctgttagttctgattcagaaaagtattgaaaatcttgattatttttagtgattattttctctatcatcatcttaattctcctaaatactatactttattttgtcacaaccgttcctacgatttcatcgccgctcatacttcctaagttttccaaagaagtgataattgcttgtttattgggttggctttctacaaactgaatggcggcttcaattttcggtaacatactacctggtgcaaaatgacccgcttgtttgtattcttccaactctgctacagtgacattggttaattgtttttcatctggtttgccataattaatacacacataatccacgccagttaaaataactagtgcatccgcatccactaattctgccagtttttcagaagcaaaatctttatcgattactgcttcgacaccttttaattcttgtcctacgacagggatgccgccaccaccacatgaaatggtaattatatcattttttattaaggtattaatagtctcagcctcgtggatgtcaattggcttaggacttggaacgactttgcgccagccacgtcctgcatcttctttaaaaatagcacctgcttgcattgcttctttggcttcagcttctgttaaaaatggaccgatcggttttgttggatttttgaatgcctcatctgctggatctacgaccacctgtgttaaaacagtagccacttgtttcttgattcctgctttgtttaattcttgattaagcgcattggacaaccagtagccgatacttccttgtgtcatagcaacacacgtatctagcggcatcgctggatttttttcagaatcagctgcttgttgttgcaataatagatttccaacttgtggaccattgccatgtgaaacaatcaaccgatgcccttgtttaattaaatgaactaaataggcagatgtttgaactaatgcttgctgttgtgcatgtgcgctagcatcatttgaaaggatggcatttccgcctagtgcaacgaccatttttttccccattacaaatccttctttcctatcataataaagaataggccgcccttcaaaagaaactcttaaagggcgaaacaactattcttttttcaatgttttttcagttgcttcctacacacgaggaatgaataagttgcctaaagtagctgccatgatcgctttaatagaatgcattctgttttctgcttcttcaaattgacgaccatatttactgcggaagacttcatccgtaatttccatttcagtaatgccaaatttttcagcaaccatttcaccgtattgtgttttcgtatcatgaaaggctggcaaacagtgtaatacgattaaatcgccatccatgttttcggttttttctaacatagccatattaatttgataaggtttcaacagattgacacgttcttcaaatttatcttcttcacccatggacacccaaacgtctgtatataacacgttggctcctttaacgcctttagcaacgtcgtctgtaatcattaattctgcaccagattctttcgcaaattcttttgcataattaacgacttcatcagaagggaacaattcttttggtgcacaaatgcgaacatttacgcctaaaatagcacctgtcactaacaagctgtttgccatgttgttacggccatcgccgacatatactaaagtgattccttctaaacgaccaaagttttctttcactgtcataaagtccgcaatcatttgtgttggatgccattgatccgttaaaccattccaaacaggaacaccagaatatttcgctaaatcttccactacttcttgactaaacccacggaactcaatcccgtcaaacatactacctaaaacaatcgctgtatcttcaacagattcttttttacctaattgaatatcgttggcgcctaaatactcaggatgtgcccctaaatcaatcgctgctgtagtaaatgcagagcgtgtccgtgtcgaagttttttcaaataaaagagcgatattttttccttctaaatagtgatgtggaatcccttttttcttcaattcttttaagtgaatactgaagtctaccaaatactctaattctgctcttgaaaaatctttttctgctaataaactacgtccttgaaatactgaattcatgatgattcctcctatttttgggtgtttttttaaagatcttcacggtaaagtggcatactcatacaacgagggccaccacggccacgtactagttcacttcctggaatgtaattcaatttcacgcctgcttcttctagcgctttattcgtaatcgtattccgatcgtaaacaacaacttccccaggggcaattgctaatgtatttgaaccgtcgttccattgttcacgggctgctgctgttaaatttccagcgccgcaacggattagttgaacattgtctaaatgcaagtatttgcataaaatgttatctaatgtatctttttcttttgtaatttggatgtctccatctgctttttcagtgatcgagtaaacaaccaaaccaccttcgatttctggatgaatcgtaaatttatcatagtcaatcatggtaaaaacggtatctaaatgcatgaatttacggtgttcaccgatatcaaaagccaagatatttttaaaccctaatttttgttcaaaaatatttctcgcaattttttcaattgacgcggcatccgttctttgagaaatcccaatggccactacttcttttgaaagaattaattcatcgccaccttcaattctggttgattctgaacgatcatagactctaggaacctcttttccagcaaaacgaggatgataatcaaaaatgtattgcccaaaaatggtttcccgttgtcgagttactgaatacatatgatttaaagaaatcccgtgccccattgtcgcaaagttatcacgcgtgaagtataagttaggcattggatcaataatgaatggataatccgcttcaaccatatctgttaaaaattcttgctcatatttaggtaattcttgtttttgaatgcctgcaatcgctttttgaatcagttcttcgttgtcgtcaatttctaacattaactctctaactttttcttttgctgattcgctgcgaatattggcttcttctaagaattggtcaataaattgtcggcggacctcttcattaatcaacgcttcagcagctaagtcctctaaatagaccacttcgatatcttttgatcgtaacaactctgcaaatgcatcatgttctgcttgtgctttttctaaaaacggaatatcatcaaacaacagtctctccagataatctggcattaaattttctaattccttacctggacgatgtaacatcactgttttcaatttcccgatttcagaaaatacattaattggatgactcatgtgaaataacctcctcaacttaattacaaacacagaataacagacctgattaacctaggacgtgagccatttgccaaacaaaataccaaatatacaacggtattctttcttatgcatatttctagcctaaaagaatgcgctttcatagatattctaaaaaaataatgcataattaaataaaaaaaaatgcatttattcaaaaaaaattatttctccacacacttcataaagttataatcttatagaggkaaaaggaagtgagccagaagtcaaaacgacttctggctcacttccttttatgcgttactttttgacaaaggtgttggctgaataaattgttgaaaatactgctctagttcttgtgctttttcttcggatgatgaaacaataataacagtgtcgaagccagcgacagaacatttcttttcacacaaagacacttcatcaagtacagctgaaaacaatgttgcgttgtctggtaatgtatgaaccactagtaaaaaggcgacacgttcaactttggtcactacctcacgaattgcttgtatcaactgttctttttttcgttcttctaaagaagtgaattgttcaaaaatcgttaaccgcatctcgccagactcatctaatgctttgacgacttttaattcccataaatcccgtgaaatcgttgcttgtgcgacatttatctcgcgcttttttaattctcttaacaactcattttgactatgaattacggttgtttgaatgatttctttaatcaaactttggcgtgtttgcttattcacaaataacacccttcctccagacatttacaaagcaatactagcagaatctctctaattagaatagaaaaagggtcgtttagctaaaaggttctcattgattttgtcggatatttcgcatttaaaaaagtgagacttgcacaatttagtaaaacgttgtacagtgattttagggaattactggcaccgttttaaataacagcaatgatgtttttttgcatgattaactgaactggaggaaagtaatgaaccgattaaaacgccaaacgatgattaagcgattggtcacagaaaatgaaatccatacacaaagtgaattactagcattattggaaaaagaaaatattcacaccacacaagcaactatttctcgtgacattcgtgagctgaatttaaacaaagtagacaatggtcaaggagaagcctattatcgtatcttgaataattctgcccttcgtccaaaatataaaacagatgaagaacgtcttgttgacattattattgaaactggtgtttctttaacacaaatagagttcacaaatcttttaaccgtcttacctggcaacgggcaagccattggggttttaattgatcgcatacgtatccacaaccctcatatcttgggctgcatcgctggggatgataccatcttaattctttcaaaaaataaagaagatgcccttgaagttaacaactatttccagcagtatttgtaccacccataattcatcacttagtaaaatcgactattttttgacatcattgctatttttattaaagataaataaaaaaaggcgtctcagtgaaagctgaggcgttttctcatgagtttttcttttgaacaccgtcttttttttgtataataatcaaaaagcaaagaaagggkttcttatgactgaacaattcatactcacttcaaacgatcaacaaactcagctcaatgtacgtcattggccctgtccttcacccaaagccgtagttcaattgattcacggcatggcagagcatatccaacgttatgatgaatttgctcgttttttaaatcaattaggatttaccgtaattggtcatgatcatctaggtcatggcgaatctgtasaaccaaacgcaccgatctatggtttttttggagaacaagggcctgaaaatgtcgttacagatattcatcaagtgaaacaatgggctgtgaatcgatatccacaattgccctattttatgatgggtcacagcatggggtctttcgccttgcgcaactatctgcaagactatcctgtgactgtgcaaggagtcattttcatgggcactggaacaagtccgttacctttaaccgcagcattgccttttattaaaaaaatggccgagaaacagccgaaaaaaccagctccgttcattgataagctggcatttggttcttttagcaaaaaatttcctgaagcaagttcctttaattggctttctaaaaatcaagccaatgtggctgactatgaaaatgacccattaatgggcttcgtatttaccaacaatggttttgctacccttttttcgcttgttaaacgagccaatcaaaggaattggtaccaagcgatcccaaaagaattacctattttaatcattagtggcgctgaagacccagttggtgatttcagcaaggggccagcgaaaattcaaaagcaattaaagcatgcaggttttcagcacgtgacgttacgactatttcccacattgcgtcatgaaattttattagaaacggaaaaagctacagtttttcaagaaattgggcattggttaacggatttaacgaattaaaaaagaaggttgatgttgtgacatcaaccttcttttttaatctattttcgttaaaccgcccatataaggacgtagaacttctggaatcgttacggtgccatcttcattttgataattttccaaaatggcagccactgttcgaccaacagcaagtcctgacccattaagagtatgggcatattgaacatgacccgttttatcacgataacgaatcaacgcccgacgtgcttggaagtcttcacagtttgaacaagaactaatttctcgatacgttttctgtgccggaatccaaacttctaaatcataggttttcgctgccgagaagcccatgtcacctgtcgaaagagtaatcactcgataagggaggcccaatttttctaaaatgtctccagcattgttggtcattttttctaattcttcataggagtgttctgcatcactaaatttaaccatttctactttatgaaactggtgtaaacgaattaatcctcgggtatcacgacctgcactacccgcttccgagcgaaaagaaggacttaaagcagtaaaataaatcggtaactcttgcgcatctaaaatttcattattatagtagttagttaacgggacttccgctgtggggatcagcgtcaaatcactttctgcaacttggaaaacatcttctttgaacttaggaaactgaccggtgccaaacattgctttgctattgaccaaataaggaggaatcacttcggtataaccatgttcattaacatgttgatctaacataaaattatagaccgctcgttctaaacgagcccctaagcctttgtaataaagaaaacggctaccagatactttcgcgcctctttcaaaatctaaaattcctaaggcggggatcctctag

SEQ ID NO: 111 - DNA, 6590 bp; double-stranded, linear
caattgccccgattggaataaatgaagggccttgcgcaactggtaatctcacacaaaaatgagattgaataatcgtggcaagtcctgctgctataaatgttgcttggattaaagaagacgtttgtgctgtgctaatcccaataattgaagcaatgatcacaggtacgacgtacacgtccattgctaagacatgctgaatccctaacatagtggcctgcccaaaagatactgaatcttctggccccactgttaaatgaagattattttgtttcttttcactcattttttatactcctttagttgctgacattaaatttttatcatgtactttttcaccttgtacccagacttctcgaatattttctggtcgtgctaaatataagattttttggaaaatatcaagcaatgattcccctggatttttaggaattcgtgcttgtgacaagcttgtattaataatttgaacatcccaagcataccctttttctaattttccaattggtaaacttagcgcttgaccaccaccagcagtagctaaataaaacgcttcatttacggtaatccgtgctgttttaacacctcgtacttctggtttttttgtagcatcgacgccatcttctaacattctagaagaaataaccgcttgctttaaattgtcaaaaagacttggtgaaaaaccacctgaaagatcactacctaaaccaacttctacttgatgttgatgtactaattttgcaatcggtgttactgcattaccaaaataagcattagagattgggcagtgcgccacagccgtccctgtttcatggaataaattcatatctgcttcttctaaaaagcctgcatgtgccatcactgctttttctgtcaataaaccaaaatcattcaatgcttgagcatcatttttttcaaaacgttcttgaacaaattgatgttcccaatcactctcactacaatgactttgaacakggacttgatatttcgctgctaattctcctaatcctttaastgcttcctctstacaacttggaatgaaacgcggagttacaacgggrtacacgccttgttttgtttgctgcgctaatgtttgaatttcttgaataaaccgttccgtttcttctaatgcttgttgcgttgtttgatcacgatagtattctggattctcattaagatcatccattacaactttaccaattaagccacgctgccctttttccgcacaaatctctgccaaacgacggctagcttcataatgaatggttgcaaaataaagggctgttgttgtcccattagctaacaattgggttaccaattcatcatagacttgttgggcaaatgctaaatctgcaaacttggactccaaaggaaacgtgtacgtattcagccattcatacaatggaatatccaaggcggtccctgattgtgcccactgaggtgcatggacatgtaaatcaacaaagccgggtaaaagataagaatcttggggcaattcttgaaaacgttgtgcctctttttgttctgctagcacagtttcatacgcttcagcatctggttcaattatttcctgaattactccggcctcatctatacaaaaaagtgtctcttcataaactttaatctcttgcaaatttttactagaaaaacctgttccttttattacaaaatgaaacatttaatactcctccttactatcacatgaagattatacataaactttcgcttaataactataaaaatgtgatttttttaaaaaaaatccgtgttaaaacaagtaaaaaccgaacattctaagaatgrtttattttttctttggataaacaagaaaactttctattcttaagattcttcggtatacttgaagagaatcgttagaactttaggaggtcctgagatgatacagatcgaacaaattagaacaggtgttattcaagaaaactgttatcttgtttataatgaagaagcgttattaattattgatccaggtgcagaaggagcaaaactaattcaagaaattacccgtttagggaagaaaccagccgctattttattaacacatactcactatgatcatattggtgcggtagaagaattgcgccatcattatcaaatccctgtttatgttagtccattagaacaagcgtggctttccaatcctattttgaatctttcaggattaggcagacatgatgatatagcaaatattattgttcaacccgccgaacatgaatttaaactaaccgattatgaaattggcggcatgaaattttccgtagtcccaacacctggtcattcaattggtagcgtcagctttgtctttgatgattttgttgttgttggggatgcattgtttaaaggtagtattggtcgtaccgatttacacactggtgatatgcaacaattattacacagcattacgacctatctattcactttaccagaagaatttcctgtttatccaggccatggtgatgccacgaccattcaacatgaaaaagccacaaacccattttttaattagagatttattcactatttaaagaaacttaggaggagtagcaatgactgaagcaacgacactttatattattcgtcacggaaaaacgatgtttaatacgattggccgtacccaaggctggtcagatacccccttaaccaaacaaggagaagaaggcatttatcatttaggcttaggtcttagggacatagactttaaggaagcctatagtagtgatagtggtcgtgccatgcaaaccgctcagattattttacaagaacatcaaaaccaccaaaagattccttacctaaccgataaacggattcgtgagtggtgttttggttctttagatggtggctatgatggtgaactttggggtgtggtgccacgcattttagcttttaaaagttatgaggacatgatgaccacgaagattacctatcgtgagctagcaaatgctattattgaagccgatacggctgactgggcggagcnttatgaagttatccgtgatcgtgtttggtctggtttcgaagatatcgctcatcatcgagaaaaaaatggtggcggcaaagtcatggtggtttcccatggactaacaatttccttnttactttccttaatgatgcaatttgcctatgcagatggcgctggagaatggtagcgtgacgaccttaacttacgaaaaaggaacatttaccatncaaggaattaatgatatttcttatattgaaaagggaaaaaagatcgctgaaaagcgccgtttgttgtaaaaaaagagaaggttatctgtcaaaatgacagataaccttctctttttatttattcttttaaacgttctacgttttttcttgaaatttgaattttttctaaggtttccttatagttttttgctgcataagcaaaaaataaaacatcgactacatacaattgtgccaccaaggaaacagtagccgcacttctcaatggcacgtcttccccactagaggtttggaggacgatatcacttttttcaccaatcactgatttttcatcttgtgtgatactaacaataggaatcccttgctgcttcgctaaatcagctaaagtacttgcttctttattcgttccagaattagaaataacaataaaaacactaggcttttctgttgagcctaacatggaagcaaataaatgatgatccaatgttgtaaataccgttcggcctaatcgcgtaaatttttgataaatatcttgagcaaccaacgaagaggcgcccaacccatagacaaaaattacttctgttttttccaacaaatcaacggcttcattcactgcgacatcctctaatgtctgcacgcttcgctcaaccacatgaacaaagcgcgcctgtaacttttgtttaatgtcagctgttgattcccctttagtaacttcagtatacatttgctgcttcatttggccaagatttgcagataataaaagtttcaactctgtgaagccattcacatccatagaatgacaaaagcgaataattgccgctgggcttgatcctgcttgtttcgctagctcttgcgcattcattgaaataactgtttctgtattttttaaaatatattctgcgatttttcgttctgattttggtaattgttgtagacgatcttggatagataagacaatattttgttgcataaacaacccctcctgatacaccatttcctacgcaattaaattttaacaaagaaaaagggagaagccaagttctcctttttctatttattatttagttgtttgcatatctttaggaatcccaaagaataacgttgctacaaaaccacctgcgtaagcagccaataaacctaatacatatgcaagccattggttgttggcaattaawggaattaaagccaccccacttggtccaatagcaatcgcaccaacattaccgaaggccccaatcaccgcaccaccaataccaccgccgatacaagcagtaatgaatggacgtcctaatggtaaagtaactccgtagattaatggttcaccaatacctaaaatcccaactggcaaggcacctttaatcatttcaactaattttttatctgatttacaacgaatccataatgctaaagctgcaccgacttgtcccgcaccagccatggccagaattggtaataacaaagtcatccctgtttgattaatcatttcaatgtggattggcgtcaaaatttgatgtaaaccaaacattaccattggcaasaaggttaaaccaagagtaaagccagcaaccatgccacctttttctaagacaacattgataataccaactaagccattagaaatagctccggctacaggcatgattaagaaaatagttgctaagccaatcactaaaagtgaaatggttggcgttacgataatatcaattgattctgggacaattttatgcaattgtttttctaacaatgataataaccatacggcaaaaataacaccgataattccgccttgtcctgcagataatgttcccccagtgaaaatattactgattggagcatccggattcattcctgttaacattgtgactgccccaataacaccacccaacgctggcgttgcaccaaaaacgctggcactgttaatcccagtgtaaagagctaaataagcaaaaatcccatttttaatgatatttaagacatcaatatattgttgccatgaagctgaaatatcaccagcaacaactaagttagacataacagctgcaatcccgccaataataccagccccaacaaaggcaggaatcatcggaacaaagatactagaaatggcttttaacacttttttaaatggtgaagtgttattttgtttcgctttttgttgtgctttcatttgagcggctttttcttctactaaatcttttccagatttgcctgctgaagcatcagttgtggtgccatgattaaatggttctcccaatttgacacctgcttgatctaccatttcttgtgcaaccttgttaacagtccctggaccaacaactacttgtaacgtatcatcttctacgacgcccataacgccatcaatttttttcaatccttcaatatccactttgtcataatcgcggatatccatacgaacacgagtcatacaatgaatgactttgtccacgttttcttgaccaccaacttctttataaatcccatcagcaatgcgtttaattctttcttctgccatgttaaaacaccctcctaattccttaatttaatgtattcttgataaattgattcccgtcaattaatttttgtgttgcttcttctttagtactatcagttaaaatcattacaattgctaacttcacattttcttctgcttctacaaattttagttcggcaacttcataactacaacccgttgcttccataataatccgtttggaacgctccactaatttttcattggttggttttacatcaaccattaagttattatagactttcccaataccaatcatggaaatagttgataacatatttaaaattaatttttgagctgtcccagatttcaagcgagtcgaacctgttaaaaattcaggtcctgcatctacttcaatcggcatttgcgcatatttactaatttcggcatttttattacatgccacagttgcggtagctgctcccaccgttgtagcatattctaaaccgccaattacataaggcgtccgaccactggctgcaatcccaacaacaatgtcatttgctgataattttagatcaactaaatcttgacgacctagttcttttgaatcttcggcaccctctactgcgacagtcattgctttttgaccaccagcgatgaggccttgaaccatctctggctcgacgccaaaagttggtacgcattcggctgcatctaagacacctaaccgaccactcgtaccagcgcccatgtagatcaagcggccgccttgawtgaagcytttgatgakggcttctaccactggttcaatggctgctaattcttgacccactgccattgcaactttttggtcttcttgattcattttttgtaaagcttctttgacactcatctcatctaagcccattgtattttcatttct

SEQ ID NO: 112 - DNA, 3660 bp; double-stranded, linear
gacatctgtcaaaacgaccgatgtcctactctctaacgattaagatagtccgctaaatgcgtttgttttagtcttttataaaagttaaatactgagaatttattgtgtaattcgtgtaccactttctcctttgattgcttccgaagctaattctaaaagcccgataatcgcctggcggtttggtttactttctgcaaaactgatggccgcttccaccttaggtaacatactacctggcgcaaattgattttcttctatatattgttgcattgccgtaaccgtaacatcggtcaaagcttgttgatttgcttgaccaaagttaacaaaaacatgttccactgcagttaataccacaaaaacatctgcttcaatgagttcagccatttttgctgccgcaaagtctttatcaatgactgcatctacaccatgatagactggaccatcataggcaataggraccccgccaccaccacaagcaattacgatttgtcctggcatcaacaagtgttcgcagcctaactttttcgtaaatatcaatggttttggntgaaggaactacccgtcgccagcctcgacccgcatcttcytgatagacgttcccagtttccgccatcmactgtttggckgtttcytcgtcataataaccaccaattggttttgttggttttgtaaacgctgggtcttttggatcccaccacgacttgtgtaattaacgtaacaactggttgttcccctaaatttctggctactagttcttcatcaattgcttgttgtaaatgatagccaatatagccttggctcattgctgtgcattcaggaaacggcacgacatcttctggagattgactcgtttcctcaaaagctaagcgaattttgccaacttgtggcccgttgccatgagcaatcaccacttgatggccttgttcaattaaatcaacaatggattttgcagcggtttgtgcttttgccaattgttctttcgaagaatttcctaacgcatttccacctaatgcaatcactatttttgacatctgtttccctcctagcgctttggttcttgttgtgtgatacagtgaatattgccgcccccataaacaacttctaccgtattaacgccgacaatttttttatctgggaacatcgtttgaacttgctctaaagccaaatgatcattttcatcaccatactgtggcacaatcacgccatcatttgtaattaaaaagttcatataggatgcgatacaaatatcgccgtcttctcgtggcatggttccttccacgaaatcaattttgaaggagcctttaatggttacatttttgacaggacagcataatttgtggacttttaattggcgtcctttagcatcagtcattttaagcaaacgttgatacgcatcttgtgccgcttcataaaatgggctattttgatcttcagtgtaaatacaagccacttcaccaggtgcaataaaacaarctacatcatccacatgaccattggtttcttctgggtcaattccatcacctagccaargaactttttcaacatttaaatagtcgcataatttttgttcgattgcttcttttgaaagttgtggatttcgaccttcacttaataagcacatttctgtagtcaagactgttccttgtccatctacgtggaatgaaccgccttctaaaacaaaatcatctgtacgataagaatctacatgctcaatttcacaaattttttgtgcaaccaaatcgtcttggtcccaagggaaatataaaccatctactaatcccccccaagcattgaatgtccaatccacaccacggatttctccatggtcgttaatgacaaatgatggtccacaatcacgaacccaggcatcattgtttgacatttcgtaaaccgtaatttctggcggcaattggcgacggcaattttgaaattgttgttgagaaaccaccacattcatcggtgtaaattgactaattgctttggccacattagtaaaagcttcttggacaggtttaccaccatcacgccaattatccggtctttctggccaaatcatccaaactttctcttgtggttcaaattctcctggcattctaaagccatcttgtttaggggtacttcctacaattcgtttagccattttctttcgttcccttcttaatttttttcacgtaaataattacttcaccaaacagaataaaaatgattgccccaattgtgattggtaatttttcatttaatgctgcgggactaaaatctaaaggcactgctgtgaaaatcagtgaaataataatcataatcattggcaaaaccactaaaacttttaaaaatcctggttttccgttaactttaaacggacgtggtgtatcgggatcaatttttctaagcttataaaaagctgggaaaactgggatatacgataacaagaataggacgacattcaaggagaaaaaggcccagaataaatcttgattaggtaaaattggtgctaatacaatgaccaccgatgccacaatgccattcatcaaagcagccccaattggcatgtcatttttcttactacgtttttcaaaaaatttaggcatgtcaccattttcagcagcataacaagctgtattattgactcctaatgaccaagaaatcatgtttccgaacaacgtaagaaggaataggaaagccatcaacataatgaaccaaccttctgtcgagcctgtcaatagtttaaagctatccatcataccactgccggtactaatttgatcggtgggaatcgctaccccaattccaaaggctgaaaaaatataaatggccgcaatgactaaccccgctgctacaatagcttgtggaatttgcttcttaggattttccatatcatctgcaaacgtacagatgacttcaaaccctaacaaattaaaaatgattacagaaataaaagataaactccttaagtcaaacgttggcagcattgatttcaaggtaaattcattggcaacacctttcgtcaaggctacatacaatcctagcccaccaattaagacagctaaaaccatcttgattacggcagctccatttagaatccagatactgtcgctgactggataaaaactaatccaaaccacaatccaagtaaaaattaattcaacaataatcatcatcggtgttgaaaacttaatacctgtaattgtcgttaatagttctggcgtcataacggctaatgaagctagccacaatggataattaatccaataataccaagaaactctggcaccccaacgatgaccatatgctttggtcacccaatcatagatgcccccttcaccaatataagttgttcctaattctgatgaaattaacccatatggcaataggaatgcaattaataagaaaatccaccaaaaaaactgagaattaccaattgcagcaacaggcgccgctgcttcagcaacgaaaaccacacagatcactgataaaatggcactcgttaaactaaatttctttttcccctccatgaagactcttcctctctttataaactgtccactgattcattttttcaatcagtggacagttggccgttaaatgctttgagtgtctaagaaaacttctagttcttttttcgcttctgcttgcttgattaaatcataaggatttttgcttcat

SEQ ID NO: 113 - DNA, 827 bp; double-stranded, linear
aatgacaacatttacaaaaaagtttgaggcaaaaattaaaacggcggacawtaaacttaaagtaaaaattttgtttttaaaaattgcgaacttaataagtgggctttttctttttcgttcaaccattataaataatcctaatgcgattactgcaataatgaacaataaataggattgtaacgagccaaacccgctctcttgtccgaggaaaatcccgccgaagaacgtcataatcgcaatggcaatacaagcaaatcctgaaaaatcgattttttcttttgtttttgtaatatcttttggtaggaacttttcgccaattaaaattgtaactagccccacgggaacattaatccaaaaaatatacgaccaagaaaagtttgataagatcaatccaccaatcccaggaccagcaatcgcgcctaaagagacaaaggcacctactgcaccaagcgcccgccctctttcatttaaagggaatacttccgtaataattcctgaattggtcgccatggtcatgctagcaccaatactttgaacgactcgcgcaaataatagaaagctcagcgattgattaaagccacaaagtaacgaaccaatcgtaaaaataaccgtgccaattcgataaacttttatttttccaaaactgtcgccaatttttccaaataataataaacaagcacagacaaccattaaataaatagatacgacccattccgcttgattcatgggtacggacatttcttttgaaatagtcggtaaagcaatatttacaatgctggaatctaatgtagacatgaaggtaaacatagccacagaaactaagatcc

SEQ ID NO: 114 - DNA, 13574 bp; double-stranded, linear
aaggcatgaagtaatngggatggatttattaatcgratgaagycatatcaggaagaagaagcagtttgctttacagatcgtttgaaagagcaggtggagaaaaatggctagaaaaagtcgtataaaaacaccgattgcggaacaagcacctactatcagaaagaataattttgaagaggtttgcttaggctatacattagcagaagggcaagaagaagcgattcgctgtttacaatgtaaaaatgcaccttgtattgctaaatgccccgtgatgattgatattcctggatttattttagctattcgtgaaggaaacatggaacaagcagccgatattttaagtaaatatacgaatttacctgctatttgtggacgcgtttgtccgcaagagaaacaatgtgaacaagtttgtaaattagggaaagccaaaaactttgaaccagtggcaattggcaaattagaacgtttagttgccgattgggcattagaaaatcacaagtttcctaagaaaacagcggaaccaacaaaagggaaaatcgcagtggtcggttctggtccttctgggttaacagttgcgggggatttgtcaaagctaggctacgaagtaattatttttgaagcgcttcatgaagctggtggcgtattaacctatggcatacctgaatttcgattaccgaaaaaaattgttaaacaagaaattgcgagtattgaagccttaggtgtaacaatagaaaccaatgtggtagtaggtaaaacgattacgatggaagaaataatgtcagagtttgatgcctgttatctatcggttggtgcaggggcaccaaattttatgggaatcccaggaactagtttaaatggggtttattcttctagtgaatttttaacacgaatcaatttaatgcatagctatgagtttccagaatatgatacaccgattaaacgtgctaaaaatgttgttgtgattggcggcgggaatgttgcaatggatgccgctcgttcagccaaacgattaggcgctgaaaatgtgaacattgtgtatcgtcgttcgttagaagaattgccagcaagaattgaagaatatcaccattcccttgaagaaggaattaactattattggttaacgaatccaattgcttatttagatgaccaacaaggaaatctagccggtgttgaatgtgtcaaaatggttttaggtgaaccagatgcgtctggaagacgacggccagaaccaattccaaacagcacgtttaccattcctgctgatgcagtaatcgaggcaattggccaaggggcaaatcgagtcttgttatcaacatatccagaaatagaactaaaccaatggggttacattcaagctgatcctaaaacaggagcaacctcaatacctggcgtttttgctgggggcgatatagtcacaggtgctgccaccgttattttagcgatgggcgctgggaaaatcgcagctaatgcaattgatcagtatgtcaaaacacaaaaaacaacagtcacaagcaatgtttaggaaagataaaaggtgaaaaaatgaaaaaaacaatggatggaaacaccgcagcggcttatatttcatatgcgtttacagaagttgccgctatttatcctatcacaccaagttcaacaatggctgagttggtagatgaatgggcggaaagtggtttaaaaaatatttatggtcaaaaagttcaagttattgaaatgcaatcagaagctggggcagcgggagtagttcatggttcgttaaaaacaggtgcgttaaccactacttatactgcttcacaaggtttactgttgatgattcccaatatgtataaaatcgcaggagaattgctgccttctgtgttccacgtggcggctcgggcagtaacgacaagtgcgttgagtatttttggtgatcatggcgatgtgatggctacccgccaaacaggtttttgtatgttagcagaatcgagtgttcaagaagtgatggatttgtcggcagttgctcatttagctagcttagaaggtagtttaccttttgtaaacttttttgatggttttagaacgagccatgaactacaaaaaatcgaagtgattgattatgatgacctgaaagaaatggtgaatcaggaagctgtaactcgttttagaatgggaggcatgaatcctaatcatcccactgtttcagggaccgctcaaaatcctgacattcattttcaacaaagagaaacagtcaataaaaattacgaagaaatgccaaaaattgttcaaaaatacatgaaaaaaattaacaatcttcgtggaacaacgtatgatttaaccgattattacggggttgaagatgcaacagaagtcattatttcaatggggtcggcttcgccagtaatcaaacaaacagtcgactatctcaatcaacaaggacgcaaagttggttttatcaatattcatttatatcgtccatttcctaccgaaaaccttcttgaaaaattaccagctacagtagaaaaggttgcggttttagatcgaacaaaagaatcgggagccgaaggggaaccgttattgctagatgttcaaagcgctctctatcaacatgaaaatcgaccaattgtgattggtggacgttatgggttaggctctaaagacgtagcgcctaatcaaattaaagcgatctatgatcatttgttattgccatttaaagaattaaaacaacgttttacggtagggatcgttgatgatgtaacctatcaatcattgccagaagaacctactttagatttaacgccagatactaccttccaagcaaaattttggggctttggttctgacggaactgtgggagcaaacaagcaagcgattaaaattatcggagatcataccgacctttatgcacaagcttactttagttatgattctaaaaaatcaggcggtttaaccgtttcgcatctgcgttttggtaaagagccaattacttccacgtatttaattgaacaagcagatttcatcgcttgtcataatgcttcctatttgcataaatacgacctgttaaaaggtttaaaagatggcggaacgtttttactgaatactatttgcgatcaagaaaagattcatcgtttattaccggctaagttaaaaaaatatattggggagcaccaaatcaaattttatattatcaatgcggttgagttagctcgcaaagtaggcttaggccgtcggatcaatacagtgatgtctactgccttttttgaagtaacagatattttaacgaaagagcaatatttaccgttacttaaagaagaagtgaaaaagacttatggaaaaaaatcaatggaaattgttgaaaaaaattaccaagcgattgatgctacctttgaatcgctgcaagaaattgtagttccagaagattgggcaaccattgttttagagccagaaaatcaagagtcggaagctccagcttttgtgacaaatattttagaaccaatcaatcgtcaagaaggggatcagctgaccgtttcagatttgattgaaaacggaatgaagggcggtgccattcctatgggcactgcggcttatgaaaaacgtggcattgcgttagaagtgcctgagtggcaaatggataagtgtacgatgtgtaatgaatgtgcctttgtttgtccacatgcggctattcgaccgtttttagcggatgaagaagaactgaaagaagcacctgcaggttttgccatgcgcgaaatgcgtggcacagatgggttgatgtatcgtatccaagtttctttagaagactgtacaggttgtggtctttgtgttcaggcatgtcccgtgaaagacaaggcgattttaatgaaaccttatgaaactcagaaagagcaagcgatgaattgggcctttgcgatgactcttaaacaaaaagccaacccagtcaaaaaactttctgttaaaggttcccaatttaaccagccattgatggaattttcaggtgcttgtgaaggctgtggcgaaacaccttatattaagttgttgacgcaattatttggtgatcgaatgatgattgctaacgcaacaggctgttcatcaatttggggtggttcgtcaccggtgacgccttatacaacgaacgaatgtggccaaggaccagcttggagtaattcgctgtttgaagataatgcggaatatggttatggtatgtatattgccaatcgaacgaaacgtcaacatttagctagtctggttgaagaaagtcttgctaaaaacgtcggatcagattcacttcaagccttgttaaatgattggttggaacacatggctgaaggggaaggaacacaacagcgagccaccaaactagcggcagcattaagtgaagaagccgatgaagatccacttttaacaaaaatttacgaacaaaaagatttactagtgaaaacgagtcaatggattgtcggcggcgatggttgggcctatgatatcgggtttagcggcattgatcatgttcttgccagtggggaagatgttaatatttttgttatggataacgaagtgtatgccaatacaggcggacaaacatctaaagctacaccagcttcagccattgccaaattctcagcgggtgggaaacatacctctaaaaaagatttagggatgatggcaatcacttatgggaatgtctatgttgcacaagtggctttaggcgcaaactcaatgcaaacgattaaagcaattgacgaagcggagcggtacccaggcccatcaattatcatcggttataccccatgtattaatcacggggtcaaaggcggaatggttcggacgttagatcaagccaaagaagccgttgaatctggctattggccactttatcgctataatccagagttagttaagaaaggcaaagatccgatggtcattgactacaagaaaacagattttgacaaaatgcgtgatttccttgaaaaacaaacacgttactctgcgttgcatacaattaaacagaatcaagaagtagtcgaacatttacttgataaaactaaagaagatgcaattgaacgctctgaaagttataacaaactagtcacacacatgaaaaaataaaaaaacaaagcctcttacttgagaggctttgtttttttatccaataataattttttctgaagggtattcgtagcctaagtcacgtgtttcttttggtacaaaaatcattaaggtataaagcataccaatacgtccaataaacattaataaggcaatcattaatttacctactgttgttaaatcgtctgtaatacccaaagaaagaccggttgtcccaaaggcagaagcgacttccacaatgattgaaatcaagggcagattttcagtggctgacaaaaagacgacagcgaaaaagcacataatcaaagataacatgaagacgacaatcgattttttgacatcatcgtcatctattttacggctaaagacgctaatatcatcttcactttttaaaaaggctaacaaatacaagccaataatcgcaacagtcgttgttcgaacaccaccaccaacagagctaggactacaaccaataaacattaacacagagaaaataatcaacgttgtaatttggaagtcccctaaatcattaatttggaggccagcgtttcgtgtagtcatcgaataaaacatcgaacttacccaacggccactttcattcattgtcaaaaataggtgatctttttctaataagtaaatcaaaatagtcccaccaataaacagaacaataaacgctagcaaagcaattttactaaacaatgagaagcggaaaggcaagcctcgtttcttcttacgaaagttctttttcttaaaatgtaaccactcatgaatttccagtaaaacgggaaatccaatcccgccgataaaaatcaagaacataattgccagtaaaaagagataatcatgagcaaaaggaataattgaatcacctgaaatatcaaagcctgaattagtcactgcagaaatagcttgataaaatccataaaatatcgcatctcgccagttcgtataataaccacttatataaaaataaagcgaaaagagcgagccgaagattacttggaaccaaattaaaatcaaaaaagtggtgcggatcagtcgaacaattccgctcagtcgcggctgattcatgtcagtcataattaactgacgttgctttaatgtgattcgccgttttgataaaataaaaaagaccgttgaaatcatcataatccctaagccaccaacttggaaaagaacctccaataagacgatcccacgatcattaaaaaccgaattaatatcgactgtggtgagtccagtaacactgactgtactgattgctaagaaaaataaatcaataaaaggaacatgcgagtcaggttctctgaaaatagggaggcaaaacaataaataagaaataaccgtcattaatatgtaataagcgacgatgatttgaatagatgaaaaatttttgcgaataaatcgatcgcttctctttcgctgtgccagccacagcaaacgtgtatggttcactagataacytcccaattctaattaaactamgtataccaaaacttttcgcctcaaacgaataattctgccagaaaatccttgaaatgacaaataaaaataagaaattcgttagaaataattggaaaacatccacaaacaagcgagaacatgatattttatgaaagaatagaaaaataggttgttccccaaacaacttattaataattggtcagtttgtctaacgatacaactttaaaaagtagtggtagcttttttatttcggttgatatgtgaatgtgttcactttatgtaacaaactgttatttttattcaaatgaaaaataagaaattgtgttggtagaaatcaatagtttataaggtgggaaaacaatgaaaaaagtgttaatgggagttctttccctagggttattattaggtgcagcaacaggttgtacaagcgatcaagaaaaagccgctggtaaaacaaaagcgtcttctgaaaaaacagaagcaacatctggtgcctctgctaatggttatacagatccaagtgaactaaaagacagttatgatgttgttattgttggttcaggtggtgcggggatgaccgctgcattacaagccaaagaagctggcatgaatccagttattttagaaaaaatgcctgttgcaggtgggaatacaattaaatcgtcttcaggaatgaatgcttcacaaacaaaattccaagaaaaagaaggcattaaagatagcaacgataaattctttgaagaaacactaaaaggcggtaaaggaaccaacgatcaagaattactacgttattttgttgatcattcagctgaagcaattgattggttagatacaaaaggrattacattgagcaatttaacgattacaggtggaatgagcgaaaaacgcacacaccgacctgctgacggatcagcaattgggggctatctagttgacggtttagtacgtaacgttcgcgaagaaaaaattccattgtttgttgatgctgacgtcacagacttagttgaagaaaacggtcaaatcgatggcgtaaaagtgaaaatgaaagatgataaagaaaaaacagttaaagcaaaagcagtcgttgtcacaacaggtggtttcggtgccacgaaaaattaattacacaatacaaaccagaattgaaaaactatgttacaacgaaccaagaaggcacaacaggtgacggtatccaaatgattcaaaaagttggcggtgcgttagtggatatgaaagaaattcaaattcacccaactgttcaacaaagcgatgctttcttaattggtgaagcagttcgtggagaaggcgcaatcttggcttctcaaaaaggagaacgttttgttaatgagttagatacacgcgacaaagtttctgcagcaatcaatgccttaccagaaaaatcagcttatttagtctttgaccaaggcgttcgcgaccgtgcaaaagccattgatttctatgatcaaaaaggtttcgtggaaaaaggtgaaacgattgaagaattagctgaaaaaattggcatgcctgccgatacattgaaagcaacgattgatacttggaaccaagatgttaatgccaaagatgacaaacaatttggccggacaactggaatggaagctgacttaagcacagccccttactacgcaattaaaattgcaccagggattcaccacacaatgggtggcgtgaaaatcaacacgaaaacagaagttttacgtgaagatggcacaccaattaaaggtctatatgctgctggtgaattaacaggtggcttacatggtcaaaaccgtatcggaggcaatgcaatcgccgatattatcatttatggtcgtcaagcaggtacgcaatcagcagaatttgcctctgctcaaaaatnactagcattaaaaagtctgaaattgtagtcaaataactacaatttcgggcttttttattgcatactagcaggatcattagttggagtataaatagccctactaaaatgactttggcgtagattctgtttttttcagaaaaatgcacgaccattttagctaaaaatactgcttttttgctgaaaatatagtaaaatacgtaaggaactaacggaaaggtgtagtgaacatggctcaattatttttcaagtatggcgcaatgaacagtggtaaaaccattgaaatcttaaaagtagcacacaattacgaagaacaagacaaaccagttgttttgatgaccagtggactagatacacgtgatggtgttgggaaagtatccagtcgcatcggattacgcagagatgctattccaatttttgaagaaaccaatgtctttgacttgattaatgatttgtcttacaaacctttttgcgtattagtcgatgaatgtcaatttttaaacaagcatcatgtcattgaatttgcacgaattgttgacgaattagatattccagtaatggcatttgggctaaagaatgattttagaaatgaattatttgaaggctcaaagtatttacttttatatgcagacaaattagaagaattaaaaacgatttgctggttctgtcataaaaaagcaactatgaacttgcactatattgatggcaaccccgtttatgaaggggatcaagtccaaattggtgggaatgaagcctactatcctgtttgtcgcaaacattattttcatccaaaaacagtgaatgaagaacagtaaggagagacactatgtacgatcaattwcaatctattgaagatcgctatgaggaattgggcgaattattaagtgacccagcagtcattagtgatacaaaacgtttcatggaattatcgaaggaagaagctaatacacgtgagacggttgaggtttatcgccgatataaacaagttgttgaagggattagcgatgccgaagaacttttaagtgaaaacttagatgcggaaatggccgaaatggcgaaagaagaactttctgatttgaaaaaagaaaaagaagtgttagaagaccgcattaaaattttattattaccaaaagatccaaatgatgataaaaacatcatcatggaaatccgtggtgcagccggtggcgatgaagccgcactttttgctggcgacttatttaatatgtaccaaaaatatgcagaagcacaagggtggaaagcggaagttttagaagcgaacgtcactggaatcggtggatataaagaagtaattatgatgatttcaggagataacgtcttttcaaaattaaaatatgaaagtggcgctcaccgcgtgcaacgagttccttcaacagaatcacmaggacggattcatacatcgacagcaaccgttgtagttatgccggaagcggaagaagtcgaaatcgaattagctgataaagatatccgtgtcgatatttatcatgcaagtggcgctggtggacagcacgtcaataaaaccgcttcggctgttcgattaacccatttaccaacaggaatcgtagtcgcaatgcaagatgaacgttcacagctaaaaaaccgtgaaaaagcaatgaaagttttgcgtgctcgtgtgtatgaccaaattcaacaagaagcacaaagtgaatatgatgctaaccgtaaatcggcggtggggaccggagatcgttcagaacgaatcagaacgtataacttcccgcaaaatcgagtaacggatcatcgtatcggtttaaccatccaaaaactagaccagattcttgctggcaaattagatgaaatcattgatgcattagtcttatatgatcaaacatcgaaattagaagagatgcaaaatggctaaacgttactttgaagtccttaactgggcttcttcttttttagaggcgcaaggcaaagaaggctacgctattcactatgtttttttagaacgtaaaggttgggataaaacgcagtggctcctgcatatgcaagaagaaatgccccaagaagaagaggaacaattaaaaacggatttagcccaattattgacagattacccagcacaatatttactaggacaagctgaattttatggacattcctttattgttaatgaacatactttgattcctaggccagaaacagaagaattagtcgagcgttgcttaaaagccaatccagatactcctttgacggtcgtggatgtcggaacagggacaggtgccattgcggttagcttgaaactggcacggcccaactggcgagttattgccattgatctttcagaggaagcgttgactgtcgctaaacaaaacgcgcaagcattaggtgctggcatcgaattttatcatgggaatggcttacagccagttgcttctgaaaaaattgatctgcttatttctaatccgccctatattagtgaacaagaatggtatttaatggatgcaagtgtccgaacgtatgaacctaaaaccgctttattcgctgaaaataacggtttggctttataccaacaattaattcatgaaagtcaaacgatgcttaaagcagacggtaaaatttattttgaaatagggtttcaacaaggcgcggccctccaagaattattgagcgccgcctatccacaaaaaacaattaaaattgaaaaagatttatctggcaacgatcgcctcgcgatagccgagtaactaaggttcttcgtcgccacttttctagaaggagcgatttgcaatggaaacaaaaaaattaaccaaacaagaaatagcccaagcagcagcagccattcaagcaggcgagctagtggcttttccaacagaaactgtttatggcttaggtgccgatgccttaaatgaagcggcagtaaaaaaagtttaccaagtaaaaggccgccccagtgataatccattgattgttcatgtgaacaacgttgagatggtcaaaaaatacgtggcgaccttaccagaagtcgctacaaaattggtgtctgccttttggccgggaccattaactttaatttttaatgtgcctagcgatacattttctaaaacagtaacaggtggtttagagacagtcgcttttcgtatgccagataaccaagcgaccttagctttgattgaacaagccaatgttccgttggtcggaccaagtgcgaacacttctggcaagcctagtccaacatctgcagagcatgtttatcatgatttgcaggggaaaattgctgccatattagatgatggcccaacgcagattggggtggaatcaacggtcttggatttaacggcggaagatggtgtgccagttattttacgaccaggagcaattaccaaagagcagttggaaagcattattccccaagtgaaaatcgatacacatttgattagtgaaactgcagcacccaaagcgccagggatgaaatacaaacactattctcctgatgcggaagtttggattataagcggtcaaacagcagaatggcaagcggcgattcagcaagcaaaagaacaacaggaaaaaatcggcttatttttaagtgatgaacaggcagcacaactagatacagaaaatgcgtttgtttattcttatggtgcagaaacggttgaaaatgccacaaaagaactatttgcagggttaagagcgttagatgagcaaggagctaccacgatttttgcgcaaggatttgcagaaactggtttaggcactgcttacatgaatcgcttgaaaaaatcagccaatcaaaaattttttgaaaaataagaggtatttgtaacgaagctgacacagaagtatgatacaatcagacaaaagaaaacaaaatggagtgttgtttgaatggmttacaaaacgtatgacccagatttatggaatgcaattgcaagagaagaagagcgccaagaaaataacttggaactaatcgcatctgagaatgtcgtgtcaaaagcagttatggctgcccaaggaagtattttaacgaataaatacgcagaaggttaccctggcaaacggtactatggtggttgtgaatttatcgatatcgtagaaaatttagctatcgatcgtgccaaagaattatttggtgcaaaattcgcgaatgtacaagcccattcaggttctcaagccaatacagcggcatacctttcattggttgaaccaggtgataccattttggggatggatttatcagctggtggtcacttaacacatggttcgcccgttaactttagtggaaaaacctataattttgtcagttatggagtggatccttcaacagaagtaatcgattacgatgtcgtgcgaattttagcaagagaacatcgtccaaaactaatcgttgcaggcgcaagtgcgtattcacgaacgattgacttcaaacgtttccgtgaaatcgctgatgaagtagatgccaagttaatggttgatatggcgcatattgcaggcttggtagcttcagggttgcacccaaatccagttccgtatgctgatatcgtaacaagtacgacccataaaacattgcgtggtccctcgtggcggtttaattttgacaaatagcgaagaattggcgaaaaaagtaaatagtagtattttcccaggcattcaaggtggcccattggaacatgtgattgccggaaaagccgcagcttttaaagaagcattggatccaagttttgctgaatatagtcagcaagtgattgcaaatgcgcaagcgatgacgaaagttttcaatcaagcgccagaagctcgtttaattagtggggcaacagataaccacttattactgattgaagtgacaggttttggtttaaatggaaaagaagcagaagctattttagatagtgtaaatattactgtcaataaaaattcaattccgtttgaacaattaagtccatttaaaacaagtggtatccgtattggaacgcctgcaattacttcacgtggttttaaagaagaagatgcggtagaagttgctaaattaatcgttcaagtcttaaaagatccagaaaatacagcagttcatgatgaagtcaaagcagctgtagcagcgctaactaaaaaatatccattatataactaacatcaggggatagctgaagcgccgattctctggtacaaataagagtcggagctt

SEQ ID NO: 115 - DNA, 4528 bp; double-stranded, linear
atttacagcgttactganacaagcaaaagacgctttaagcaaataagcttaaacaatctttcacaccctactcaaggagtagggtgtttttttaataactccgttggtaactttcatctataaatgaaaaaacttgtgagagcggaatttcttcagaaagacttaaccaatgctctttattcatatgataggcaggaaaatagccaggttggttctttaataaggcaatcaattcaggcgcaagtttaacggttaaaatagtgagctgcttattctcggtagcgccgagcagttgtgcatccagtggcataattaaagcaaaccattttgcatttctaggatgacgaaagacgagatagtctgggtgttttttaaaaggaaaatcgggcgttatctgataacgttcttggatataggcgctaatagtttcttgaaaagtcataggtttcttcctttcgttaaggctaggcatatctatttacatcatagcaaaaattacataaaattacttcgttcaaaggaatgggaggagggagcagatgacattaatttcaacaattttagtaaccttggtggctgtagaatttttctacattatgtatttagaaacgattgtaccaacatctgagacaacaagccgtgtttttaaaatggataggcaagagttacaaagaraatcagtcactacattgtttaaaaatcaaggaatctataatggactaatcggtgcaggacttatttatagtgtctattttgcgcaagcaacgatggagatgacaaaatttttattgatttatattattttagtggcggcgtacggtagcttaactagtgataaaaaaatcattttaacacaaggcggtttagctatcgtggctttgattagtttacttgtttagccatcagagttaatagagagaggcagtcaaatcgacagaaaaaacacggttgatttgactattttttatagaattgagagagacaaaatgtggtatactttgtttattagatagggaggaattaaaaatgctgaaccaaaaagaagtaaaaaaaaccgattatactcaattaatttctctatggcgttcttcagtagaagctacccatttgtttttgagtcaggcagatattgataaaatcgaagtggttttacctgattattttcaacaagttcaattaagtatgtggttaaatgaagaacagaaatgtgtgggctttagtggaacaaatcaacaaacgttggaaatgttatttattgacccagtctattttcgtaaaggctatggtggagaaattatccmaaagttaatagagcaagaatcaattatctttgttgatgctaataaacaaaatgaaggggcagtgaagttctatcaatctcaagggtttcaagtaattggtgaatcaaaggaagatcctcaaggaaatccgtttcctattttacatatgaaacggatatagaaaagaagggagaagccatgcgagtaatcgttacagaataccaaccagcctgggtggaacagtttgaagaagaagcccaagcgttgaaacagattctaaaggaaaattgtcttaaagttgaacatatcggtagcacatctgtgcctaatttagcagccaaaccaattattgattttttggtcattgttgaagaaattgaaaaagtagacctgttacaatgggaatttgaaagaatcggttatgaatatatgggggaatttgggctatcaggacgtcgttatttacgaaaaggcccgataaaaagaacacatcatgtgcatatttatcagtttgacaatacgcaagaaattttgcgccatcttgcttttcgaaattatttacgagaaaatccggcaattgctacaacctatggtacattaaaaaagcaattggcccaagcacaccccgatagcattgataaatatatggatggcaaagatgcgttcattaagaaaatagaaaaagaagcgttgaagaaatattgggaaaaataaaaaaagttgctaaggctagcaacttttttttggttcttttttgaaaaaatgataaagaagaccacttaaaagaacacctagaataattccaatcgctaaattatgcgtatagacgatcacacccactgtcacgagtaaaataacaatttcagtaatttcaaaagttcggaaaagctgcaaactttcccaatcaaaggtgtcgactgccactgtcatcatgatcccaatcaatgcagctgtaggaatggctaccatcacggatttaaaaacaaaaatgaatagaaggagggtaatacctgaaatcaaagtagaaagccgttttcgtcctccagatttaacattaatgaccgcttggccaatcatcgcacagccagcttggccaccaaaaaagccggtaattatattagcgaatccttgtgctttaacttctcgttggctatcactttggctcgctgtcattttgtccacaatggggatcgtcaataaagattcaattaacccgaccattgctaaggcaacagagctaggtaaaataatccacaacgtttctaagttgacgggtacattaggccaacggatcgctggatgaaactgactcatttcaccaagatcacctaccgtttgcaaatgaccttttaaaaaataggacaggatagtcatgaataaaataacaattaaagcaggaggcacaattgtaataaacttaggtaatagataaataagtaagatactacagataatcataccgtaggaccacagtgtttgatggggcaattgttgtacttgcgccatgaaaattaaaatggtaacgcattgacgaatccgtacatcactgtcttgggaataaagcgcatcaatttgtggatacctaaataacctaaaataaattgtagaaagcctgttaaaatagtcgcagcaagcatgtatgacaaaccatgtgcttgaattaagcctgcaaggactaaggccattgagccagcagacgccgaaaccattgccggacggccgcccgtaaaagtaatcacaagtaaagtaacagctgaagcaaacactgcagaaagcgggtgaacaccagcaataatcgcaaacccgattacttctggtaaaatggcgacagaagaaacgagaccggcaaagagatcatttcgttcattgcctaaccattcgctttttttaatactaaataacatcgaaaaactcctttaagttaataaaaccttattcataatagcatgaataagctgaaatgagcgtgggacaaaaatcactttggatttttgctccacgctcaaaaactgataaacggcgggaacaaaagcaactccttcggaaataagccggaattctccaaaaattacagaacaattttcggaaattccttcttatttctcggagttaaacgcttctgtcccgacctcattagaactgtagcagtgccaacaacaaaatggctaggacgacttgaacagttcctactgataaaccatagattaagaaacgtttgccttcttggaaaaactttttaaaatcgagtcgtaacccgattgctgccaaggcagtaatttcaaaccaagaactaaagaaatgagcagtctcactgatcacgacggggaaatgaatcaaactattaaagacacaggcaatgaaaaagccaactacataccaaggtagggcgctgctttttttggtgacttctaccaactcagcctctgattctgccgtcttactttgcttgaaacgtccaaataaatagacaactgctacgagtaggacaatccgcataattttaaagagcatcgcaagttgaactgcgttctcattgaccatattggcactggcgacaacctgaccaactgattgtaaagtccctccgattagtgcgctacgagccaacaaattggtaccatagagaatcccacttaaaatgggtaaggtcaacattaaaacggttcctaataagtttactaaagtaatgatttggcctttttcttcctcatctgcttgaattgctggagcaatcgaagcaatagcagaagacccacaaacggcattaccaccagccatcaataaagacatattatcagaaaaagccagttttttaccgatcaaataggcaaaaataatggtcagcgacatttgaatgagaataaatgcgacaccttgtaagccaatttgggcaatcgtttgaaaggtcacggtggttcccaataaaacaacagaaaattctagtaatttactttcggctactttggttccgcgatttaaattggcaccgcgaacaaaggtatttcccaaaaagattcctagtaaaatagctatcgtagcggcgcctaagctaggtaaccagatggcaagaaacttgctaaggcaggcgacaaggaaagctgttagcaagccgggaagaatttggaataaagattggatataatcattttctgaatttttcattgaaaaaatctctctttcttgttcattacttccagtataacgaaattttttacatttgaganataaatagttaanataatatttat

SEQ ID NO: 116 - DNA, 5147 bp; double-stranded, linear
gaagtcagtgaagcgaaattaaaagaagcagccaatcttatgccagaagagccgttaattcaatttgctttgggagaactatactttacaaatggtcaatttgtcgaggctattactcgttatcaaagcattgtagaaagtgggacagcgcaaatctctgctatttccttgaatgaacgcttaggaagtagttacagcatgttaggtgattttgaagaagcggttccttatttggaagccgcagtcaaagaagaacaaacagacgatcgtttattccagttagctttcacttatttacagttacatgagaatcaaaaagccattgcgttgttccagcaattaaaaacactaaacccacattatcaatcactttatctatatttagcggaagcgctccaagaagaagagcaattagaggaagcaaaagcggtgatcgaagaaggaattgcggaaaatcccttccaagtagagttataccaatttgcctctgaaaatgcctatcgcttacacgatattgctggtgctgaaaactggttgttaaaagctttggaattaggtgagaaaacagatgaaagtcgtttgaccttaagtaatctctacatcacggaagagcgttttgaggaagtaattactatcttaaatgatttagaggaaacggatcatccttatgctgaatggaacttagcaaaagcgtacaacgaattagaagactttgccgtcgctaaagttcattatgaacaagcagcgcaagaattgtctcacgaaccagaatttctaaaagaatacgcattgttcttacgagaagaaggcgaacttgaaaaagcaaaacacttgttataccactatttggaacatgaacctggtgatgtcgacatgcaatctgtgctagcagatatggaagaaagataggaaacgacgatgtttgttagtttatcagaaaagaaaaaatttttaacttggttagtgaataccgcgccttttggaagaagagaagtactgtggattttaaattacttattaacgcacgatgcgattttaaataatgttcattttgttgagaacgtagaaaaaaccgatcgggggattcgtgtggtagcggatggtttaggtaaggagccgttattgctttttatccaagcacaagaatttacagatccggaacaaatttttcacgagattcggatgaattggcggaaagctctttatttagaatgtgtatttccagaggcttggcaaacgagccagtatttatctgttttagaagataatccgtttgcgccatggaatgaacaagtggatcaggaagttgccagagcgattgatcaatattttaagcaagaagaacaaacgcagcgaatggcattacttaaagctcaaattgatgatgctttagaaacaggcaacaaagaagcgtttttagaattatccgatgaattaaatcgtttgaaacaacaataaataaaacccagcatttattgaaaatgctgggttttatttattgttttaatttaaagcgccgttgtttgctgggttttgcataagtaaagccttcgccaattgcttcatgtacgttaatgatggacacaaaggctttttcatctatttcattagcaatccgtttgacttccattatttctcgagggctgactaccgtgtagagaacccgtttttccacttgtgaataagcaccttcaccatttaaatatgttaccccacgttctaaagaagccattaaactttgaccgatttcttcggaatgattggaaacaattaaaattcctttcgcagcataggctccatcgagtacagaatcaacaacacgactgaaaacaaaggacacaattaaagtatacatcattcgtttgacatcaatataggtcaacgagaggagtaagactgcaacatcaaaaagtaacaacgagcggcccatgctaatcccaaagtatttttcgaaaatgcgggcaatgacgtcggtcccaccagtggttccgcctacgcggtaaacaaggccactaccgaatcctgcggccaaaccagctaagagagcagcaatcaataaatcatgatctaaattaatttcaacaggaaatttttgccaaaaccacaaaaataccgataacgacacggtaccaattagcgtataatagagggaacgtttgcctaaaattttcccaccaattaataagagcggaatattgattaataatgtcgtatatgctgggttaaaatgaaataaggctcttaaaatcaaagtaatccccgtgacaccaccttcggccaggtcattggcaatattgaaagtaaccaaaccaaaggcatagatacagcttcctaatacaataaataacacatctttaaaataaaatctttgttcttccacttaatcacgtccttttacagtataaactgtatcattctctatataaaacaacaagtagaacctttccagatagccaagtttttgataagatgtaggaggtagagtaagaaaggttggggtaaaatgtcagaatcagaacaacgtagtttgcaatcgatgcaaacagaagttgatgattatattcaacagtttaaaacaggctatttttcaccattaggacaaatggctcgtttgacggaagaggtcggagaattagcccgtgaagtcaatcattattatggtgaaaaacagaaaaaagcagacgaaaaaccaaagacagtatcagaggaacttggagatgtcttttttgtattgattagcatggcaaattctttagagattgatttaaccgaagtttttgaagaaaatatggccaaatttaacaagcgggatcgctatcgctttgaaagaaaggatgggaaaacacatgattaaaataattgtcgctgggtttaaaggacggatgggcagtactgctacacaaatggtcttagaaaccgcagactttgaattagtaggtgtgtatgatcctcatgaagcacaagaaactgtttctttcaatgatgaaacagcaattcccgtttttcagcgcttagaagaagtcctagctgtcaaaccagatgtttggattgattttacggttcctgaagccgcctatccaaatacgcgttttgcgttggaacacggtatggcgcctgttgttgggacgacaggctttacggaggaacaaatcaacgaattgacaaacctatctcgagaaaaagccatcggcggcttgattgcgccaaattttgcaattggggcagttttaatgatgcaatttgcccaaaaagcggcgcagtattttccagatgtggaaatcattgaattacatcatgataacaaattggatgcaccgagcggaacggctataaaaactgcagaaatgattcaagaagttcggccagcaaaaaaacaagggaaccgcaagaggtagaatcaataccaggggcacgcggggctgatttcgagggtctgcgaatccatagtgtccgcttacctggtttagtggcacaccaacaagtccaatttggcagtgtaggtgaagggctcactattcggcatgattcttatgatcggcgttcattcatgacaggagtagcgttagcttgtcggcaagtggtacagagaacagaactactttacggattggaacagatgctatgaaattgacaactattccaaacgaatttaaagaagccgctcccgttattcgtgaaatcaatgcacagggctttgaagcgtattttgtcgggggcagcgtccgtgatgctttattaaataaaccaatccatgatgtcgatattgcgacaagtgcctatccagaagaaattaagcaaatttttaaacgaaccgttgatgtgggcatcgaacatggcacagtccttgtattgatggaagaccaacagtatgaagtaacaacctttcgtaccgagtcaacttatcaagactttcgccgaccagatgaagtcacctttgttcgctccttgaaagaagatttaaaacggcgagattttacgattaatgccttggcgctcgacagcacaggtgaaatcattgatttatttgatggtatcgaagatttaactaatcaaaccattcgtgcagtcggtaatccccatgagcggtttcatgaagatgctctgcgaatgatgcggggcttacgctttgctagccaattagattttaaaattgaagaaaaaaccttagccgctatcgctgaatttcatcctttattggaaaaaatttcagtagaacgcattacaattgaatttgtaaaaatgcttttaggggttaatcgacaaggtggcttagctccgtttattgaaacagaatgctatcaatactgtccaaaattacgagaacaaggggctggactttttcgtttaatggacttgcctgctcgtcaaattgaaacagaagcagaagcgtggacgttacttatccaatcgttgaatttaccagaagcagaaattcgctccttcttaaaggcttggaaactttcaaatcaattaatccaaaacgtttcacaattagtacgcggtttgcgttttcgcttgagtaacgactggcagccaatgatgctttatgaattaggcgaagaatcagcagtacttgttgaaaggcttttatattattaccaacaagagagtcaagtacaagtaacaaaagagttagttaaggcattacccatccatcaaagacatgaattggccataacaggaaaagaccttttagccgtcttagaagaaacaccaggcaaatggttaggggaactgattgctgaaatcgagcaacacgttgttgaaggtagcttagagaataaacaagaagttctgctttcgtttgccaaaaaacaacgttcaaaaggagagaaagcataatgccaacagaaatgtttacaaaagaattcttggtgaaagaatcacaaacggctaraatgctcggttctggtgacttagaagttttaggaacccctgctttagctgccatgattgaacaaacagccaaagaagctgtgaaggaccawttatcagttggggaaacaactgtcggaacggtgttagaattgcgccacttatttccatccgcggtaggggcgacaatcgttgttacgatgaccagcattgaacagactgcacacaaaatacgctatgaatttgttgcttatgaaggagaacgacaaatt

SEQ ID NO: 117 - DNA, 12022 bp; double-stranded, linear
aagaatttagacaactattagccgcaaaaggcattgaattgacagaccaacagatgacacaatttgaccaatatttccatttactagtagaatggaatgaaaaaatgaatttaacagccattacagaagaaaaagaagtttatttgaaacatttctatgattctgtttcgttggcattctttgaagactttgccagtgacaaagccatttgtgatgttggcgcaggcgcaggatttccaagtattcctttgaaaattgtttttccttcattaaatgtcacaattgttgactctttaaataaacgaattactttcctaacagagttggtgaatcaactaggtttggctaatgtttctttgtatcatgatcgtgcagaaacatttggtcaaaaagcagaatttcgtggcgcgtttgattacgttacagcgcgagcagttgcacgattaaatgttttaagtgaactgtgtttacccttagttaaaaaagaaggctattttttagccttaaaagcatcgaaaagtgaagaagaaattaatgaagcaaaacctgcaatcgctacattaggcggtcaatttcaaaaagaagttggttttactttgccgattacggcagacgaacgccacattgtcgtgattcaaaagaaaaaagaaacccctaaaaaatatcccagaaaacctggattaccaaataaacaaccgattaaataagatggaggcacacacatgacacgaattatttctgtagcgaaccaaaaaggcggcgttggtaaaacaacgaccactgtaaatttaggcgcatgtttagcaaacttaggcaaaaaagtcttactgatcgacattgatgcacaaggaaatgctaccagtggcatgggtgttcctaaaccagatgtcgcacacgatgtgtatgatgtccttgtaaatgaagaaccaatcactagcgtggttcaacataccagccgtgaaaatttagatattgtccctgcaactattcaattagcaggcgctgaaattgaattaacttcaatgatggctcgagaatcgcgcttgaaattagcaattgatgaagtaagagacatgtatgatttcgttttaattgattgcccgccttctctagggcatttaacaatcaatgcttttacagcaagtgattcgattctaattcctgttcaatgtgaatattacgcattagaaggcttgagtcaattgctaaatacgattcgcttggttcaaaaacattttaaccctgaattgaaaattgaaggggtcttgttaaccatgtacgatgctcggaccaatttaggtgccgaagtcgttgaagaagtccgtaaatatttccgtgaaaaagtctatgatacgattattccaagaaatgtccgtttatccgaagcaccaagtcatggtttaccaatcattgactatgatattcgctcaaaaggtgccgaagtgtatcaagcactagcaaaggaagtgttggagaatgaataaaggcaaaggtttaggcagaggcatcgatgccttgtttcaagatatcgcaaagctagaagatgtcgacgttaagaacgaacaagtgacagaaattctattaaacgaacttcgtcccaatccttaccaaccgcggaaaacatttgatgaaacctctttacaagaacttgcaaactcgattctacattccggtgtgtttcaaccgattattgttcgtaaatcggcagttaaaggctatgaaattattgcaggtgagcgtcggttccgggcttctaaattagccggcaaagaaaaaattcccgcaattattcgcgaatttgatgaagaatccatgatgcaagttgctgttttggaaaacttacaaagggaagatttaaatccgctagaagaagcagaagcctatgaaatgctaatgaaaaatttaaaattaacacaagcggaagtcgcagaacgtttgggcaaaagtcgcccgtatattgccaattatttacggttgctaactttaccagatgcggtcaaagcaatggttcaaaaacaaagcatgtcaatgggtcaagcacggacgttattaggcttgaagaacaaagaacagctattgccattagctaatcgttgtattaaagacaatttaacggttcgacaattagaacaacttgtcgctgaattaaacgaaacacaaggcaaaaagggcaaaaaagcgaaaaaagccatcaaggaaaaacccatttatattcgagaaagtgaagaccgcttaatggataaatttgggacaaccgtagcgattcaagaaaaagaaggcaaaggaaaaattgaaattgagtacttgtcctcttcggatttggctagaattttagatattttagatattcattttgacgaggaataaaaagcaaagtgagaaagtaagacagaaagtcacaaatccttttgctagtttcggtaaaaaatggtattgtaatcatggtatttttatataagtaagagaagaaagaaggcttggaacatgtatgatttaggcgatattgtcgaaatgaaaaagccgcatgcttgccaagcaaatcgttggcaaatcattcgcatgggcgctgatatcaaaatcaagtgcacgaattgcgggcatattgtcatgatgccgcgtcgtgattttactaaaaaattaaaaaaagtaatcgagaaaaaagcagactaatgctttgatgcctctaatagaaaagagaatagactgagagaaagagtggaaaacaaatggcactaacagctggaattgtcggcttaccaaacgttggtaaatcgaccctatttaacgcaattacaaaagcaggagcagaagctgcaaattatccctttgcaacgattgatccgaacgtcggcatggttgaagtaccagatgcccgtttacaacgcttgacagaactagtaaaaccgaaaaaaacagttcccacaacgtttgaatttacagacatcgccggaattgttaaaggtgccagtaaaggagaagggctaggaaatcagtttttaagtcacattcgtcaagtagatgcaatctgtcacgtggttcgttgttttgatgacgaaaatatcatgcgtgaacaaaatcgggatgcggatttcgttgatcctttagcagacattgatacaattaatttagagctaattttagcagatttagattcaatcaataagcgctatactcgcgtggctaaaatggcgaaagcaaaagataaagaagcggtggaagaattagctgttttagacaaaattaaaccagttttagaagaaggtttatctgctcgtacgattgaatttacgccagaagaagagaaaattgttaaatctcttttcttattaaccacaaagccggtcctttatgtagcaaatgtttcagaagatgaagtggcggatccagacaacaacgagtatgtacaacaagttcgtaattttgcaaccagtgaaaatgcggaagtaatcgtagttagtgcgcgagcagaagaagaaattgctgaattggattctgaagaagacaaggctgaatttttagaagcaatgggcattgaacaatctggcttagatcaattgattcgtgcggcttacgatttgttaggcttagctacctactttacagctggtgaacaagaagttcgtgcatggacgttccgtaagggaatcaaggcacctcaagcagctgggattatccacagtgactttgaacgaggcttcattcgtgcggaaacagtttcttatgaagacctagataaatatggcaatatgcaagctgccaaagaagcgggccgtgttcgtttagaaggaaaagactacgtcgttcaagatggcgatgttatgttgttccgttttaacgtttaaaaaaatgtgcccaacaagcaatttgttttgggataagcccacatatttaaggccattcagccgtttagaaagaggttccctctacatgagggtgaggaggatacaactatggaagcagaagcattacgagcaatcgtggctgagaatcgtcaattagaacagaatttgactaaaagaaatgaacaatacatttttgacttaaaaaaatcattaaaagcggctaatttatctgaagaagagctagcattggctctacacggtattttgccagaattagtagccggtcaaaaaacaggtaaaacagcccgtcagttatttggcactgtttcagaacggacggaagcaattttaaataaaccagcagaagtcaaagaaccagcgggctggatgatttggctcgacaataccttactattacttggtttattaacaatcatgttagcggcgatgtctctattttcaaaaggaaccgcacaacctctcggattaaccacatatatcttaggtgcgatggctgggggttatgttttctatctaatgcacaaatatgtttaccgttttgatcgtcaaggtggcgacaaaagcaaacgtcctggttggttaaaaacgaccgccattctatttggtgggatgttcttgtggattgcagttttcgctggttcagcgatgctaccaccagtgatcaatcccatcttagatccgatgattgctttagtaatcggtgcgttagcctttgtagcacgctatttcttcaagaaaaaatacaatattcaaggtagtttcatgacacgtcaataaacggcgcgcgctcaattgtgaatgcgctcggctgacgcagaaactgcaacaagcaaagtcgctctctcaatagagcgttttaacagttaaagcctgggggattagtcgaaaaaactagtgtcccaggcttctgttttcagaagtttgctaaagaaaggagcctcttatgggacaacaagtgaagtcttggtgccgtcaacacgaccggctactcatttttattagttttctcttattaagtggactttctctctattttgtctattttcaagagaattttttacgagcaagtgatttccgctttcatcaaaatcgggtggaaggtctcgcattagcaattaaaaacaacgactggtttcctaaaatcaattattttttcttgggaggctatggctatgcctctagtttgttttatccagatgcgtatctttatttacctgcgcttttgcgtgttctggggatttcctttgtcgctagtatggcgatttttgtttttgcggtaaacttggcaacatttagtcttacttattatgcaggccgattaatggcgctctctaaaaaaagaagctatctctttgccattttgtatggcttatctatttaccgcatgcaagacttgtttaatcgccaagcgttaggagaatttttggcgctaagtttttttccgttggtcttagcgagcctgtttttattacgaaagggaaccacgaaatgttggccgttgttaacgctggcgatgactgggattgggttggctcactttatttctattgaaatggtttctatttggattgggttatacattctgttttattggcagcagttttttaaaaaggaggtcctgttggcattagcgaaggctgcaggtttgacgctgctttggctggccttttatcttttaccagttgctgaacaaatgaaaaatcaagtgtttaaagttacgtccaatccactcacttatatttccgaaagaagttatcctattgtttctcttttcattaatagtttaaagagcagtgtttttcacgcgaaaacagcgaatctaggaacccttttgtttgtggggcttgttgtagcagtggtttcgcttgccagcaaaaaaattcagaacaaacggtttattggtttgacgctggtactcttattgatggttaccacgctttttccttggcactggctgaaccacacgcctttaaatacaattcagtttccttggcggtttttagggattctttctgtaatgctcgcttttttcattgcacaagacgaatggggcgttttccgtaaatcttggaccgtggctttgttggttttccttgccatcagcaatttgggcatttatcaatatcaaagtattcagtcacaacaaggccgcctgttaacaaaagctgagtatgagcagccagcgcctttttatatcggtgcgggccatgaatatttgccagatgaaatcaattatcaggaattattgaaacagaaaaaacgaccacttgattattcggcagaacaagtaaccattacaaatgttagaatgccttatgggaaaatttcatttgactaccaagtggtgatcaatcagcgaaggtgaccgttccttttatttattacttaggctatcaagccacgattcaaatgaaaaaccaaacgggcgctaaaaaaatgagcctaaccaatcaaggaggcttaaccgctctttctttatctggtacaggacatgtcgacatccgttaccaaagaacaaaagtgcaaaaaatagggacaatgattaccttactttctgttggtggttttggatttagccgatttttacaacaaaaaaagaaacacaagataaaagaacaacgatgaaagtaggaccttaattaggaagagttgaataaaggacaaaccgattttggcgtttgtcctttattcctcattgattatttaaacaaatctagttgacttccttagtattatctgttattttcatatataaaattaagtcgaggagtggacaaaaaaatgtcaaaytgggaaacaaaatttgcgaaaaaaggtcttacatttgatgatgtgctattaatccctgcagaaagccatgtcttaccaaatgatgtagacatgagtgtacaattagctaaaaatatcaagttaaatattccattgatgagtgccagtatggatactgttacagatagtaatatggcaattgcgatggctcgtcaaggtggactaggtgtcgtacataaaaatatgactgtcgcccaacaagcagatgaagtacgtaaagtcaaacgttctgaaagcggcgttatcattgatccattctttctaacaccaacaaacttagtagcggatgcagaagaattaatgagtcgttaccgtattagcggtgtgccaattgtagaaacaatggaaaaccgtaaattagtcggaattattacaaaccgtgatatgcgttttgtaacggactaccaaatcaaaatcgaagaagtcatgacaaaagatcatttagtcactgcgccagttggcacatctttaaaagatgcagaaaaaatcttacaaaaacataaaatcgaaaaattaccaatcgttgatgaagcaggtcgcttaagtggcttaattacaattaaagacattgaaaaagtgattgaattcccaaatgctgccaaagatgaacacggtcgtttacttgtggcggcagcagtcggtgtcactagtgatacgttcgaacgtgcggaagcattattagaagcaggtgcggatgcgattgtcatcgatactgcacatggccatagtgccggcgttattcgcaaaattaaagaaattcgtgaaacgttccctgaagcaacattaattgctggtaatgttgccactgctgaagcaaccaaagcattgtatgatgtcggcgttgacgttgtcaaagttggtattggacctggttcaatttgtacaacacgtgtcgttgctggtgttggtgttcctcaattaacagcgatttatgatgctgcttctgtagctagagaatatggtaaagcaattatcgctgatggcggtattaaatattctggtgatatcgtgaaagccttagctgctggtggacatgctgtaatgctaggaagtatgttagcaggtacagatgaatctccaggcgaatttgaaatttatcaaggccgtcgtttcaaaacttaccgtggcatgggctcattaggtgcaatggaaaaaggatcaagtgatcgttacttccaaggaagtgtcaatgaagcaaacaaattagtgccagaaggaatcgaaggacgtgttgcttacaaaggaagcgtttctgatattgtcttccaattaatcggtggcttgaaatcagggatgggttacgtcggtgcagcagacctgaaagcgttgcgtgaagaagcacaatttgttcaaatgagtggtaacggattgaaagaatcacatccacatgacgttcaaatcacaaaagaagcaccaaactattctgttcaataaaataaaagctgatttttttgaaatttaaaagaggaagacgtcatttcgacgtcttcctctttttctgtagaatgaaggatttgcttctgtttccgccgtttatcaatttttangcctgtaacaaaaatccaaagtgatttttgttacaggctccttttcctatagaataaaagccgttatctgatatcagacaacgaccttcatcttccctttatttaataactgttaggttacccatgtaaggaactaggacttctggtacagttacagagccatcttcgttttggtagttttctaaaatagcagcgactgtccgtcctacggctaaaccagaaccattgagtgtatgcgcatattggactttatcattttcatcacggtaacgaatcatcgcacggcgcgcttggaaatcttcacagtttgagcatgaactgatttcacggtacgtctcttgagcaggaatccaaacttccaagtcataagttttcgcagctgagaagcccatgtcacctgttgaaagagccatgacacggtaaggtaatcccagtttttgcagaatttcttcggcattattcgtcattttttctaattcctcataagaatgctctgcatcactaaatttaaccatttcgactttattaaattggtgtaaacgaattaatcctcgtgtgtcacgaccagcgctaccagcttcagaacggaaagaagggctcaaggccgtaaagtaaatcggtaaatccttgccatctaaaatttcattgttgtagtaattggttaaagggacttccgcagttggaattaacgttaaatccgtatcttgtaattggaagacatcttctttaaatttaggaaattggccagtcccgaacatggcggtgtcattaacgatataaggcgtaatcatttctgtatagccatgttcataaacatgtaaatctaacatgaagttgtataacgcacgttctaagcgtgcacctaagcctttgtaataaacaaaacggctaccagctactttggcaccacgttcaaaatctagaatgcctaagttttcagcgacttcccagtgtggttttggttcaaaagcaaaagttcttggttcactccaacgacgtacttctacattttcttcttcaccagcaccaacaggcacagaatcatctggcaaattcggtaaagtagttgtgatcccacgtagctcttcgtcaatagcgttaatttctgcatctaatgctttaatattgccgccgacttctttcatttccgcgattttggccgttgcatcttctttgtttcgttttaattgagcaatttcagcagacacatcattccggtattttttcatttcttcgactttgactaataaatcacggcgactttcatctaaacgcagaaattccactaagatttcttctttcacgccacgggtttgtagctttgcttttacttcgtcaaaattttgacgcatcatttttacatctaacatattttttcctccttaaaattagtacataatcaataataactgttgtagaaaacaacaaaaaagccatctcaccccaaaaataaatattcttgggacgaaatgactggaaatctcgcggtaccacccaagttcagtaatgttactgcccttgatttgcagataacggctgcagaccgttccaacttatttcgctggacacctggaagagacggacttctttatagatgaatgtttgctcgcacccccgcaaactctctggaattcagtgccataaatactttttctcttagttttctcttttctatagaataccgaaaaagttcagggatgtcaattaactctctgatttcttgttggtacgctgtaagggtagatgaataataaaggaagtccacttttgatcagacttcgcataaatatatccaccatgtaaagcgacaatactttgtgcaatagccagacctaaaccagtaccccccgtttcttgtgatcgggattcttcgacacgatagaagcggtcaaacaactgatctaaagaatgtttagggatagctggtccatcattgcgaacagcaataattgcttcggtgccgactttgtctacttccattacaatatgatggccacctttgccatatttcaaagcgtttgaaagaaggttgttaaagactcggactagtttttccgtatcgccttccatcattaaagaagctggattggcttttacttggatttgcatattaatctttttcgcttccaattcaaaatcggcagcaagctgttcaattaattgtgccatatcaaaagtcgtcgtatgaatcggtacacttggttgacggacttttgtatattcaaaaagatcatcaactaataatttcatttgtttcgctttgacgtaagcggtatgcgtatatttcagtaaatcttcttggctatgaaattgacgatcttcaatcaatcccagataaccaataatagaagttaacggtgtccgaatatcatgactgacattcgtaattaattcatcttttgatttttcaattcgccgttcatcttcaatggctgcgacagtactatccaccagaccgttaatactcgtcacgacttttgctaaatcaccacttaattcaaacggaatgcggtgattgtaattaccatcagcgatgtaatgtaactcactgataatatgacgcaattgcatttgatggtagcgacgaattaagcgccaatagagaacagctgcatctactaaaaagaaaatgggtaagacaaatttattccagctccaaaacaaatcagtatttaattctttagcgaccgcatccttagtggcccagatgacaccagctaagggcgagttttcactaagtagttgtcctaaaaggaacataattgagacatttaatagtagtaataaaacaattgtcacaattgcttctgctaataactcgctgatttctttagaagttaaggtaattcgtttttgtttttcaatctttttaggtttaacgagcatcgatcttatatccaactccccacactgtttgaatgactttttctccaccagttgcttcttcaatcttatctcttaaatgactgacgtgaaccatcacggttttagcagaaacaatactttcttgttgccacacacgctcaaaaatttcatccgcactaaacacacgatttggatgactagctaatagatagaggataccaaactcaagagcggttaattgaatttcttttccttctattgttttgacttcgtgagagtccttattaatcattaatgggccgacttctaattcatcgggttcttctttggttaattgcatttggcttctacgtaaaatagactttacccgagccattacttctaaaggattaaaaggcttggtgacataatcgtctgcaccagcaactaagcctttgattttatccatatcggttgtttttgctgttaacataataattggaatttgcgattcttttcgaagttctttcactacttccattccatccatgattggcatcataatgtccaagattaataaatcgatatctggtgttgtgtgcaatttggataacgcttcttttccatcataagctttcacgacttcgtatccttcattatgaatataaatactcaatagttctacaatttctttatcatcatctgcaactaaaattttcataagcgttcatttcctccatatataaaaaatctcttttccatattttaacaaataattgctaaaaaggacaaaatccttgatatattacgataaatttagaagattttgctaaaagttaataaactatagccaaaaaaggatgaaagggggtaaaaaacgaacgaaaatacctataccaatcataataatcggtattgaaaaaaagtttaaaaaaagtg

SEQ ID NO: 118 - DNA, 556 bp; double-stranded, linear
taaaataatcgcaatgactgcatctgtaaatgcttctacacgtgttttcggcatcatttccccctactttcataaaaattaaataacttacccaaagtaagtataacgcatttctgtaaaaattcaattatttatgaagtctctcggttgttgaagttcctaaaaacgagtgcaagagccccacttaaaagtaagcctcttgcactcgttatagaacaaatcagttattggaagacgcctgcctgataaggtgctaactgcatccgtttcttcaccgtaaaatcttgattccctaataattgttgccactttctgcctagtaatttattcggcaagtcaaattggcacttttctccacttaaattgacaatcactaacgctgttgcctcagttgtttttcttaaaaaagcaaaaacagacggatgattgggcgctaatagttcaaactgtccatctgtaaagaccggattgtctttccgcaacgcaattaactttttataataatcaatacggatgcgcatccgtttcttgggcagccacatttatnncttgaaat

SEQ ID NO: 119 - DNA, 5998 bp; double-stranded, linear
tgttaaaaaaaccatttttactatttttttcacttttaggagctatttttattttagctagttgtggcataggaaaagatgctgtcacagatactaagtacaaagttagtttgcagcaagctgctgaaatctatgaaaaagaagctggcaacagcaaaccattagtaaatgtccaatttgatacagaaccagcaagtgactacagctatatctttactaacgatacagaaacactttacgtgaatcctgaaacaggaaaagtcaccaaaaatactgaagcaaatcaacttggcgaaaacgagacagccttttcagctgctgaagtcaaagaattaggcgctgttaacgacgttttagccaaagcaaaaaaagaagttggaggactttctccacgtattttgacttggaagttaaccaaaaataacaataaacttgtttatacagtagatgttaaaacgactacggcagatgaaaaagttaccttagatgccaataaataagcacaagcgtataacttatcacgaaataaccaaatcttaaaatactctttgggacagaaactacgcattaggaaaccttaacattttccgaagccgatcgttctgtcccaatttcattcttttaagtaataataattgttcgttacccctgctaccgttatacttagtttaaaagaaaagatgggagtatcaattcatggtttatacagttgattttaaagaagtagccactattggtttagaaagttcaccagtggcacctgcccttgctggactaagagcgaatgaagctcgctatttttggaataaatacaaacatcgctttacgaccgtccctgcctctgaagctccagaaacattggcctggattgaaaaaattttattagaacgagaattacatttcccttacaagccacttgaaatttcttctttcactttagatggcataaaaatggcctatgtattttatgaaaacggcttagcagttaacgtgatgtacacattagctgaggaaggcaaacgcgccgttgggtttaaactttcagatggtatggcaatccctgcagaatttgaaggaaaattcaaatttgctcgtcaaaaatcaaaattagctggaaccattcgcggctcttattttgtcattaaaggaacctattaaaaaaatgcttttgcccttattattaaaggcaaaagcatttttttattttaattcttcaatatagttaaatacttgttgtccagcaataccgccttcaccgaccgctgtcgtgatttgacgcaatgttttttcacggacatcaccaatggcataaacaccaggaatttttgttctcatttcttggtctgtttcaatccaaccagcctcattcgtaataccagcttttttaaatggttctgttaatggatctagccccacgtaaatgaacacgccgtttgcttcaatttcagaaacttcatctgttttgacattccgtgctttcacacctgtcacgaccatttcattgccaacaatttcttcgacaactgtatcccaaacaaaggaaatcttttcatttgcaaaggcacgatcttgaatgattttttgcgcacgcaattcatcacgacggtgaacaatcactacttcagaagcaaattgcgttaaatagattgcttcttcaactgcagaatcgccgccgccaacgactactaagcgtttatttttaaagaaagcaccgtcacaaacagcacaataagaaacaccacggccagcaaattcttcttcgccttttacacccaattttcggtgttcacagcctgttgcaataattaccgctttagcttcataagatttgtcatcacaaatcacttctttataggatccgtggtcttcaatgcccatcacaataccatacgcattttccgtaccaaatttttctacattttcatacattttataggccaattctggacccataatagaatcaaagcctgggtaattctctacctcagcagtgttgttcatttgcccaccaggcgcaccgcgttcaatcattaatacagaaagattggaccgtgatgcataaagtgctgccgtcatcccagcaggaccggcaccaatgataattacatcatacattttatttcccccaaaattttaagtaagtttactttactccttaaacaatttcttgtctacttttctgcccttttttgacattcggagtaggtgtgtctattacgtaagttattgtaccacggttttgtgttttctaggagggggaaaagaaaagtttaaaaataacgatcacaacgaatcattgatttttagaagccgttgtactgccgcatcagagaattcttctttatcattttttatgcattcttgttgattttgcccttgtggaacaaaacgaaatactgtaaatgatgcagataacgtatcaggattactaatccgatgaagacttttatgcatccgaataagttctccttctgcacaaattcttgaaataatttgctgattttctagctcttctattttcacttttcccgactgcacaagtaaaacttcttcgatttcgtgatgcttatgccaaccttgcacagtttttcctggcaagctatttatatgtatttcaaactctggaaatagaaaataatttacttctgttccatctggctttttacgaaagatgacctcgtctcttgttaaaatttctatatatttctgtaacatggcaggctccttttaactttttttatagccgaaagctattctttcaaactaagtttgaagctactttctgaaaattcgagttcctttaaatatacttttattaccatttgaaaatcactttttttaaaacaattgactgttcagtatcaatcttcactaatccatctgttcaccagaaaaaatatagtatttccgattattcacgaacttattattcaacttcaaaggaaaatcagtcaacatacagcccacatatctaacatcagaaacacttctacttttctcaagtactgctatggtatacattgaccttactagtaacattatagcatcaagttttaatcatatgtagatttaaaaaaaatgatagcaccctaacagatgttttcgttgctcatttaatttacatgattattttttagatgctaattaaatgtttgtcagtaacctgaatttttgatatttttatccagattacttatgtcggtttatcagttgtgctaacaaaaaatgattgtttttaaagataatttaattcataatatatatagaatgaaaaaaaggaggttttattgttgaaagttgctatttgtgatgacaatccaacgttaaccgaaaaaataaacacgatgctatttaattataacccaaatatatttgaaacctatacctactacaatcctctcaagttagtcaatcaacttgaccaagaaaattttgacttttttattttagatatagaaatgagtgaaatgagcggaatagacttggcaaaaaaaatccgagaacgtgatattttatcacctatcgtttttttgacgagttacaaagaatacatggaagaagtcttccaagtacaaacttttgattatttattgaaaccgctacggaagatcggttgcaccaagttttggaaaaactgagacaacagctagaaaaaaaaagaaattactttgtattttctagtaacaaagttacttataaaataccaaccaaagatatcatttatttcgaaaaagataaaagacaagtattgattcatacagttggagaaatctacaaaccctatatgtcaacgaatcagataaacgaacaacttgatacgaattttgtgcaagtccactcttctttcataataaattgcgcttatataaaagagttaggaaaaaatttcctattaatggattctaaagaaaaatgtattgaaataccaataagtaggcgcttcaaagccgccgctcataaaagtatagttatgtccatgagaggaaagatataatgcttgatataacattacgaagcctaagtttgttagtttatttatttcttatctcttattttttttctaattggtcaacagctattaaaaatcatagagaattttataatgtcatctggattgttataatcatatcagccatggttacgattatattatccaatgcttacataccgaacatttatttaccgtatcttaacttattactaagtttcattttaacttacactattgctatgctacactcggtcccttatctcgactcggccgtatggacaatgacacttatatcaataaatttaatctgtgaagtattgtcgttacactttacgaaaataattttaaatgcagaattaacatcctatggtagccctacttttttcataacttcaataacaattacaactttgattggggtagcctggatagtcatacttaaattttcaatagttaaagaagcaaagtctgaattatcgacaaacttatcatttattgtgattttattacctattcccatactatcaataatcattttatttgggcttttaataggaaacaacaatgacaaaatttctgagattactattacgattagtgtcatatttttaaacatctgtgtaatttttctttataaaatcactatagaatatcaaaaaaatcaatataatcttactttgagaaaaaaaaatatcgaagtggagtatagaattttaaatgaaataaagagaaacagaactaacgttttaaaattaaaacatgatttgaagaatcaatacttaacaatcctcggacttatcgaaaatgaagaagttaatgaagctatcgattatattaagagtagttttgatattttagaaccaccaacaaaaacttatgctgccgatggagtattaaactacctattgaatgaaaagcttgctgaagcaagaaagaatcaaattaatgttgatcatcagatatttgtctctaaaaatataaaaattaataatgacgttctaactattgtaattggaaatataattgataacgccatacaagcatcgaagagaatcaagccgattgacagatatgtcaatataattatcaagcaagtcaataatgatttatttattgaagtatctaataactataattctgaaganatttttacaagaaaacatagaaaaaataaaggtttaggaatgaaaaacattgatgatctcttacaacaattaggtggtattcaacgtcactggacgaaagaacgtagatattttgtaactatagttatatttaatgtatacaaaggaaacaaatgcggtgataactaatcaagtaaatcaccgcattttttagtatacttccatgtcgcataatttatcagaaaatttcaaaaataaccaaacaagcatcaatcccataatcgttgaaaataggaacgttatagttggaaaattcataagacccatagcagaaaaattcgaatatattagcattagtaccactgacgttattattgaagcaatttccgattgtttccaaattgaaattatttctgacaatatcaaaattacgaatagtagactacaacttgtaactatggtaataagaccaaggtaaatttcaaaaaataaatttgaactatgaaacttcaaaattaagttaagcaaaacctcagtcacaaatgaaataagaagcgcacttccaaagctagataagattatcacgtaaaaagaacttgttttttttacgagaagctcttttcgatcaatcggaaaaagaaacgttctattccggtgattgccaacataaaatcgtacaagctctttccttagtaatacagctccataaattgatatgccgcacatagaaacagtgttcgataatgctataattccttgaaatgacgagatcgtatcagcactttcatcaaatattcccacaaatgagaaaamcataaaaaataacatttggattaccagtgtaattaagaaaactttaaaccaacattntaatggnnctaat

SEQ ID NO: 120 - DNA, 1641 bp; double-stranded, linear
aaatccgtagcaacatttatggagacaattacagaaaaatgcggtgaagcacatcaagattgggcaaaaaactttcagggcggnctttgccaatactttactaacaacagtgaaacgtgcaagaagatggtactacctttttattaacaggcgatattccagcaatgtggttgagagactcaacagcacaagttcgtccctatttagtgattgcnaaagaagacgaagaccttgctcaaatgattgctggtttggttaaacgccatttcgttatatttgcattgatccttatgccaatgcgtttaatgaaacagataatcatgcaggccatcaaactgataagacagaaatgaatggctggatttgggaacggaaatatgaaattgattcattatgttacccggtccaattagcctatttactttataaaaatactgggatgaccgaacaatttaattcagattttgtggaaggcgtcaaaaaaattctcaacgtttttacaacagaacaagatcacgcacagtcaccttatttatttgaacgagatacgtggcgtcaagaagatacgttggttgaagcagggaaaggaacaccagttggcaaaacagggatgacatggtcaggcttccgtcctagtgatgatgcctgccaatatggttacttagttccttctaatatgtttgcagtcgtaattttaggctatattcaagaaattttctctgatgttttagaagatgctacgattggggcgattgctaaaaaattacaagaagagattgaagaaggcatccaaacatttggacgaacaaaaaatcaaaataacgaaacgatttacgcgtatgaagtggatggcttaggcaatgcaagcgtgatggatgacagtaatgttcccaatttagtagcagccccttatctgggttattgttcaacagaggatgaacaatatttaacaacgcgtcaaaccttattaagtaaagaaaatccttacttctatgaaggcaaatacgcgaaagggattggtagctcgcatacaccagaaaattacgtgtggccgattgctttagcaatggaaggaatgacaaccaaagataaagcagaaaaagaacgaattttagatttattagttgccacagatgcggggactcatttgatgcatgaaggttttgacgtagataatcctgaaaattatacaagagaatggttttcatgggctaatatgatgttttgtgaattagttatggattattttgacatccgagtggaaaaataggaggaaaagtaatgacaaagaaaaaagtctatattgtttcccatagtcattgggatcgtgaatggtatctgccttatgaagracatcatatgcgcttaattgaattagtggataatgtattagatttaattgaaaatgatccagagtttaacagtttccatttagatggacaaacgattatcttagacgactatttacaagttcgcccagagaaaaaagaagccgtgaaaaaagctgtccaagcaggcnaactaaaaatcggaccatttagtattttacaagatgcttttnaattagctctgaatccaatgtcgaacatgctgattgggcttagaaagcnaaatnggggcacagtcaattaggtactcccg

SEQ ID NO: 121 - DNA, 8033 bp; double-stranded, linear
agagaagggatcatatgtcagcaaaacataatcatgaacaacaccaggaaaaacagccaacaatgtcccacgataaaatgaatcacatgaatcatgatatggcgcatgaacaaatggctatgtcacaccaacatgaaggaatgaagggaatggatcattcaatgcatatggggaattttaaacaaaaattctggctgtcattgattttagctattccgattattgttctttcaccaatgatgggttttcaattaccttttcaatttacttttccaggttctgattggttggtcttaattttagcaactgtgctatttttttatggtgggcaaccatttttaagtggcgctagaatggaattacagcaaaagagtccagcaatgatgacgttaattgcgatggggatttcggtatcatatttttacagcttatatgcgttttacatgaatcattttacgaatcaggcccacgtgatggactttttctgggaattagccactctgattgttattatgcttttaggccattggattgaaatgaatgctatttctaatgctggtgatgccttgaaaaaaatggctgaactgttgcctgacacagtcaagcgaatgactgaacatggggaagaagaaattcctttgcaagatgtccaagaaggtgatcgcttgattgttcgttcgggagataaaattccgacagatggtaaaattttgaaaggaagcacaacagtcgacgaatcgatggttacaggggaatcaaaaacagtagaaaaaaacattggtgactccgtgattggtggagctgtcaatggcaacggaatgattgaaatttcggtaactggcacgggtgaaaatagttacctgtcaaaagttatggagatggttaaacmagcgcaatcggaaaaatcaaaactagaatccatttcagaccgtgtagccaagtggttattctatattgccttattcgtaggtgtgttagcatttatcggttggttaatggcgacgaaagatttgtcgctagcatttgaacgaatggttacagtttttattattgcctgtccccatgcgttaggcttagcaattcctttagtgattgctagaagtacctccattgctgctaaaaatggcttacttttaaaaaatcggaatgcattagaacaagccaataaggttgaatatgtgttgctggataaaactggaactttaacagaaggacaatttacagttactggcttagaattaatgagtaagcagtttactagagaagaagcacttaaatatattggggcattggaaaaaaatgcaaatcatccgttggcaattgggatcatgaactatttaataaacaagccgttcaaccttatgaagcccataatctgcaagctttatcaggcgtaggactggttgctactgttcaaaaccaagaagtcaaaatagtcaatgaaaaagaagttgcacggttacagttaaccttcgatgaaacaattaaaacaaactatcaagagcaaggaaataccttgagctatttaatcatcgctggtcaattagtcgcactgcttgctttaggagataaagtcaaaccagaagctaaaacatttattgcagagttacaagcgcaaggaattacgccagtcatgttaacaggggataatcaaacagccgccagtgcagttgctaattatttaggaatgaaggaatactacgcagagctcttaccagaagataaagaaaaaattgtgcaacaatatcttactgagggacatcaggtcatgatggtaggagacggtattaatgatgcaccaagtttagcccgtgcttcaatcggcattgcgataggcgctggtacagatgtagcgattgattcggcagatgttgtactgacggatagtgatcctaaagatattttaaggttcttagatttagccaaacaaacacgacgtaaaatgatccaaaatctttggtggggagctgggtacaatattgtcgccattcctttagcggctggggttcttgcaccaattgggattgttttaaatccagctgtaggtgctgtcttgatgtcattaagtacaattattgtagcagcaaatgctatgacactgcatatttcaaaaaaataattcgatataattgtagagagcggaaagtaatcaatactttttgttctctatttttttcttcttaaaaaaatttttgccttatttgacgtattcttatwacaagggagtgaaaggggacgatatatggatttcaaggaattattggtctttkgamcataaaaatatgttggaattgttgggatttactgccaacaagagcagacattttctgttttggatggctgccagaaaactaaaggtgagcgacaaaacctccattgttacattcaacgttttgaaaaaaagcaggaaacgtttaagatagaagggctttgtaagatttatacaacgaccaaaggaattgtaaaatatcgtgaattatgcgtttgtggcttggctcgatttagacaaaaattttgttattttattcccgaattttatattttacgttgtctaattgaagagcgaatcaattatgcacaattgacccaggtattggaattacaggaatcaactcttcggaagaaattttctaatattcgacgttggctagttaattttgatattattgtacgtcaaaaacattacgatttaactggtaatgaatggcaaattcgacagttaatcctttgtttttatttgtttttccaagaaagctgtctggaagaaaacagagaaatgactcggaaaatcattaccttttttgagttggatttaaatgtagcacaacagaatcatcttagttggctaatttatatttgggagaaacgatatagaggcgggcatgaaatttcagtgccaaatgctaatttatttcaacaaacaagtgcttttttttatttatttcgtgtggaagtgttgagcacttcttttatgtctcttaaagaacaaaaagcgttatttgtgattcttgaagcacattttggtggttgttttggcaagagagcgcgaaagtattttattcatgagcaaatgaaaatagaaagtttatgcttaaaaacagctatttttattatgaaagaaattaggagaaattttacacaacatcattttaattatcaagaaattcatttatgtcgatttttaagtacgcatatgaatagtttattagacggacaagcatggttgccagctcataaacaggaacaaacactcgctgctcgttatcaacaaacctggcacagattacaaaaacttattaggcttttaaaacgcctatatccagtctttacttcagtaaaagaacgggaattgacgagttgctatttttatcacatcctagatttatttaacccgattttatatgaaaaaaaatatattatttgcctattgacggactttcctccagaaaaggaacaagcgttggggcaatctataaaaagctatttcagtgaaaaaaagaatattacaattattcatggaaaaccaacgtatcaacttcaccaagtacacctcttaattgtcaatcatttgtttcagatgaacgtagcgctttcttctaagacagtggtttatttgccagaggaattatctcctgctttttttgaaaaagtcgaagcgaatctatcgtaagaagtccaattttgtctaaatagtgttaaaatgaagaagtaagaggaatggatgaggaggatattaaaatgaaacaactgcaatttggtacaagtgacgaaacagtttcttcggttatcttaggatgtatgcgcttaaatggtgctgaaaatcctcaacaggtaattgaaactgcttatgatcatggcattacattttttgatcacgccgacatttatggtggcggcgactgcgaaaccatttttggtaaggccttaaaagaaagtaccattcgtcgtgaagatatttttatacaaacgaaatgtgggattcgtcagggcttttttgacttttcaaaagcacatattttagaagcggtcgaagggagtttacagcgtttaggtgtagattcagtcgatgcattattgttgcatcgtccagatactttagtggaaccagaagaagtagctgaagcttttcatttattagaaaaacaagggaaagttcgctattttggtgtaagtaaccaaacgccaggacaaattgaacttttaaaaacagctgttaaacaaccgttattagccaatcaattacaatttggcatcaagcatactggtatggtagatcaaggcttacaaacaaatatggaaatatcaggaagcattgattatgatcatggtattttagattattcacggttgaaacaaatgactattcaagcatggtcaccgtaccaatatggttattttgaaggtgtctttattggaaatgaaaaattccctgagttaaatcaaaaattaagcgaattggctgaaaaatatcaaacaacgccaactggtttagccagcagctggattctgcgccaccctgctaatatgcaagtcatcgcaggaagtatgaatcttggtagaattgaagaaattgctaaagcagcagacattgtgattagtcgcgaagattggtacgatatttatcgtgcagcgggaaatgttttgccgtaaaaagattctcatacttgtgaagatccagcgtgtattgctgattgattttggtatttgatatagttgtcactaaggaactatgtcaaatacctttttctttcattctgcaatcgccgtctactgcaaattctgtagttttttgttaaaatagaaaggaaactagtttgctaaagatgaggggaaaaaaatgaccaaaaaaaaattattactcgttgatggaaacagtgtagcctttcgtgcattttttgcgctacataactcattagaacgattcaaaaataagaacggcttgcatacaaatgctatttatgcatttaacaatatgtttgaaaatgtaatgcaaaaagaaatgcctactcatgttttagtcgcttttgatgncagggaaanccacattcagaacagrattttattcagaatataaagccggacgttcaaaaacaccgggggaatttaaagaacaaatgccgtatattcgtgaacttttagaaggtttaggcgtaaaatattatgaactacctaactatgaagcagatgatattattggtacattagnccaacaaagttgataaagatgaatttgatgttgtcgtgttatcaggggaccgagatttgacgcaattagcgacggacactgtcaaagtagatatcactgttaaaggagttagcgatattgaatcatatacgcctgagcatattgctgaaaaatatgatgggttaacgcctaagcaaattattgatatgaaagggttggctggcgacacgtcggataacattccaggtgtaacgaaaatcggtgagaaaaccgcgattaagctgttaaaacaatatggctcagttgaaggggtttatgagaatatcgatgaaatgaaaaaaagcaaaatgaaagaaaacttgattaatgataaagagcaagcctttctttctaaacgtttagcgacaattgaagtcaatgcaccagtcgaagtcaatgtggaagacttggcatatgaagggaaaaacttagaaaaattggttcctttttataaagaaatggactttaaacaatttttagctaagttggacattacagaagaacctgttgaaatggaagatattttatttgaagtagtcgaagatcagttaaccaatgaaatgtttacagacgatatggctctttatgttgagatgatggaagataactatcatacgtcaccgattgtcggccttgcttggggcaacaacaagaagatttataccacgaataatttagctgtttttgaaagtcagccatttattgactggttgatggatgagacacgtaaaaaaaatgtctacgatgcaaaacggacgtacgttgcactaaatcgctatgtaggaaaaatgacagggattgcctttgatgttttattggctgcttatttacttgataccaatgacaataacgctgatattgaaggtgtagcacaacattacggatatgatgcgattcaatctgatgaagccatttatggaaaaggggccaaaaaaggcttgccagaggacgaagaagttttctttggtcatttagcacgtaagattaaagcaattcaatttttaacaagcaaattagatagcgaattaacagaaaaaaatcaagctgatttattctataaaatggaattaccactttctcgtattttaggcgatatggaaataactggtatccgtgttgatgccacacgcttaaaagaaatgcaagtagaattttcagaacgcttgaaagaaatcgaagaaaaaatctatgcagaagctggcgaagaatttaatttgaattcacctaaacaattaggcgttattttatttgaaaaaatgggcttacctgtgatcaaaaagacgaaaactggctattcaacagcggtagatgttttagaacaactaaaagaacaagcaccaattgtggccgatattttaacttatcgtcaaattgccaaaattcaatcgacctatgttgaaggacttttaaaagtaattcagccagataataaaattcatactcggtatgtacaaacactgacacaaacaggacgattaagctcagtagatcccaatttacaaaacattcctatccgtttagaagaaggccgaaaaattagagaagcgttcgtaccaagagaggataattggttgattttctcttctgattactctcaaattgagttacgtgtgctcgcacatatttctaatgatgagcatttaaaagaagcatttgtggaaggacaagatatccatgccagcactgcaatgcgagttttcggtgttgaaaaagcagaagatgtcacacctaacatgcgtcgtcaagctaaagcggtgaattttggaattgtctatggtatcagtgattatggcttgtctcaaaacttaggcattactagaaagcaagcgcaacaatatattgacacctattttgaaaaatatccaggcgtgaaacagtacatggaagagattgtccgcgatgccaaagacaaaggctatgtggaaacattgtatcatcgccgtcgttatttaagtgatattaattcaagaaactttaatctacgttcgttcgctgaacgtacagcgattaatacaccgattcagggaagtgccgcagatattttaaaaattgcgatgattgaaatggcgcgtcgtttaaaagaagaaaaattacaagcgacaatgttattacaagtgcacgatgaattagtttttgaagtaccagaatcagaattagaacaattaaatcaactcgtcaaagaagtgatggagcacgcagtttccttacatgtgccacttatcaccgatagcagttggggaaaaacatggtatgaagcaaaataatagcttacccattaagaacgatgaataaaataaggataagtaggatctggacgttgatatctaagcgttcagacctctttatataaaggagcaaaaataatgccagaattaccagaagtagaaacagtgcgaaaaggacttgaaaaacttgttgtaggaaaaaccattcaagaagtcattgttttttggccaagaattattgaatcaccagaagttgatgtatttcaaggtcaattagctggtcaaacgattgaagggattgagcgaagaggaaaatttctgatttttaaattgtctgataatgatatgatttctcacttacggatggaaggaaaatatgagtttcatcaggctgatgatgaaattgccaaacatacccatgtaatgtttacttttacagatggcacgcaattacgttatttagatgtacggaaatttgggcgtatgacattggttcctaagaatcaaggtcatcaatataaagggattttagctttgggcccagagccaacaccagacgttttccaattagctacttttcaaca

SEQ ID NO: 122 - DNA, 9813 bp; double-stranded, linear
gtttggataatcggcgttactttagcaatcagtgcttttcttttagctagctgtgggcaaaccacacaatcgccaaaagagaagaaagagctcacggtaatgactactttttatccgatgtacgacttcacaaaacaagtcgttggtgatgagggagaggttgagctgttgattccagctggaacggaaccacacgattatgaaccaagcgcaaaagacttagcgaaaattactgatgcggatgtctttgtttataatagtaaagagctagaaacttgggttccgaatgttattgaaaacttggacacgaaaaaagtttcaatcgtggaagccagtcaatccattcaattgatgcaaggaacagaagaggaagaatctggcgaagaaggtcatgaaggccataaccattcccacgaactggatccgcatgtctggttagatcccgtgttagcgcaaaaagaagtaacagcgattcgggatgcgcttatcaaaaaatatcctgagaaaaaagccgtatttgaaaaaaataccgttgcttatttggaaaaattgactgcgttagataaggaataccaagctgcgtttgcaggcgctaaaaatcggacctttgtgacgcaacatgctgcatttggctatttggcgaaacaatatggcttgacccaagaaccgattgctgggatttctccagaccaagaaccttcgccaagtcgtttagccgaattaaaaaaatatattaaaacaaacaatgtttctgtgatctattttgaagcatcggcttctacaaaagtagccaaaacattggcagacgagacaggcgtcgaattagccgtattgaatcctttagagagtttaactcaaaaagaacaagaagcaggcgagaactacgtgtctgtcatgaaagaaaacctcgctgctttacaaaaaagcattcattaatctggcaacagaaaggagccaacttatgcattatattgaagtcgaaaatttaaccttctattatgatgatgaacctgttttagaagatgtttcttattatgttgatccaggggaattcgttattttaacaggagaaaatggcgctgccaagtcaacgctgatcaaaagtaccttagggttattaaaaccaacaagtggcaaaattacggtcgctaaaaaaaatagtgctggtgaaaaaatcagtattggctacattccacaacaagtcgcttctttcaatgcgggctttcctagcaccgtcattgaattagtacgttcaggtcgctttcccagaaatcgttggttcaaaccgttgacgaaaaaagatcatcttcatgtggaaaaagctttgaaatcagtggacatgtgggaaatgcgccacaaacgaattggcgagctttctggagggcaaaagcaacgaattagtttagcacgagtgtttgcgaccgatccagatttatttattttagatgagccaacaacaggtatggatgaacaatcgcgaaacgaattttatcaattgttgcaacacagtgcgcatgaacatggaaaagctattttgatgattacgcatgatcatgaagatatcaaaacctatgtggatcgtcaaattcgtcttgtccgcaaagaagattcgaaatggcgttgtttccatatgagtgaagaatcgtatacgtaaattttccaataaaacgttatctggctcgatcataacgaaagcctaggaacggcttaaagaaatgtgggaaaaatttaaaaaataagcaggaattaaaaaaataattcgcttaaacgtcgctacaatggtagtgttcattttagcggtaaggagtgaatcgtatggcagaaatgctttcttatgcatttatgcaaaaggcctttttagcagcactgtttatctcagtgattgccccaatgctcggcgtctttctagttattcgccgacaatctttaatggcagataccctttcacatgtgtcattagccggtgtggcactaggcttcttttttaattggaatcctaatttaatgaccttaattgtcgtgattgtggctgcaatcattctagaatatttacgaatgatttatagcacctattcagaaatttcgattgctattttaatgtcaggcggtttggctttggcgttagttttgatgaatttaacaggaggcaattcagctgctagtattcaatcgtatttatttggttccatcgtcacgattacgtgggatcaagtggttatgttggcaattttattcgtagttttagttctattgtttatgttatttaaacgtccaatgtatgttttaacatttgatgaagatactgctcatgttgatgggctacctattcattggatgtcgatgctttttaatgtaattactggtgtggcgattgctgtgatgattccgatcgcgggagccttgttaatttcagcaattatggtcttaccagctgcaataggtatgcgaattggtaaaggctttaacacggtgattattatcagtgtgtttatgggcttgattggcatgctaacagggttgactagctcgtattatttggaaacaccaccgagtgcaagtattaccctaatttttattggtttattcttattagtcaatatttatcgccgagtggttgtcatggtccaacgaaaacaaaaaatgcaaagaaactaaggagaaaaacgaaagtttttctcctttatttcttttttttaaaagaaatggcgaactattttcagttatttgaaaaaaatcctcgaatttttcggttaaaccccttataataaggaacgatagaatgaaaaggagtgacgaatttgaaaattcggagaagtgaacgattaatcgatatgacccaatatcttttagatcatccccatacattggtttctttgacatattttgctgaccgataccaatctgccaagtcttccattagtgaagatttagcaattgttaaaaaaacatttaaagaacgtggaacaggtattttagaaacgattccaggcgctgcaggcggtgtccgctttatccctgaaattccttatgaggaagcggacagttgattatggatttatgtgatcgtttgtcagaacaagatcgcttattacctgggggctatgtttatctttcagatttacttggggaaccgaatttattaagacaagtgggccggattattgcttctaaatatttaggcaaacaaattgatgcggtaatgaccgttgcgactaaaggagtgccaattgcgcaagctgtgtcttattacttaaatgttccgtttgtgattgttcgtcgcgattctaagattactgaaggttcaacggtgagcgtgaactatgtatcagggtcttcagaacgtatcgaaaaaatggaactttcaaaacgcagcttaaaacgcggctcaaaagttttagtcgtggatgacttcatgaaaggcggcggcaccgtcaatggtatgaagagtatgattgaagaatttgaagcagaacttgtgggcattaccgtttttgctgagtcaaaattcaatggccgtcgtgcaatcgatgactatacttcgctattgtacgtggaagatgtggatacacaaacaaaaacgattagcgtagtcccaggaaactatttcacagagaaataatttgaaaaagaacctgaaaatggtccattccattttcaggttctttttttctgttttattcctttaaaaaaagatgagaaaataaattggtctaccttttaaatgccttattttgttgaaaaagacaaaagagtaagataaactagaaaaggtataatgaggacgatttagaagaaaatcaaacaatttagttaatttgaggtggcaaacgtggaaaatagatacgcaattattttagcagctggtaaaggaacacgcatgaaatctaaactttataaagtattgcatccagttgctggtaaaccaatggtcgaacatattttagatcaagtagaacaaacagaaccaacagaaatcgtgacaatcgttggacatggggcggaaatgattaaaagccatttaggcgaacgtagtcaatatgccttacaagctgaacaattgggaactgggcatgcagtcatgcaagcacaagagttattaggtggtaaacaaggaacaacattagttattacaggggatacgccgttattaactgcggaaaccttgaaaaatttattcgattaccatcaaggtaagaatgcaagtgcgactattttaacagcgcatgcggaagacccaacaggctatggtcgaattattcgtgatcatgtgggcattgttgaacgaatcgtggaacaaaaagatgccagtgaagaagaagcacgtgttcaagaaattaatacaggaaccttctgttttgataatgaatcattgtttgaagcgttagcgnaaacagatacaaacaatacacaaggggaatactatttaacagatatcattgaaattttgaaaaaagaaggcaaagctgtcgctgcttaccaaatggcagactttgacgaagcaatgggtgtaaatgatcgtgttgctttatccactgctaataaaattatgcatcgtcgtttaaatgaaatgcatatgcgaaatggtgttacatttattgatccagacacaacgtatattgatgaaggcgtggtaattggttcagacacagtcattgaagcgggagtcactatcaaaggaaaaacagtgattggcgaagattgcttgattggcgcacattcagaaatcgttgatagtcacatcggcaatcaagtggttgttaaacagtctgtgattgaagaaagtgtggttcacgagggggccgatgtgggtccgtatgcacatttacgtcctaaagcagatgtgggggcaaacgtacacattggtaacttcgtggaagtaaaaaatgcaacaatcgatgaaggcacaaaagtgggccatttaacatacgttggtgatgcaacattaggcaaagatattaatgtcggttgcggcgttgtttttgttaattatgatggcaaaaataaacaccaaacaatcgtgggtgatcacgcttttattggctctgcaacgaacattgttgcgccagtcacgattggtgatcatgcggtgactgctgctggttcaaccatcacagaagatgtcccttcagaagatttggcgattgcccgggcacgtcaagtgaataaagaaggctatgctaaaaagttaccttatatgaaggattaatctcaaataaaaaagaacgctcttttgcttaagcaaaagagcgttctttttcctccttaaagactagaccaattgctgctagtatttgtttagagacgttcaaggactagaccaatgctgtttattcggtatttttagttatttttttcaaaaaaatagtttttgttccgcttttccaatataaaaagactttctttttatgtaaagttcgttttttggtcaaaattactatttttttcacaaacaaatccgctatattgtccaaaaataaaaacaatttacaggaaaaacatcttattttaacggaatttactgttttttatttaacggatatattatgataggaaaagaagagcagcgtgatgggggaaggctctttttgttgtttgttactttgacaattgtttgttgcaaatgggttgaaacacaaggaggaaatttgtgaaaaagttgagctttaaaaaagtgaagtggggcatgcattttttaatggctgttgcgttgatagcgccaagtgttactagtacggcatatgcagtagaaacaacgagtcaacaaagttcagaagcagtaacaagtaccaccgattcaagtagaaaacaagaaccagtcattacacaggaaacaacagacatcaaacaagaagcaccaaatcaggctacgagtgacagtgtcaagcagtcacaagaaaccacagcaccaacagagacgacgaatttagaaacgtcaatcgctgaaaaagaagaaacgagcacgccgcaaaaaataacaattttaggtacgtcagatgttcatggtcaattatggaattggtcttatgaagatgataaagaactaccagttggtttgtcccaagtaagtacagtcgttaaccaagtccgggcacaaaacccagcaggcaccgttttaattgataatggcgacaatattcaaggcactattttaacagatgacttgtataataaagcgcctttagtgaatgaaaagacccatccaatgatcaccgccatgaatgtgatgaagtatgatgcaatggttttgggaaatcatgagtttaattttggtttaccgttaatcaaaaaaattcaacaagaagccacttttccaatcttgtctgcgaatacctacaataaggaagatggtcttcgttttgttgaagggactaccacgaaggaacttgattttaatcaagatgggcagccagatttaaaagttgggattatcggcttaacaattccgcacattcctttgtgggatggccctcgtgttacttcgcttaattttttacctttgaaagaagaagcagaaaaagcagttactgagttgaaagctaacgatcaggctgacattattgttgcctcgattcatgcgggacaacaaaatagtgatccggctgccagtgccgaccaagtaattgaaaatgtcgcggggattgatgcgtatattctgggtcatgaccacctttcttttaccaagcaaggagcagcgccgaatggaaaaactgtaccggtagggggaccgaaagatacggggacagaagttgtcaaaattgatctttcagttgctaaaaatgccgataagtgggaagtgcaagaaggtacagcaacgattgtaccaacaacgaatgttccagcagatgaagcagttaaggcagcgacaaaagaataccatgaaaaaacgcgagcgtttattcaggaggagatcggcacagcaacagctgattttttaccaaaacaagaaattaaaggaattcccgaagcacaattacaaccaacagcgatgatttctttaattaataacgttcaaaaagaagtaacgggcgcacaattaagtgcggcagcgctgtttaaatacgacagtaaattacctgcggggaagatttcctatgccacgatttttgatatctacaaatacccgaataccttagtgagtgttcccattaacggtgaaaacttactgaagtatttagaaaaacaaggggcgtactataaccaaacacagccagatgatttgaccattagttttaatccaaacattcgtgtatataactatgacatgatttctggagtggactacaagattgacatttcaaaaccagtgggtgaacgaattgtagatgcgaaaattgacggccaaccgctggatcctgccaaagaatatacgattgctatgaataattatcgttacggcggtttagctagccaagggattcaagtaggggaacctattaaaaattctgatccagaaaccttacgaggaatgattgttgattatattaagaaaaaaggaactcttgatccagaacaagaaatcgaacgaaattggtcaattattgggacaaattttgatgaaaaatggcgtgccaaagcaatcgaattagtgaatgacggcactcttcaaattccgacttctcctgatggacgtacaccaaacgccgccgctattacgaaacaagatgtccgtaatgcgggctttgatttagataatgcatataccattatgcacacaaatgacgttcatggccgactagaagcagggaaaggcgaattaggtatggcgcgtctaaaaacctttaaagaccaagaaaacccaaccttgatggtggatgcaggggatgttttccaaggattaccaatctccaatttctccaaaggcgcggatatggccaaagcaatgaatgaagttggttatgatgccatggcggtgggaaatcacgagtttgattttggtttagagattgcactaggttataaagaccaactgaattttccgattttatctagtaatacgtattacaaagatggcagtggacgggtttttgatccgtatacaatcgtagaaaaatccgggaaaaagtttgccattgtaggtgtgacgaccccagaaacagcaacgaaaacacacccgaaaaacgtagagaaggtgacatttaaagacccgattccagaagtagaagcagtgattaaggaaattaaagagaagtacgcggatatkcaagctttcgtggttactgggcatttaggcgtagatgaaacgacgccgcatatctggcgtggtgatacgctagcagaaacccttagtcaaacatatcctgagttagatatcactgtgattgatggacattcgcatacagccgtcgaaagtggcaaacgttatggcaaagtgatctatgctcaaacaggtaattatttaaataatgttgggatcgtcacagcaccagagagtgaaccaactaagaaaacaacaaaattgatttcagcagcagagctgctagaattgccagaaaacccggcagttaaagccatcgttgatgaagcacgtacgaattttaacgctgaaaatgaaaaagtaattgtcgattatattccattcacattggatggacaacgagaaaatgtgcgcacacgagagaccaacttagggaatttgattggtgatgcgattatgtcatatggccaagacgcgtttagccaacctgctgattttgcagtaactaatggtggcggcattcgcgctgatattaaacaagggccaattaaagttggggatgtcattgctgtgttaccttttggcaatagcattgcgcaaattcaagtaaccggcgcccaagttaaagaaatgtttgaaatgtctgttcgttcgattccacaaaaagatgagaatggcacaattttactagatgatgctggccaaccaaaacttggcgcaaatggtggtttcctacatgtttcaagctccattcgtatccactatgattccacaaaaccaggtactcgcttggctagtgacgaaggcaatgaaacaggacaaacgattgtcggtagtcgcgtattaggaatagaaattaaaaatcggcaaacacaaaagtttgaaccattggatgagaagaaacaataccggatggctaccaatgatttcttagctgctggtggtgatggttacgatatgctaggtggtgaacgagaagaagggatttcactagattctgtcttaattgaatacttgaaaagtgcaaccagcttgcggttgtatcgtgcagcaacgacgattgatttagcacaatataaagaaccattcccaggcgaacgaattgtttctatttcggaagaagcttacaaagagttaatcggtggaggagagacgccaaaaccagatccaaaaccagacccgaaaccaacaccagaaacaccagtagcaaccaataaacaaaaccaagcgggagcaagacagagcaatccatccgtaacagagaagaaaaagtatggcggctttttacctaaaacgggtacagaaacagaaacgcttgcattatatggtttactgttcgttggactttcttcttctggctggtatatttataaacgacgtaacaaagctagttagtcattttttaagaaccgtccttcgggattggttctttttttattttaatgcttgccatttgtttttaattttagtattataagaatattctaaaaattaaaaaatgaagagttttttctgtgaagggagaagggctgaaagtaaacgtataaaggacttatcgggttaagtttacaacgctgttagtttagctgcctgtggtggtgatgggggacctggcgccg

SEQ ID NO: 123 - DNA, 32768 bp; double-stranded, linear
cattgggaaaagtggaaagccttaaacctcgcaatcgcccaaggtttaccagctgaactcggcatcactaagccgaaaattgaaagctggaccaacggctggaatttacgcagtcatttctgggctgcgtatcgcagtgagcaacgtcaagcggaaaatgcttgtttggcgttgttattaaataaaaagcaatttcaagtgtatttgatgtttcaacattacaaaagtgaggagcggacaggctcagtcgtcgcttacaatcaattgcttaatcgtttagaagcttggagtcaaaccatcgactgcgaaggctattatatttggccgcaggaggagcatgaactagtggaccatttgcctttaaaagattatttagcagatgaaaaacaacggaaaattctagaagagcggataggcaatcgctcatttcagatcggtaagttgtggtttgcgacggaaaagcttgaaacgattgaagaaaaaagttgtcaggcgcttcaagaattagcgccgttgtataacgcattatctgaaaaatgaacgaaacaacgtctctgaccaattacctggtcagagacgttgtttgtgtttttattgatttaaatctgttagtagtagctcgttagaaacagcaaaagtagtaacttctgttaaagctggatccaaagtgtattttgtaaatgaggtagtactttctggttggacatacatggttaaattagttacatcatatcctgaccaataatgtgtgaaatcagacagagaattactttgacctaaatggccaattccccgaggaatcatcactgtttggaaggcgcgatagagttgcataatcccttcagagctatcaaattcttggagattgtcagaatagtataacgcacgaatgaagcgtgacggcgaagtgaagtctcctgggattcctaatagtccgtaagaagtcccaccttcaattgggtcaagtgttgcgcctgattttaaagtgtaaggttccttaatagcatagttgcgcatcccgatatagtttcgtgcattggttaaatgataattgtattctggactgtttgtgactacgccaatcgaatcataaatgacgaacgctccgttatctgttggttgcaaaacgatactattattatttttatcattaatggtccagtgtaaggtaaaatgaacttcccccaatgaatcaagttggaatttttgatctaacaggccgattttttcaaaagctacttttacttcgtcaacgctttcaaaattactcaaaatataagcaagtacttcttctgcaatatgaggtgttaaaccacgatctgctaaactttcagcaggtgctgttgaagattccattaaatattgaatatcaccagataagccggcttcattgataccatctgtgatagcaaggctgacggttttaccatcgttcgctggttgatctgtgcctgacattgctagtcccataaaggcatattttgccgtccaaggatttagttggctgtttagaactgtaccttttggaaattgagcaattagagtagggatttttggtgcaattggatcttcgttgccaaaaaagtcaaacgtaaaatccatcgtacgtccataaaaaatatcatttgttttggaaataatcttgatgcctgtacacataatagtttccccaaattaatgtaagtttgtgaagcctgtttactagttaagcatatcatactctaggaaacagcggtggctaaattcctaaaatattagacaattttgtctaaatgaggtgaaaaaaattttttagcgatttccttcacaaaacaccttattatctttccgaaaatatgatatctttagaatggaaatttcatgaaaagaggatgcgaatgtttaaaaagtacacacaaatgataagggatgaatttaaagggtataatcaaaaaaaaatgaaaaaagatttcttggcagtttgactktcgcagccgtcgcgttgccattagcgttagcgtttggggtctctagcggtgctactgcagcagctggcatgatcacggcgattatcgctggaattgtgattgggagcctttcgggtgggttttatcaaatttcaggaccaacaggtgcgatggcagctattttaatgtcaattgcggcagtgcatggcatgcaagggattttgttggccacctttttggcggggattttcttgcttttggcagggattttgcgcttagggagcttgacttcttttattccgtcaccggtcattaccgggtttacttcaggaattgctattattattgcgttggggcagcttgataatttctttggggttcgttcagaaggacacaatttaattgagaaaatcagcagttatcgttcattgggctttgatttaagtataccaacgacggttatgtcgattttagtggtgcttggattagtgttctttccgaaaaagtggaatgcgatgataccagcttcattggtgatgattattttagctactttagcaacagtggtttttcaactgccagtggccactgtagggaaaattccgacaagtatttttagtgatacacgtttggaacttggttcacttcaattaagtgcgtttcaggatattttggtgccttcgattagcattgctatgttaggtatgattgaaagtttgctttgtggcgcttcggctggtcgcatgacagggaaaccattagacagtaatcaggaactagtggcacaaggaattggcaacttaattttgccatttttcggtggcgtgcctgcgacggcagcgattgcccggacgagcgtagtgattaaatctggtgcgcaaacacgtttagcgggtatttttcatgcagtctttttattgttatcgatgttgcttttatcgccagtcatgtctaaaattcccatgcctgcgttactggtgttttagtggtgacagcgtggcgaatgaatgaatggtcggtgattaaagaattcttccagaaacgtttccacacagctttatgtttattcttcttaacgatggtagcgaccgttatttttgacttgagtttagcgattgttttaggggtcttagcgggttgcctgttttycattgcgaaaagtgccgtgattacgattaatgtcgaggaagttgattggtcaagaatggggctagtaccgaccgattgtacggaaaattgggtggtagtttatttgagtggcccgttatttttcatgtcttctgaacgattgaaacaaacgttactgcaattggaaacaaaaagtggtgtagtattttcaatgcgaggagttcctagcattgatagtacggcgttagatattttagaagaattttgtctcgcagcagaaggtcgtggacaacaagttcaatttgccgctctgcaaccagaagttgaaaaaatgattcgaaccattcaaggaaatcaagagaaagaataccatttctcagtcgcagaatttttacaaacggtgcatgttgcagaacaataattcattttcaaatgaaatgttctatcttctatcgcgggcttaatgggtgaagaaataagaaaaataagtggggactaaaatgagtttctagaggagttcctaaaaaataataaagagaaaacttctcagtatgaagttttctctttattatttttttggttatttattgaattacttctagcataacgtctttttgatcatccgtaacattgccagcgtagttaggagtgattaaagatatcgaaccatttttattgttgaataagtataaagtgcccgatctattttgttcatcgtttgaagaaatattagttcctaaaattaattctgtatttactttaacggtgcgaatactgttatcggccgctgaaaatattctaatctcttttgtaggaattgtatttatagatagctcatatttattaatggcttctttcacttgaccattttcagccccaaacaatttagttcggaaggtagcagttggtgttgaatttaagttctctaacgtaattgaagttggcacattcattcctttaaaattaaatacgagtggattgtttaagctactaagatcgacagcataaggtgttgcttctaaagaatttgcttcttcgacatttgtagatacttcatttttcgactttgacgaagtttgagtggtgctggcactttctgaagtttcttttagtttattattagagcttgtttctatgctagaactgtaatgattagtactgctttttattgatgttgtatgattggtagaattttcttgttttttaggttcattcgctttttgagaactacaacctgttaaaaaaataactaaaataacacaaactaattttttcatactattcctcctatagacgctataactaattttatcttacttgttaatataacaaaagaaataattattttattttcacgaatgctcaaattgtttaaatctgtagtttttatacttatttttgttgcatttgcaacaaaaataagttaaagtaatgacaatcataaaatattagcgaaaggaagtgtcctagtgacagatattttaagagaaattggcatgattgcgcgggccttagattcaatcagtaatattgaatttaaggaattatctttaacacgaggacaatatctttatttggtcagggtctgtgaaaatcctgggattatccaagaaaagatcgccgaactgattaaagttgatcgaaccacagcggcgcgggcgattaagcgtttggaagaacaaggctttatttatcgtcaagaagatgcaagtaacaaaaaaattaagcggatttatgccacagaaaaagggaaaaacgtttatccaatcattgtgcgcgaaaatcaacactcgaatcaagttgctttgcaaggcttgtcagaagtggaaatttcacaattggcagattacttagtccggatgcgtaaaaatgtcagcgaagattgggaatttgtcaaaaaagggaacactcgaaattattaaggaaaggacgactgattgatgggagaaataaaacaattaacaatagaagatgcaccagcgttacaagaaatcagcattgaaacttatacagatactttcggaccatataataccccagaaaatatgcaagcctatttagtagaagcctacaatttagaaaaattacaaaaggaattggctaatccccactctgacttttattttatctttgtcgataatcaattagctggctacatgaaattaaatcgtgagacggcacaaacggaaccgatggggccagaaaagctcgaggttgagcgattgtatattttgcctgcgtttaaaggaaagaagctggggacacaattattagaactggcggaagagaaagctcgtgaatttggtaaaaaagcactgtggctaggtgtctgggaacacaatgatgcggcgcgggcattttataaaacgattggctaccgttattatagtcaacattcgttttttatgggagacgatgaacagacggattttattttgttaaaggaattgtagccaagaaaatttagaaacaaagatttctgataaaatcagaaatctttgtttatttttttgactaaaattaagcatttttttattttcaaaatgttatttttaaaaacgtaaaaattgaaaaagaagattttgaatctgtgaaaagttgtcgatcttgtgagaaaactcttttgtcagtgtcttttttcaggatgggtctcttcctgaaaatccacttcagtttatctgttttgtgtgtgtttgattaaaaaatgttgtgttgcatttcatttaactgtataatttatttatgtcatttttaataataagcgtattttagcatttgamaagagaatttgtacataatatgtgaataaaaagatttgtttcttactttctagagtgagaggacgatataaaaaaggttgctattttttcgttcaaagtgaacaaataatcgtttgttatttagttggggtaactaatgattattgttataaaaagcgcttacaattcgtgtgatgagagtagtacgcatgtttgtgcaaaagtgacaaaaaagagaaggcagggtgttttaatagaaaaaattttttaataaaaaggagagtttgtcgtggagaaaaatgtgtctcaagtaacagctcaagaagaaacagcgctgaaagcacgtggctacaatgaggatttgttgccaagtagcccgaaacaacggacgatgggcgcgcgcaatttttttacattatggatgggttcgattcataatatcccgaattatgcagcagtgggcggctttattttcttaggtttatcgccgctgcaagttatgctggcagttgtgttaagctcattcattgtagcaactttcatgaatttgaatggcgtggctggctctaaatatggcattccttttgcgatgcacttacagtctacttacggcagtctcggggcaaaactgccagggttcttaagaggttgtgtggccgcgattgcttggtttggtctgcaaacatttacaggatcgctggctttattaattattctcgggaaattttggccgaactttttagaaattggtggatcattccagttttttggtctcaggctacctgaattaatggcgtttactcttttctggctcttaaatgtggcaataggtttcggtggtagcaaaattttgaaccggtttaccgccattttaagtccgttgatttatgtcgttattattggattaacgatttgggccattcgagctgggggcggtttaacaccaattttgtcctatcaagtttctggtgcgattcgttcagtcaatccactggtggcgtatctgattatttttaactcggttgtggccgtttggtcagcgcctggtgcgagtgtggcggattttactaagaatgcgcgctcgacacgtgctcaggttgtggggcaaacaacaggtttagttgttggttatgggattttcgctttttccagtgtggttattctgttaggtggttcgctgtattttgggattcaagaatggaatattttaaacattattgatcgtttagataatgtggcagtggtggtcttagccatgtcggttttcttattaacgactatttcaacgaatgcaacggggaacatcattccggcaggttatcaattggcggcgctatttcctaaaaaaatgacgtataaaaaaggcgtcatgattgccagtgttatcagctttctcattatgccttggaaactgatggaaaacgccgatagtatttttatttttctgaacgcaattggggctgttttaggaccagtcgctggtgtgatgattgcgaattattattttgttcaaaagcaacaaattgatttaaatgctttatacgtagataaacacaaaaaagaggaagccaatcctttttacggattaaacaagccggcgtatgttgctactattctggcgttggttctttccttaagtggtcaatttattccacaggttaaaatcattgctgatatttcgtggtttgtgggctttgccacaggttttgtgctgtacttagtgttaaaaaaatggacttgggattcaaaaaaagtgaaagaaacagcttatcaggagggaaaataaatgcaagcagagttagtgattaaaaacgggttagttattttagaaactggagaagtcattacggatgtcgccgttcaaggaggaaaaatcgtagcgattgggcaagacttgtcaggagaacgtgtgattgatgcgacgggtttagtcgttagtcctgggatggtggatgctcatgttcatattaccgatcctggtggtggttaccgcgatgaatgggaagggtatgtcacaggaacggccgcttgtgccaaagggggcgtgacgacctttatggaaatgcctttaaatcagattccagcaactgtggataagacctctcttgagatcaaatacaaggcaggagaaaataaactaaaagtagatgtagggtcatttgggggcgtggtcccgaccaacttggctgatgggattcaggaacttgatgaaggaggcgtttctggctataaatgctttttgggaacgtgcggcgatcgttcaattgaaggagattttcaaaatgtcgacgattattcattatatgaaggaatgaaacaagtcgccaaaactggcaaagtgctagcaatccatgcagaaaatgcgccaattacggataaattaggcgcggtagcttatcaaaatggcgaaacgactttagcggcatatgtagctacacgtcctgtgtttaccgaagttgaagcgattcaaaaagccattttatttgccaaagaaacaggttgtcggattcatatttgccatgtggcttgtcaagaaggcgtggaagaagttttgaaagcccaagcagaaggggtagatgtgacttgtgaaacatgtacgcattatttatattttaccacggatgaacttgatgccattggtccagttgtcaaatgttcaccgccgattcgtgacgcggaccaacaagccgccttatggaaccacgtgcaaacaggcggcatcgcgtttgtaacctctgaccattctccttgtacgccagacttaaaagatacaaccaatgcttttgaagcttggggcggcatttctggtgttcaaaataacgtcgatgtgttattcgatgaagccgtccaaaaacgtggtttatccttgaaacaattcgcggatatgattgcagcaaacccagctgaccgttatcacttagcacaaaagggccgcatcagcattggtaaggatgccgattttgtactaattaaacctaatgcgccgtatatcttaaaagcagaagatttagaataccgaaataaaattagtccttacattggtcgtgaaattggggcccaagtgattcaaacaattttaagaggcgaaacaatttacgcacaagaaactggggtaaccgaggcgtttaacggcgtatttatcaaaaattaaacacctattttagaaatgaaaaaggacagaagcgtgattgaattagcgcctctgtccacgagttagaggatgtttgttggttgttttgcacaaaaaaaggcttaattttgtttgataagtacaatgaagatggctagggaaacgtttacaatcagagtgtaatcagtcaggaggttttgtgatggacttggaaaaagttttaaaacaaagaatcgaagagttgtcagcaattgggagtgatcctgcaggagggatgacacgcttactttatacagattcgtggttggcagcacaaaagtatgtgcaaagccaaactgaggcgtttggactggaaacgcaatttgacgaagtcgggaatctgttttgtcgagtggcaggaacggaatttcctcaggaaacgattttaactgggtcacatatcgacacagtagttaatggtgggaccttagatggtcaatatggtgtcattgcttccatgacagctgttcaatatttattagacaaatatgggaaaccacggcgttctttagaagtgctttccatggctgaagaagaagggagtcgttttccaacggttttctggggaagcaaaaatgtcgttggtgaagccaaacgtgaagaagtagtcgatatctctgacaacgaaggtaaaaagtttgttgatgagatgcatcgccaaggctttgattttcggcaagagcaaactagacgtgaggacattgaagcatttgtcgaaattcatattgaacaaggcaatattttagagaacgaaaagctccaagtcggtgttgttcatagtattgtagggcaacgtcgctacacggttaacttaaaagggcaagccaatcatgcaggtactacgccaatgagttaccgtcatgatgcggtgtacggctttgctaaaatttgtgcagaagccattgatcgtgcgaacgaaattggggatccgttagttttaacattcggcaaagtcattccgaaacccaatacagtcaacgtggtgcctggagaagtggaatttacaattgactgccgtcataccgacgctgcttttttacgacattttacaggtgaattagaagaacggatgaagacaattgctcaagaattaggcttgacgattgcgattgatcgctggatggatgaagcccctgtaccgatgaatcaagcaattgtagaagttattgaacaaaaagccaaagaaggcaagtatcagtatcgtatgatgcatagtggtgctgggcatgattcgcaaattattgcgcctcattacccgacagcgatgatatttgtgccaagtattggtgggattagtcataatcctgcagaagcaacggcatttccagatttggttgaaggtgtcaagcttttagcagataccttatatgaattagcgtataaataagatagaaaaggaagaattgtgatgggttataaaaataatcgagttggttaccaaaaagaattgttaacatcaagagctgtgataaaaaaagacaattacgccattattccccatgatggtttggtgcaaaatgcagtacctggttttgaaaatgtcgatatttccattttgggatcacctaaattaggtgcgacatttgtggattacattgctacgtttcataaaaatggtcaacaaacaactggttttggtggcgacgggatccaaacgttggtttatgtcattgacggtcgtttgcgcgtttcagatggtcaagaaactcatgaacttgaagccgggggctacgcctactttacgcctgaaatgaaaatgtatttagcgaacgcacaggaagcggacacagaagttttcttatataaaaaacgctatcagccgttggcaggccatcaaccttataaagtggttgggtcaattcatgaccaacaacccgaagaatatgaaggaatgacagacgtgttactttggagtttattgccgaaagagtttgactttgatatgaatatgcatatcttatcttttgaaccaggtgctagtcatgcctacattgaaacgcatgtccaagagcatggcgcgtatttaattagtggccaagggatgtacaatttggacaacgaatggtatccagtggaaaaaggggactatattttcatgagtgcctatgtgccacaagcagcctatgcggttggtcgtgaagaaccgctaatgtacgtttattccaaagatgccaatcgtgaaccagaattataaagaaaagccgaatgtaaagtaatgacctcggaacaataggatttgaacacgcagtggtgaacggtagagtccttcttcttggtagacgttacttttattcggctattttcctgttaattatttttctgaaagttctaacgctacccgtaagagtaaactcgtctcaggctcttggatagaggtgcctaataatttttcacattgattcatgcgatatttaatggtgtttctgtgaaggtaaagagcgttggccgttttagtaatttcgcaattgaaatctaaaaaaactttcaaggtttttcgtaattcttgtaacgtcggttccgtcggataggccaactctttcaattgttgctggcaaaagtattcaacatcttcagtgccaatcttttcaaaaagtccagctaggcctttgggatggaacaattgcacagtcgctggtttttgagcgtgtaaagaagcctctaatgtcgaggaagcttcaatataagaattaggcaaatcttctaggttttcataagcattgcctaaagcaaagcgaatggtaataggcaaagcctgttgcaaacgttcagcgaggttttgcaaaatcatcaaatggtcattttttttagattgaaaaatcaagatacttttattttgattttttaatttaaacaaggcgacatctggcaggatttccggcaattgttctttgagccattggaaaattagttgcccttccgcttgctgataacgaatatgggtttcattttctggtttagtcacgccgtagacaatcgctaattgataataatcactgttgattaaacgataatttttccaaagttccaaccaattttgatgtttactcagcgcttcttgatgtgtatcaagcaagcggtccaaaaagtctgttttgagatgctcaaaagattcagcaattttctggtttttaaataacataaaagtcaaaactaaaatggcctgatcaatggcaaattcagaaataggataaggaatctgttcaggagataagaccaatagataatagggaaaataatcgttcacacgaattggaaagccagctacttgaatgttttcttgtcgctcatcctgtaaacgaaagattttcttttcttgtgccaattgttgaaagtggtcttttgataattgttcgatgaaaaactccgccgatttttgattgccataaaaataattcgagtgggcaatcacctgttgccaaggacttaataaaataattggcgcatttaaaattttcgcaaattcagcgatgaagcgcgtagcatcaacatcttgcattaataatgttgaaaaacgcttttgtatgtcaaatgctacagacatctgttcggttttgctatcacgaagatagcctacaatttcatgcaacaacccgcctagtggctgtgtgctaggaattttaatcaggggcaaatcaacggcactggcataggcaacaatttctggtgaaatttcgtcaaggaaccgcccaactttgattcctaaagccgtacactctgcttgttttagcgagtcaataaaaggtttcaatttttcttgatcatctttataaatcattgccgttgttaaaatcatgacatttttagggataaaatcagccacatcaggtgtttccgtgatttctacactttccaagggctgtgttaagtttgagtgagacgataataattgtaagtcagaaaatcttggtaaagccaagacctcagctaatattttcatcacaacaacctcctttttttatagtatagcgaagaataaaaaggagtacaaaagatagttattgaatatgtctaaaaaacaaagtcaaaatagtgcaaattgaacaatgaatttctgggtttttccaaagataataaaagagaagaattaaaaatgaagtgagggattactatgtatcaacaaccaaattttgtacggcgaacaatcatgacgccgggaccagtcgaagcccatccatcggtacttcgtcaaatgggtcaaccaattttagggcaatttgatccagaatttctacagattatggacgaagttcgggaaatgattaaagtaccttttgccacaaagaatcaacaagcctttgccattgatggcacgtcacgttcaggcttggaagcggggttatttgcgttgattgagccaggcgacaaagtgcttgtgcctacgtatggccggtttgcttatttattaggtgaaatttgcgaacgcgcccgggccgaagtcatttatttagaaaaggactggctcgcaccgtttgaacaaacaacggtgattgaagcgattaaagaacatcaaccaaaaattgttgcgatggtccatggcgaaacggcgaatgcacaaatgcaaccactggatcaaattggcgccttttgtcgggaaaatgaaattttctttgtagtagatatggtggcgacttacggcggtgttgaaacaaaggtcgatgattggaagattgatattgcggtagcaggcactcaaaaatgtgtcagcgtaccttcaggcctttctttaattacctacaaccaacgtgtagccgattatctggcgggccgttaccaaaaagagttagggcttggcgcggatgcgcggaatgaacggttcattcaaagtaactacttggatttatcgcaattagaaaaatattggggaccagagcgcttaaatcaccatacagaagcgactacaatgatttatgggctacatgaagggctgcgcttgttacttcaagaaggcatggaaaatgtctatgcacgccatcggaaaaacaatcgtattttagttgaaagtctgcaaaaaatgggcttagaaattttcgggaagttagacacaaaaacaccaacagtcattcctgtggtcattccagaaggaattgatggtgaaaaagtgcggagcttattactggatcattttaaagttgaaattgcctcttccttcggtgatttaaaaggaaaaatttggcgggtcggtaatatgggttacagcagtcgcgaagacaatgtgttgcatttcttaagtgcctttgagactgtattgaaacaccaaggctatcaatttgaaggcggtagcggtagtactcatgcattggctgagtatttaaactaaaaaagaaggtaggacaaaggtcactacgtaaaaagcgtagtgcttttgttccttgtgaaacgttaaccaaaaaaatgattggtggaggaaaagaaaatgacagacaagacaaaaagttcgttggcttattggaaaaaaatcgttattttactatgtatgggctgggtaacaatctggatttatcgttccgcgctttctcctgtttatccacaaattcgtgcgtctctaaatggtaacgcttccgatacggccctagggtccatttctagcttttattttctcggttacgtagtcatgcagattcctgcaggcttcttggtagacaaaattgggaaaaaacgtgtattaattccaggctttatcttgtttgcgctggcagcattactgattgcccaagcccaaacgattggaacaatttacttaggtagcttattggcaggcttaggatgtggttctttctatggctcggcttactcgttgacgtcgcaaaacattcctcaagccaaaaaaagttttgcaacagctattgtcaacagtggttcagccgttggttcaggtttagggatgattttatctagttatttagttgcccaaaaaggattaccttggcaagtgatgatgtacatttccgcctttatgattatttgtatgttagtggcttttcaagtgattattcgtaatcataaagaagacatggccttgattcagccaaccgttgttgatgaaaaagataacggagcggtaaaagaaaaagtgccctttaaaaaactgtttgcgccacatatgctatttgcgtatattttatattttggcacttgttatgcatattatatgattgtgacttggttacctaattttttaagtaccgaacgtggtttccaaggagcagcaatagggttatcctcttcactggtcgcatttgcctctattccaggagcgttattttttagtcggttggcggataagtacatgcataaaaaagttcaattcatcgttgttttagaatttttagcaacagccatgctcttgttaactgtacaagtaagtaatgcgacgttgttattaattgctttaattatgtatgggttcttaggaaaattagctgtagaaccgattattatttcttggctaggtgaaaatgcaccaaaaattggaattggcactactttgggcgtgtttaactttttcggcatgatgtcatctgtgattgccccagctttaactgggaaaatttctgacacaacgggttcgaaagtcatgggcttttatatcgccgtcgtgattttactaattggcacgattctttttatgcttgtcaatttaaaaaaacgcagggcagattcgtctaataaataaaaaaacaacgcaaacttatctttcgctgaataagtttgcgttgttttagctttttgacaatcatattaatcgcttgtgctaatcgctcttcttgttctttaggatctttttcaggattttcaaagcaatgctttaaattctccgcaactatcatccccattacgcgatcaatactagaacggaccgcactcaactgagtgataacatcgatacattctttttcttcatcaatcattttttgaatcccgcgaatttgaccttctgtgcggcgtaaacgattcagcactttctttttttcttcagtcattttgcccctccttaagagtagtgattggtttaaaatatacctacacgaggtatttttgtcaactatcttttctttgaatctaaaaatggcagaaatctcttcagttgacaagtctaactttttcatgttaaatatmccccgtaaggtatataagagaaggagaaaaagrtgttatttcaattgtttaaaaaaacgccaagtatttcracaaaggaattgcagtcacgtttatctaaagagataacgttattagatgtccggacacctagcgaataccgcgcagggcatattccacaagcgattaatgtcccacttaacaaaattcccgcctacaacaaatccgctaacgaagtctatgtgatttgccagtccggcatgcgcagcaaaaatgcggccaaaattttagcgagaaaaaactatcacgtgattaatgttcgtggcgggatgtcccaatggtctggtcaaattaaaggaggaaaataaatgaaaattgtaattatcggaggcgtggctggtggtatgtcagcagcgacacgtttacgtcgtttaatggaagatgctgaaattgttgtcatggaaaaaggcccttttgtttcatttgcaaactgtggtttgccttactacgtttctggcgaaatcgcagaaagagagcaactgcttgttcaaacacccgaagcgttaaaggcacggtttaatttagatgttcgtcctcaccatgaagtcgtggctattgatccaatagaaaaagtgatcacagtgaaacatgaaacagaaattttaacagaacactatgacaaattaattttatcaccaggggcgaaaccttttgtgccaccaattacaggattggcagaagccaaaaatgttttttcattaagaaatgttcctgatttagatcaaattatgacagccttgacaccagaaacaaaacgagccgtcgtgattggcgcaggcttcattggcttggaaatggcagaaaacttgcaaaaacgcggattagaagtcactctcgtggaaaaagcgcctcatgttttaccgccattagacgaagaaatggccgcttttgtcaaagctgaattaagcaaaaacaatgttcaagtaattacgggacaatctgcggttgcttttgaagaagaagggcaagtgattcgcttagaagacggtcaaacattagcttctgatttaaccattttgtcggtgggggtccaaccagaaaataccttagcagttgaagcaggtgtagcaactggtttacgtggcggtattgttgttgatgaacactatcaaacgaatcaacccgatatttatgcggttggggatgctattgtagtgaaacaacaaatcactcaagaagatgcgctgatttctttagcttctcccgccaatcgccaaggacgtcaagtagcggatgtgattgctgggttagagagaaaaaatcaaggaagcattgggaccgccattgtgcgagtctttgatttaaccgctgcttcaactggtttaagcgaacgggctgctaaagctgctggactaacaacagctgttgtgcatatcagtggaaaagaccatgcggggtattatcctggcgcaacagatcttcagttaaaattagttttccatcctacgacaggggaaatttatggcgcacaaggaattggggcaaagggcgtagataagcggattgatattcttgcgaccgctattaaaggacagttaactatttttgatttgcctgaattagagtttacctatgcgccgccgtttggttcagcgaaagatcctgtgaacatgttaggctatgcagcgatgaaccttgtagaaggattgagtgaaaacgttcaatggtatgagttatccaacgaattagctaatggagctgttttattagatgtccgtaatcccgccgaacgagccaatggtcaatttaaaaatgctgtgtctattcctttaaatgagttaagagaacgtttggaggaattagacaagtcaacggagtacattgttagttgtcacagtggtttgcgtagttatattgcagaacggatgctaaaacaagcaggcatctcagccaaaaatttagatggtgcttttgcgctatatcgaatggtaaaaccggaggaactagaaaatgtataacacgattggcatgcctgaattttatcaggaagcaaaacgaaaaaaattaccgattattgatgtacgagaagaaatggaataccaactggggcatgtccctcaggccatcaacttacctttaagtactttaaccgaaaattatcagcaattagataaaaaccaaccctattatctgatttgtcaaatggggtcgcgctccgcacaagcgtgtgcgtttctcagtcaacaagggtatcaagtaaccaatgttctaggtggtacatctggctggttgggtcaattagaacaataaaataacaaaaaacgtttattcttttacacaggataaacgtttttttgttagataaagatgtgtcaaaactgtaagaggaatgataggaagatgaagggaccagtttttttattcattatatactaaataaaatgacaaactcgtcaacagaaatcaaggaggaacaaataaatgaaaaagtcaggccagaagaagcgaaataaaaaagtgtggttcggtattggtgccgcagtggtcgtcgtcggatttatcggagcaaaaacagttttttcttcaaaagaagttgaacctgaatacacaacgtataccattacagaaatggcctcattaaaattagatggtcaagtgagttttctagatactcgggatattttctttgatccttctttaggaaaaattgccgaaataaatgttgaaaatggtaaagaagtcaagaaagatagtccattgttaacgtacaataactcagacatccaagccacagaaacagaacaagcgaatgctgttaatcggaacaatcttcaagttcaacaagcacaagagaacgttaacttagccactcaaaaatacaatgaagcgttaaacaaagttgctgcagccaagcaaaaattaaacaccgcaaaagaggctgaagagaaagaaacactaaatgcggaaattcagcaattgaatgaagccgttagtgctgcgaatagtgaagtcgcccaagctaaccaagcccttcaattagccaacagtgatgccgtcggagcagcaaacacgcttgaacaaacacgtggcaaagtcaacacagtcgttacagcaccaattgatggccaagtcactgttgatgctagtgccatgagtagtaccgacaaaccagtcattaaaattgcaacacaaaagaaaaatattcaaggaaaagtaaccgagtatgattacgataaattacagacaggggaagaagtaacagtgacgaccgttggttcaggtaaatcagcaccaggcaaaattgtttccattgcgcaaaccccaatagctaaaaatgaaggcaatccagtagtgagttatcaatttacagtagaaggtgattttccttgggcagaaggcttgtctactagtatcgctgtgccacaaaagcaaatgattataccgacagcagcaatccaaaaagaaggccaaaaagaatttgtctatgtttacaaagcgggcaaagcgaaaaaaacaccgattgaaacagaaacaaatttaggtcgtaaagttgtcaaaagtggcttgaattggaaagaccaagtgattgccaatcccaataaagaattaaaagataatcaagatgttcaggtagctgccaatgattaagctagcccatattcataaatattattattccgaagaagaaacactgcatgtgttagatgatattaacctccaagtagacgctggagaatttttagcgattatgggtccttctggttctgggaaatcgactttgattaatttgctaggctttattgataaaaagtttgaaggaacgtatttatttgaagaccgtgaaattggcgacttttctgataaggaactatcccgaattagaaatgaagcagtcggctttgtctttcagaattttagtttaattgaaacactaacagttgaagaaaacattgaattacctcttttatatagtgggttaaccccaaaagaagccaaagatcgtgtccacgaagttctgacaaaagtcggcttgccagataaaggcaagaagcatccaaaacaactttcgggcggacaacaacaacgtgttgccattgcgcgtgcgattgtcaatcggccaagttttattattgcagatgaaccaactggggctttagatagtaaaacatcggaagaaattttaacgctctttcagcaattaaacaatgaaggtgtcaccattattttagtgacacatgatgaagaaacaattgaatactgcaatcgtttgattaaagttcgtgatggaaagattttagaggaggtgctgacatgaaacgttcaattatttggaaaaccgccttccgttccattttgaaaaataagcgacgcagcttgttaacgatgctagggattgtcatcgggatcgcttcggtgattaccatcgtggctatcggtaacggctttaaagaagacatggtcgataaattatctgctgaaaaacaaaaagaaaatgtgaaaaagatttctttttcggcctacaacacttcggatatgtttagtgaccaagcgatgtttaccgacaatgatttaggggtcgtgcgcatggttcctggcgtagaaaaaattgattttgatcaaagagaagttgatggcgcccaaaaaggtacactgaattttcaagcaggaccgaaaaatctttctgtaacctatgaacttgccaacaaaaccaccaaagaattgttggcgggacgccaactgaatgatggagacaatgcaaaactggataaaacagtggtggtggatgaactggttgccaaagaactctaccaagactcgactgcagcagttaatcgaacttttccatataaagagcaactttttaccattgttggcgtgacaaccaataccagcggtgccattggtccaggtaatgatgactcattgctttattttcccaaaaagacctatgaacattatttcggcaagctaaaagatacatctacgttgaaactaacagtagcacctggctatcaaccagatcaagtattgaaagaaacaataaaaactctctctcaacaaggaaccatgaaaaacagtgggacgtatcaagaatataatgttaaagataccatcaaagaaatgggctctttattaaataatttaaccttgtttatttccgcaattgcggctatttcactggtaattgctggggtcggcgttatgaatatgatgtacatttcggtctcagaacggattaaggaaattggtatccgacgtgcattgggcgggacagccagtgatattaaaaagcaattcttaacagaagggattgccttgaccttaatcggcggaattactggttatcttttaggaatgattattgcctacttagcctcaatggcactaccgttttctgttcgaccagatttaatgaccgtttcattagccattgggatttctgtctttatcggggttgtatttagctatttccctgcctcggcagcttcaaaaaaagacttgatcgatattatgaaataaatataaacagcaaagaaacagccatttttggctgttttttttagtgaaagtagaaaaaaatccaaagatttcaagagaaagtagctaacaaacgtcaaaaggttgatattagctaccaaccttttgacgtttgtcagttaaataaaaaagaaaaaaattaaaaaaatagcacgttgaggattaaataacaaacattttttaaataagactattggaaatcctttataaatcggggattacaggaatgactgttaatgactgatttgcttgtaaatttctaaattttaattcgaaaaatttccagtatactaaatatatcaaaacaaaacacgaaaattgagaaaattttgaaccaaaaaagaattaaggaggaatcaagaatgaaaataatggtcatcacaaaaaatattttatcagaaactgcttttcaaaaccgcttacagcatttagatcaccaagttttttgtacgacgtgtctgattggtgaaattaaggaaagtcatttgttttatcgaaaatttgatgccatcattctcagcgaaacgattcctcgcaaagaacaatatttatatctaaaggaattagccagagttaaaacgccgttgtttcttcgctcggaagacattcctacctcggaagaattgagcattagctatcaatatggcattctcaattggttacgattggatgcgactttggatacgttaagagaaaatctccttttggcagaattaaataaacccatccaacgagaagatgaaaagttagatgtagagggaataaagctaacagccgcagaacgtgcactactggctgtcttgtatagtacgccaaaagaacacttaccaatggagcgcctgtgtaaattaatatatgacacagaagaaacagccaataatcgaaaaaaaatgaccaaacagctgacaaaattaaataaaaaaattcaagtagggggctttaaaaaacaaggtatccaaaatacacggtataaaggctacaaactgcatccgcagttgcttccttacattggcgaattatttacttaaattagagaagcacttgacgaatgaaaatcaccatcacaggatgacctctaaaaaccatgctatactaatacggaatagtataggaggtgggtctgtatgaaagacggactatattgggtacaacaattaaaagaacagaaagtaagtcgcatagaactcttaaaggatattgagaaaaaagtccaaaagttaaatccaaagatcaatggctttgtaacctttgatagccaagaagcagaagcaacttatcaaaaaaataaacagcaggacacactatttgctggtttgccatttccattgaaaatgttaggccaagaaaaagcggggtggtcagcaacggccggctcgcaactttttaaaaatagtactgcaacaacgacctctaactttgtcaaacaagcagaaacgattggcttgatgcctttaggacaaaccaacgctccagagtttggctttaaaaatattacggaccctgcgctttacgggccagcccgcaatccttggaacctggaacattcgccaggcggttccagtggcggcgctgccgcagttgtcgctagcgggattgttcctatagccggcgctagcgatggcggtggctccatccgaattcccgcctcttttagtggcttaattggcttaaaacctagccgtggctccatgcctgtcggcccagaaggctggcgaggctggcaaggtgcctcgattgactttgcgttgactatttctatgagagacaccaaagcgttattttatggcctacgtggtagccacagtggcgccccctaccaagcgcccttggcagaatggcaaacacaccctaaaaaacaacggctaaaaattgctctgtgtaccgcttcgcctatcggctcactgatttcgccagaagcaacacaagcggcgaaacaagcggctgattttctggcagccgctggccatgaaatcattgagattccttatccagtcgatggtgcagcgctgattcgctcctattatcaaatgaacggcgcagaaactacagcgatgatgaacagcattcaacaggggctcgggcgcccaattcgtaaagaagaaatcgaatctttttcatggaccatgcatcaatttggccaaaagattccagcagccacctatgttcattcattacagttgtgggatcaagcagcagtaacgatggaagaactttttcaaaaatttgatctgtttttatcaccaacaacggctttttcagcaccaaaaattaacgaagatttgcaaagtgagcacattcgtcaacgaatggcgcaagcagcagaattaacagaagcagaattagctgaattaatctatgattattttgataaaagtttacagctaacaccgtatactcaactagctaacttgacaggacaaccagccatcagcttgcccacacatgttacggcaacggggttacccttaggcattcaattgctggctgctcgtggacgtgaagatctcttattccaagtaggcgaacagtttgagcaagaaggcaaatttaaattaccagaaagttaccgctaaatagggtgttattgtgaccaaatttcagataaaatagacacaagacaaaaaactgaggtggaaaaatgctgtacgtagtgagacatggtgaaacagattataatgtggcccgtagaatttgtggtcatgcggaagcgcaattgaccgaaaaaggctatcaacaagcggaattggtagctgaaaaaattgccaaacaaggaattcaaatcgaccgtttactggcgtcgcctttaaaaagggcgcaagaaacagcccgtaaaattgcagaacgaaatcaattgacgattgaaacagaacctcgtttaattgagatgaattttggcatttatgatggtgaaccgattgaaacaacggctttccaagaaaatcgttctgagatttccttgccgtttccagaaggggaatcagtcctagatgtcgcgggtcgaatttatcccctgattgaggaagccttggcttcagaggaaacttacctatttgtttgccacaatgcggtcatgcgagtcattgataactacttcaatggtaaaaaaatccaagatttcttggactttcattgtgaaaatacacaacttgtacaatacggagaataaaaatcaagtctttaatcttttggttaaagacttgattttttttatggtaaataagaaaccgcttccgttttaatgtataataaattaacttttggatcaaaaaagaaatggggaaaagactatgagaattgataatattcatcaagcgttaaaacagtttcacgtacaaaatccaagtagcaaagaaaccttgttgcccgcaacggcttcgcaattaagtcaggcctctggctatacccgaaccgctgttagtgaagagctttcagaattagtgagaaaagaccaagtcgttaaagttaaatcaagaccggtgttattttttgataaagactacttagaggaacagtttcctttttttaaaagtagcacgtgctatgattccctcgcttcgctgcaagaggacatttatcaacagacagaacagatacataagaaaaagcagctactgaaaatgaatccatttgcgaacgtaattggttttgatgggagcttagcagacgccatcaagaagttgaaagccgctattttatatccgcctaatggcttgaatattttacttactggagaatctggggtggggaaaaccttaattgcagaacaattacaccaattttatcaagttaaaatgaaccaagaagttccgtttatttattttaattgtgcagaatatttcaacaatccagaattattaacttcgcatctgtttggctataaaaaaggcagtttcactggtgccgtcaatgaccaaaaaggtttagtggagttggcagatggcggttttttatttttagatgaagtccatcgattaacgagcgaaggccaagaaaaattgtttacagttttggataaagggtattttacacggatgggcgarcgaaaaacaaagaaatgtatcgataaaatttatttttgcaacaaccgaagcagtcaatcaacattttttgaaaacgtttttaagaaggatccctgtgacattagccattccagctttagccgagcgctctttgaaagaaaaaattcaattgattttgtcctttttcttagaagaaagtcaacggattcaaaagaatatccatattcgttatgaggcgttgaaacaattaacatttactcattttgaagccaacgtaggcgaattgaaagcggcgattcaatttatgagcgcacaagcctatttagaggtgttcgatcaattaacggaaactatttgcattgaagcaaacgaggggacagtcaaagagcaacctgatgtagaaagtctgctggcttttaatgagtggatacctaacgatggcctcacgattcaatacaaccatttttatttaagcagtcaagagttacttaaatcagaaagtctgaaaaatgatcgtttttataattttctattgaaagaatatgcggatttgaaaaaattaactctttcgacagaggatgcgctagcaatcatgcaaaacaaagtcgagcaactttatgatatggatatttttgctcaagaaccgctagccatagaggccattgacgaaacattgcagccaaaaattcaagaagccattgtcttttttgaacaattaatccaagaaaaattgacagaggatttccagaatattttaattgtccacctttattctgctgttttttattctgcacaaatgaatgaaacattttattcagataccaaaaatatctattctggcaaagtcacccagtatcaagctgctaagaccatggtggactttctacaaacattgtttgggatttcttttgctgatacggaaatcctctttttcgatctatttattcgtaaagtcacagctaaaaaaagagcgcactcagatgaagaaaactgtggcgttatcgtcgttgcacatggtgccgcgacggccagtagcatggttgagtacaccaaccttctgttttcaacaacggtcatgcgtgcagttgatatgccgattaatcaatcagtggaagaaacattagaaaaagtccgtacaattgtaaagcaaaatcagtataaaaaaattattttaatggtggacatcggttccctggtttactttggtaatgctatcagtcaaaagtttcaaagggaagtgctgctaattagcaatatcaatctattaacattgctagaagtggcccgagaagtcatttatgaatcgacggcgtttgagtatctattaccagtcttaaaagaaaaaaatcatcgcgccttgatttgcagtaaaggtcgcttcaacgaggcaaaagttctcattatttcctgtctaactggcatggggactgctattaaaattgaacagttgttactaaaaacttttcccaatgaattactaacgaatgtacgcatcattactttagagaaaagagaagtggaagacattgatcgcttgcattcttttgttcggaaagaagagaaaatcgttggtatcattggcaccgtaaagacagaagtgccagatattccgtttatttctttacaagatttactatcgaagcggggcattcagctagttttcgaattattaggccatcatttagaagaaaaacaaaaccaagagttactaaaaaaagtttcagctaaatatattcaaggattatcaatcgaagctattacagacttactaacggttttgaatccgacaaccatttcaatcgaattagctaagatttattcagacatttgcttgcaaactaaaataaaaagtgacgaaaagattttacttcgttttatcattcattgtgcttgtatgttagaacggcaattgttgaatccagaatatgacccgacagcttatgaagtgtcatatcgagagttgccagaagctgtatctgtcataaaaatggcgtttcgaccgcttgaagtgtcctataatctgttgattccacctttggaagtgcgctatatttatgaattgctctttgaaaaggcttaattcaaacggaaatgaaagttggcacacttattgcttttaataaaatgattaattagcaaaggagtttgtttatggaaaatgaaccaattttacttttaacacacaatggttggggcttggaattagtcaaaagcgtccagatgattgttggagaagtcacaaatgtacatgaagttgcattacaagcagaggattcactgggggattatttagaacgagtcacagaaaaaattgaccaattaacgtggcacaaccagttgctaattttaacagatgttaaaggcggcacacctagtaacgttgcattacgtttatcaaaagattatgacctcctgattgtgtcaggattatgcacatcgttattattagaatccgtcatgaaacaaagtggtcctggatttcgtttagaagatgcagagatgattcaacaagcagcagtagacagttgtcaaattttagaaattccaaaataagaaagtacaggtgaacagaatgtcaaaaatcgtattaacaagagtcgatagccgtttaatccatggacaagtagtgactaaatggttacaacaatcaggtgcaaatgaaattttggtagtgagtgatgaactagagcaagatgaatttttacaaagtatttatttaatggcggcgcctccaggggtttctgtagtaattaaagggattgaaagtgccaaagaatattgggaatcgcaagaaaaggaagagaaaaaggtgttatttttagtgccagatttaacgaccttaaaagcgatggtggaccaagaaattattaaagaggagattcaagttggtggcttaggtggcggaccaaatcggaaaaatgttttaaaaaatatcaatttatctgaagaagatgttgcaattttgactgaacttttaacgaagggcatccatgttttcttccaagcgattcccgaagaaaatcccctaccaattcaaaaattaattgaaaaatatcaatcactataatcagagaaaaaggagagaatcatatgggcgttttaggtgtttcaattattatgggactttattattggtttgcacgtttgcgttttgggtacacattttcaggcatgctgtctcagccattaggcgcagcgttggtggctggtttagcaacaggaaaacttagtgaagcaatggttgtgggggcggggattcaacttgtttatctcggagtcacctccacaccgggcggcaatgtgcctagtgatccggctttagcttcagcaatcgcgattccgattgctttaggtgtgggaatgaatgccgaggcggctgttgcactagctgttccttttggtgtgttaggcgtctttatggatcaattacggcgcaccatcaatgcgacgtgggtgcatatggctgataaatatgcggaagagttaaattatggggggatttaccgagctgcgtttgtttatccagctttagcgggatttttaattcgctttccgttggtttttgcggcgaacttttttggtcaatctgtggtgaataaagtcttagaagttatcccagcatggttgatgcacggctttgaagtaatgggtggtattttaccagcgttaggcttcgccttaacaattatggtaattggcaagaaaaatttgattccttattttttaattggttttgttgcagtagtatattttggcgcagaagttatggccgtcgctattttaggaatctgtattgcctttttagttagaaacaaggcattgagtgaggaggcagcataatggaacaaatgacacaagcaaatgaacaacaattggaacagaaaaaaattactaaaaaagaattatccaaagccttttggatttatcaactaggctgtgaattatcaaattcttatgaacgtctccaaagtttagttttttgtgcatcgatgattcctgcaattaaaaaactttacgcagacgatgaagaacaacaaagagaagctctgaaacgtcatttgaatttttttaatactgaaggaacagtaggggcttccattcaagggattgcaattgctatggaggaagaaaaatccaatggcgcagcgatctctgatacggcgatcacatcgattaaaactgggctgatgggtccactggctgggattggcgattcgattatttgggcagcattaatgccgttaatcatttccatttttattccaatggctaaaggaggtaacgtgattggaagtatcggtccgttggttctgtacacagccattacattatacatcagttggacgttagtgaataagtcctatacattagggcgtaattcaatcttaagtttgttaaaagacggcaaaattaagcaagtcatttattcagcaaatgttttaggaatgatgatgatgggcgctttaagtgcgagttatgttaaaattgctagcccgatgacgtttaaagttactggcggtgccacgattgttttacaagatatcctagatcaaattatgaaagggttacttcctttagcagcagtcatggctatttatttcttcatggtaaaaaaaggcccacgttacggtatcattatcggcacgattgtcttggttagtttggtcacttcattctttggtttgttataaaggagaaaataatgaatagttacgaaaaattccacttaaaagaagtcattaatgcttctggcaaaatgaccattctaggtgtctccaaagtttcggaggcagtcctagcagctcaacgattcggcggcgaacatttctttgaaatgagtgaacttagtgtgcaaacaggggcctttttagccaacttgttgaaggtagaagatgcccaaatcgtttcctcggcttcggcggggattgcccaatcggtggctgccttgattggaaaaggcagcttgtaccacgcgtatcatccctatacagaaaaaatcgaacagcgggagattgttttacctaaagggcacaacgtggactacggcacgcctgtagaagtcatggtagcgcaaggtggcggccaagtggtggaagctggctacgccaacatgtgcagtccagaacacgtggaaatgatgatttctgaaaaaacagcggccattctatacatcaaaagccaccataccgtgcaaaaaagtatgctgacggtggccgaagcggccaaagtggcgcaacgccacaaggtgccgctaattgttgacgcggcagcagaagaagatcttttcaaatacactgaagcaggcgctgatttggtgatttacagcggcgccaaagcaattgaagggccaagtgccggtttagtggtcgggaaaaaagaatacattgactgggtgcgcctacaaggcaaaggcattggtcgagcaatgaaaattggcaaagacaatatcttgggctttacgcaagcagtggaagaatacttggcacatggcagtgaatcaggggcttcgatgcaagagcgcttaaaaccgtttgttgaagccatcaacaacttatcagatttaaccgccaaaatcgtccaagatggcgctggccgagacatttatcgcgccagtgtcaaagtggacggcagaaaaaccgctaaggaagtcatccaagcattaaaagcagaaagtccagccatttatacgcgagaatatcaagccaacaatggcatcattgaatttgacattcgttctgtcaatcaagaagaaatgaacaaaatcgtgcaacgattacaagaaattatggacaaaaaggagaaataagtcatgtcattaaaacctaattatttagaagaacgcatttgtttaaacgtcttagccaattcagtagaaaatgcccaagcctgttatgaagcagcagaagggcatgttgtgttaggcgtcctttcaaaaaactatgaaaccgatgaagcagctattgacgacatgaaaaaataccaagcagcaaccaacaacgctttatctgtcggcttaggggctggcgatcctaatcaaagtcaaatggtggctcgcttatcagaagttctacaaccgcaacacgtgaaccaagtcttcacaggtgtcggcgcttcgcgggccttacttcgtcaagacgaaacagtgattaatggcttggtttcacccacaggcaaagttggctatgtcaacattgcgacaggtccgttaagctctggtgcgccagcggcggaagtgcctatcgaaaccgccatcaaattgttgaaagacatggggggcagttccattaaatatttcccgatgaaaggcttggctcacaaagaagaataccaagcagtagcagcagcttgtgccaagtatgacttttatttagagccaacaggaggcattgatttagaaaactttgaagaaattgttcagattgcggtggatgccggcgttaaaaaaatcattcctcatgtctacagctcaattatcgatcaagaaacaggggacactagaacagaagacgtgaaaacgttactaaccatgatgaaaaacacattgaataagtaggtggcaaagatgaaaattgctgcgtttggtgaagtcatgcttcgtttcactccgccagagtatctaatgttagaacaaacagagcagttaagaatgaactttgtagggactggcgtaaatctcttagcaaatttggctcattttcaactagaaacagcattgattacgaaattacctgccaatcgtcttggtgaagctggcaaagcagcgctaaggaagttaggaatttcagatcaatgggtaggagaaaagggcgatcatattggtagtttttttgcagaaatgggttatggaatccgccccacacaagtaacttatcaaaatcgccatcagagtgcttttggcatcagcgaggcgaaggactacgattttgaggcctttttagcggaagtagatatggtgcatatttgtggtatttcgttaagtttaactgaaaaaactcgtgatgctgctttgatacttgctcaaaaggcgcatgcctatcaaaagaaagtttgttttgactttaattatcgacctagtttgaatacagcaaatagcgcactctttatgcgtcaacag

SEQ ID NO: 124 - DNA, 6027 bp; double-stranded, linear
tttatttacacctgcattggaagtcgaagatgccgaaaagagtagttggacttatcccgtttatggttatttagatagcgaaaatccttgggaaaaaattgcggctttattaaataaacgaacacaaggcacaccacgctttgctttagaaaaacaagctctttctttagctcgtttcgatcaattgaaaacctatttcccagctagcgatttttcgcatgatgttacgcctttaattgaaaaacttcaattaattaaaacagaacctgaaattcaacgtttactagaagctggtagttgggctgatgtcgcttttgagattggcttcaaagcaattcaagcaggcgttgcggaacaagaaattgttgcagaaatcgagtatcaattaaaacgtcaaggtattcgctcaatgagttttgatacgttagtcttaacaggaaaaaacggagctagtcctcacggggtacctggcgaaacaaaaattgagccccatgacttagtgttatttgatttaggtgtcgttcataatggctattgtagtgatgccacacgaacagtcagctacttggaaccttctgatttccaaaaagaaatttatggaattgtcttagaagcacaattagcagcaactgaagcggtgaaacctggtgttacagcaggcgaattagatgatattgcccgaggtgtaattacmaaagctggttatggtgaatactttaaccatcgcttaggccatggcattggaaccactgtccatgaatacccatcgctagttcatggcaatgatttagtcattgaagaaggtatgtgtttctctattgagcccggtatttacattcctggaaaagtaggcgttcgtattgaagattgtttacacgtaacgaaaacaggctccgaaccattcactaagacaaccaaagaattgcaaattattcaatagcataaaaataaaatgaggccatcagtcaaccggactgatggcctcatttctaaattttaaggtaagccgctgaacaaaagcaacacgatccgttgctaactttcataagctaaacgcttgttaccctttaaattctttttttacgtctttcgctgcatctttaacatcttcttttgcttctgcagctttttcaggaacatctttggtggtttctkttgcttcatcgacaccagcagaaacagtttctttggccgctgccgcagaatctttaacgtcaatatagatatcttctgctgcatcttcggcaatttcacctaaatcttctgcgtgatcttgagcatcgtcagctgcttttttaaattgatcagataaatcacctgtttgttttttaaagttatcaagcatgtcgccagaaacaccttgtgctttatccaatgaatcttttgttttttctttgacagaacctgccaaatcagaggcttgatctgataaaacgccggctttttgttttgcgatttctgttaattctgttcctttttgaacagcataatctgtgtaatcttgcgctttgttttttaaatcatctgtttgatttgataaatcatcacgtaattctttacctgattttggtgcaagtaataatgcggcaacggctgctgctgttccaccaattactgcycctaagaaaaatccgccttttttagccataaaaatctccyccaattagttattkgtttttttattttttgaacgcattgctctaaaagcagaaccgcctactttactcactnaaaccagctttcgctgtgcctttycctacggttcctacctttgtaatcaaatgtttacttgaggtgttcaattcagagacactttcgcttaaatcagcaacggccgtaaacaacggatcaatcgttgccactttttgattcacatctgtcaatagttcattacttttaacaagcaagccttccacttggcgactcaatacattcacatcgctagtcacgactttgattgttgtatttgtttcatcaattgtatcttcaatttttgaaacaacttgagagactttatataacacaagtactaaaaagatgactaaaacaacaaatgctaccgctgcaattaaggcagcaatttccccacctgacatatcattactcccctctgaaattttatttataatcttaggataacaccaacttatatttttcacaactcataaagctaagaatgacaatttattttataaaattctcatgcccttttctttaagaaaaaaagcgtaaaatttccttctaacgaattgaaattttacgcttatttttatttatttttcttttggttgctcttttttcgctaattgagcacctaaattaataatgtattctcgtaaattatcttttacttctggatgagtcaaaccatattcaatgcttgttttcataaacccaaatttatcgccaacgtcgtaacgttctcctttaaactcacgagcaaaaacgcgttgtgttttatttaaagtgtcaatcgcatctgttaactgaatttcgttaccagcgcctggtttttgattttcaagtacatcaaaaatttcaggggttaataaataacggccgataatcgctaaatcacttggtgcttcctcgggttttggtttttcaacaaaattctcgacattgtatagtcctttttcgatttctttttctgggttgataataccatattttgaagtatcttcatggggtactttcattaccgcaattgtcgaagcatgtgtttgttcgtaatcatccattaattgtttcgttaatggcactttatcttccattaaatcgtcgcctaacatcacgacaaaaggttcattgccaacaaatgctttcgcttgtaaaacagcgtgtcctaagcctttcggatgggattgacgaataaaatgtaaattaacatccgttgtttcttcgactaatttcaataaatcggttttatttttttcttttaagttattttctaattcaacatttgaatcaaaatgatcttcaatcggacgtttggctttgcctgtcacaattaaaatatcttcgattcctgaagctagtgcttcttctacaataaattgaatcgttggtttatcaacaatcggtaacatttcttttgccatcgctttggtagccggcaagaaacgtgttcctaacccagctgctggaataactgcctttttaactttcatcttttttcctcctaaaaatcaagtgtaaattcgttttcggttttgccatcgcgcaacatgatttcttttgctgcttgttgtacatcttcgtcattgtacaagacattgtagattgtttctgtgattggcatttcgacttctagttgttgtgccaattcataggctgctttagttgttgaaacaccttccacaatcatgcccatgttttctaagacttcatctaacttatggccttttcctaataaattacccgcacgccaatttcgagaatggacacttgtacaagtaacaattaaatccccaacaccacttaaaccaataaatgttaatgggtttgctcccatcgcaacccctaaacgactaatttctgctaaaccacgagtcataattgccgctttggcattatcaccaaagcctaagccatgaatcgctccggcgcccaaagcaataatattttttaaggccgcccctgtttctacaccaatcacatcatcattcgtataaattctaaagtaatcattcataaacaactcttgcacatacacagcgtctgctaaattttcgcttgctgctgtaatggttgtaatgtcatgaacagcgacttcttctgcatggcttggaccagataaaaccacaatcccttgccgtttttctgctggaatctcttccgctatcacttctgaaatccgcttatgtgtaccttgttcgagccctttacttgcatgaataataattggttttgtttttaaatgttgggccacttcttgtgctactgaacgaatggctttagttggtaccacaaacagtaccgcatcaacatctactaaagcagtggctaaatcagtggttgcctgaattgaagtaggtaagattaattctggtaaataatgtttgttggtgtgtttgtatttatttcatcgatttgctctggtttattccccaaatacagacctcgtgtccatttcggctaatactgagctaaagctgtcccccaggaacctggacctaaacagcgacttttgtttcatcggtgaaactctcctttcgctaaacaacgttacttctttagtttaccatattcttcaatcaagttggattaagaagttgttatttttttcttttgtttctcccgattgtaaaatttcaaattgggatttcttctgcgaacgatcacaataacaattgctgccacgaacatcactaaagacaacaattgtgagacacgaatgttactaaacgcatacaaactgtccatccgtaagccttcgatgaagaaacggccgaaagaataccatattatataacctaaaaagacttcgccttcttttaaaaagtgtggctttttgcgtaataacactaaaacgataaagcctaaaacattccagacagattcatataaaaatgttggttgatgatatgttccgttgatattcatgttatcaatgataaacgttggtaaatggagattttctaaaaattgtctggtggtcgctggcccataggcttcatgattcataaagttgccccagcgaccaattgcttgcgctaaaatcacacttggtgcggcaatatctaaaaaagtccatgtagaaatgaaacgatgacgcgtaaagaaaaacagcgccagtcccccaccaataagaccaccataaatcgctaagccaccatttcgagtaaagaaaatttcaatcggattgtctacataatcttgccattgaaaagcgacgtaatacaagcgcgcgccaacaattgctgcaggtaatccccagagcataaagtcaaagacatcatcttcttttaaaccaacacgaacggcttcacgactacttagccaaacagctaaagcaatccctgaaacaataataattgcataccaatagacgggaataccgaaaaggcgaaatgcaattgaatttacttgggctaacatcatcacatcttctccttctattctcctgaattttcttcaatcaaacgggttaagcgctcttcgaacgtttttgttgcatcatagcccattgttttcgcgcggaagttcattgctgctacttcaatgataatggccacatttcggccggtcttaacaggaatacgaatctgagggacatcaacgttagctatttcaaccattgcatcatcactaccaagacgatcatatttcttgtctttttcccatgcctctaaataaacgaccaattgaacttgcataaagccacggaccgcactagctccaaacaggttcatgacgtcaataattccgataccacgaatttcaattaaatgctgcaaaatttttggtggttctccaaccacggttaattcatcttgctgataaacatcgacgcgatcgtctgcgattagccgatgtccacgtttaataagctctaaagctgtttcacttttaccaataccgctatctccttgaatcaaaacaccaagtccataaacatcaactaaaactccgtggacacttgtccgaacagctaaacggccatctaaataactggatagttcccctagtaaacgggaagttgaaatcggtgaacgtaatacagaaacgccattttcttttgctgctgtaattaattcttcggggatttctagtcctctggatactataaaggctggagtatctttcgcacataaacggcgcatcactaataaacgctcttcaggcatcattcgttccgcaaaggtaatttctttgctcccaaataattgtaaacggtcatgggaataataattaraatacccagttaattctaaacctggccgggaaatttcaccagttttaattgttctatttaagctttcttcatctccgtatactacttctaaaganagattttctaccagt

SEQ ID NO: 125 - DNA, 4915 bp; double-stranded, linear
caacagtcccagatgataaggttctgctaccattacgaaactctacatcagtatatagtttatctgacactcgcataataatttggtgcggattttcagtaaagtaattatctgaatttgataccaattttgtaacatatgatttgttagcagttatataacctttggcagkcyttaatcyaggtaatccgttttcggtataatcaacactaaaacttgattaatgtatctttagaaacaaactcacttttttactgaaatttacatcttgataataataatcatttgttttcataactacatactctggataatcatatagataatctttgatgtttggcacaactttttgtgcataacttttattagccgttaaataaccattttgggtaatcaaacgaggaacttgattttcacggtactcgattcccacaacaggaactaaacttcccttggaaacagctgctcctttatataagaagtctgaatccccataaaaattatcactatttttcataataatttgccctggattaaccgtatgatagttagcaatccaagatccagtagctactacatagttcttgttagccgtgaaataatacccatttgccatcttcaatctaggaattcctgattttgttttctcaatagcagttacttttaaaacactgcctgcagatactttatttgcttttgtcttgaattctacatctttgtaataggtatcttcatttctagtaattacttgtccaggattagatgtgtagtaagtatcttctaatcctttatattgttcaactatatttttatttgcagtcaaatatcctttcgctgttttcaatcgaaatataccgctttgagtataagctaaatcttcaacttctactattgttcccttcgaaaccttagacaacctttgcttaaattctggatcagcatagaaataatcatcgcttttcaaacgaacttttttaggatttgtcgtaaaatacaaatcaatattgctttgtgccgctaatacataatctttatttgctgttaaataaccttggtctgtgaccaatcgaggaattcctgctgaactatattcaatccccttaatggtaactagtgtattttttttaactcgccaaccaggagttctaaacgctacatcttggtaaaaagtatcgtcatttttcatgatcactcgacctggattagttgtgtaatacttacttaagtcaggcccactactattacccatatttaaaaaattactataggtcwggaatatcaaacggacgcccttcataattagctaaaccagggaaatacatttgcgagaccattgccaagcacctggtcattatyccmctgcatggaactatctggagtatatggatattgcgctacccatactctgtctcttccgaaggcggaggtgtcgatatagccattkgttaaccaccatttgccaacatacaacgcatcatttttataccctaatgcctttaattgctggttaaacgcaacagaattagcatgcgtttcgcccattgtttgtaagcgttggatcttccgcatcattaaacattatggtatttttatctaagccagagttagccgccgcctgagcaaaatatcttgcttcatcttgtgtgtcgcagcagagacatacatactatagtgatatgctgaaacttttaagcccgcagctttggcatttctaatttggcccgcagcatatggattaacataccaagttccttctgtcaatttaaccgaaacacctgttacaccatagcttttaattttttgatattcagctactgaaatgtctccattccaactagaaacgtcaataaaattcttgccaggcaaattaggatcattcgcatagacgttcgcaactgttgctcgcgctaccctagaagaaaggccgtttttcatagcatatgttccttttttatggttcgttccttcacgtgctgcttcttgataatccgcttcatcttggtcaatggtctttttttctacttcagagctttgtgatgcttctgttttactatctgttgtgtttgtttctgaaacagaagaatgttcttccgttgtactatttgttgaagaatcaagagactcttcttttgtgcttgaagtagaactatctctttcagaggtattttcttctgtaacagaagatgtatcctccgttgaattagtcgttgtttctgacgtagcttgagtgaccaagccagtctcccccgttgtttctgtttttacaagctcttctcctgatgcaatcacactaaaactatttaataatacagtacaaattaacatacctgaaatgattttttcatgaaactctccttatatatttaataatatgtatctttcttaaacacttgccattcgctctcgaaaaatgtgtatcctataaccttcaactaattgttttcacattttaaaactaacaccaattattatctcatacctttatttcaaattcaattacgcttttttaacattcctatatcaattttttacttttaaatggtaaaaagatgaaaacagatctttaatcgattgttttcatcttttatttattttttaagatattctgtgtacgattttttagtatcaacaattagcgcttcatgatggggttggcgatcttcctctggtggcaattgcatataatccccaaaaacctctgttaagtagcgcttgtagcccactggtattggcatttttgtatcttcaaatggaacaaaaatagcagatttaaaatcttccaaatgataaatattacccatgtagcgtggtccgacacataattctgtaacataaggagtggagccgaaggaatacttagtcattcttttttcagcaaagcgccaaatatgatagcgaacctttttcgatggaaagatattcaataatacccgactccccgttgctaaaatgccaccatgtttttctggtaccacttgtgaacagaataaagcataaattaatgcccaaattttttgtttcttcctttgaaaatttccttttggcgcaccatctaaaggaaaaatatcgataggaataccatgaggaatcgctaatccatcttgataggttttaataaacgttgtctgtgcatccctaattgtcataaatgaattatgatcattataagtttttgaagcaactaacaatggataacattctgtatctgcatatttaggccaaagcactttcaatttttcataatctggtcttggcataaagaaatctaagtcatcatcccatggaataaaaccttgactgcggattgctccgatacaaccgcctccacaaaaataacaggttagattatgttcttcacaaaaagccacaaaatattttgacatgcgtaaaacgacttgttgaatttctactaattgcgtctgtgttgtttgttccacttttccttttcctccctattcattctttgcatatttaaatgttgtatagaataaaaaacgcattaagtagaatgaacttttaataactgaaaactgttcattttgacgcaaaattttccaaacccaactgattgtattccatttgttagaagatgtagaggtggttagcttacgataaatggctaatttttcgttaataaaatagaccgtatttatttctttcaaaatgtttaaccaagtagcatagtcttcatgttttaaatccggcattaaatggcgtttaagcagattagattcgactacgactgttaagcagccgatagtatttgtttttaaaagatcttgataggtttgtggtccctcactaaaattacgctcatgagtaatgttgccattttcattacatacaaaataagaactacatgtaaataaaagttttttttcttccatccacttgacttgaacttctaatttattaggaagccataaatcatcactatctaaaaaggcaatatattgtccctttgaagcttcaattcctttatttctggtctttgcaatgcccatgttctgttcatttttcagtaaaaagattcttgaatctttttccataaaggcaagygcaatatcaatagaatcatctttacttccatcatcaatgagtaataattcccaattctgataggtttgttccagaacgctttcaatagattttgataaaaatttgccagcattgtacatgggcataataattgaaacaagtgctgtttccatktgttcactcctcgttgcattttatgtaagaatgtaacagtttatattatcgcatagctcttttattatttcaacgttccttgtttccaaaaaaagtttgagacataagcttaaataacttatgtctcaaacttttaacggtaaattctaatagcattctctttacaataatccatcgtcaattcttcacgttcttcagactcatccaatcctcttgatgatactttatcaaagagaattttgatggtttgaagcagaattttcatatccaatagcawgaataattcttgatgtacagtaaatcaaagttcaatttactattgtagtcagaagcatacttcccataaacttgggcatagccagtaatccccgcacgtacattgtgacgtaaatagtaattcgggttttcctgattaaattgatcaacaaagaatggtcgttcaggacgtggtccgacaatggacatatccccgcgaataacattgattagttgtggcaactcatcaatacgtaaagcgcgcaagtatttaccaactgtagtgacgcgactgtcgttacttgtagataagactgggcctgattttgcttctgctgttgccgacatcgttctaaattttaaaatcgagaactcacgttgatctaatgtaatccgagtttgtttgtaaatcactggtcccggtgaggttgctttgactaaaatgcgc

SEQ ID NO: 126 - DNA, 3149 bp; double-stranded, linear
attaatgcaatagctgcccctacaagcgctactcctaataaaggtattttcatataaacagccattacaaaaccaataacaagataactaaaatattcttttgcaggtaaatatcgcagtagtaaccctataccgacagctggtagtaaacctccagcaacagttaatccattggttagccattctggagtatacgatagaattgtattaattaatgatggaccgaaaattactgccaatgctactggtatgcctgttgttgctgctgttaaaaacacgccaaacatttgcattttggtaatcatactataatcaccttttttcacacctgcttcagctttgtgaaccatccagatacctatggtatttctgataacatctagttggaccatcaataaagctactggtataccaatagagattcctacagatggtttttgcccagtagtaattgtaataaaagttgctacgatacttgctgtttgatagtcaggtattgaagctcctcccaaaattacttattcccaaagatagtaactgtaaagtaccaccgataaataaacctgttgatatatcmcctaggattaatcctgtaacaaaacccgctgnttaccggttgataagttccaaacattgttgagtttttttcaaagttaataaaaaatccatacagcacaattaatactaattgaaaaatacttgcttccattaattttcctccttaattacatcaaataattttgaaaatttacctttttcacttgttttgataaaaatcgggatttgttgaatgtctgcttcgactaccactgtttttccaccatcaaagttttctcttgtccataggtttgtccaactttcaccttttggtaaataaacttctcgactagtctctttataattttcaataggcgcaacaagaatcgcatctccaaataaataggtatcttcaatattccaagcattctgatcatgtggatattcataaaataatgttctcataagtggatcaccaaactcatgggcctgtctcatcaacttactaatataaggcttcaattcttctcgtatttttatatatttcgttagtatttgttcgacttctttaccataagaccaaatttcatttggagctccggtaaccattgatcctcctccatgatcagataatggtttgctgtgtggtaagcgatcaccatgcattcgtaaaataggcgaaaatgttgcatattggaaccagcggactagtaattctctaaactcaggatctttaggatctcctccatgaaatcctccaatatctgttgtccaccaaggtaacccagccaacccaacgtttaatccagtatttacttgattacgaaaagcttcaaagctagaatcaatatctcctgaccataacaaagctccatagcgttgtgcccctgcccatccacctcttacaagtgtaacaactgattgattatttcctaaaccttcagaaatcattgataaataatcgattggatacaaattcccaatttgtaaatcggttccttttttatatcgataattatcgaaatcatatacagaatacccaggctcagctacatctagccaaaaatatttaactcctttgttaacataattctttttaatgaggttccaaacatattctcgtgctttctcattagtcatatcaacaaaaattgtatttccttgaatttgcattgttaatctaacgccacgatttactttcactaagtaaccattttctagatattcattaaaattcattgcatcagtttgtacagtaggccatatggaaataattggctctacattatattcatctcttaatgtcttaaaaattgttcaggttgaggccaatatnctcatcaaatcgatattcaccttgtttaggccaatggaaatagtcaatagctatagttgaaagttttattcccaaagcatagtatttttttacaacatccattacttcatttggagatcgatagcgtagtttactttgccataatcccaataagttttcaggcattttaggaactttaccagttaaatcactataatttcgaagtatctcttttggggtatcacctgcaattactacatagtcaatataattagtagaagccattttccatcgagtcatgtttttagcaaatgatacctctcctatacctggattattccataaaaatccatatcctaaactcgatacatagaatggtatagatacttgtgagtttctttgagctaattctagaactgtattcttcaaatcaagataagattgttgatattgtcccattccaaaaatcttctcacttgattcagattcaaatctagttgtaacctgaaaaccaccttgtaaattagagtggtattctctagacttcaacttcagcgttgaattaaaatctttagttatttcaattgtacctgcatcttcacttccgtcatcatgtttgacagctctcaatctgataaactcttttaatagcacttcatttttttcattataaaaagtcaatcggtcccgatggtctaacacaactctaattttcccgtttattaattctgtcttattttcgtcttgatttattatgactgtacctaaagcatcaggctcaccaattaaagaattaagtctattttcaaagttcatatctacaaacgatctgactctaacggcattttcaccccaagcttctacaatcaataattcatcatcaaaagttctccgaaaaagattttggtgtaacttcaatcacatcttccaacccactttcaatttcttcttaattagtttggtatatgataacaatactaagtaatcgcaacaatacaaacgctttccatacgcacgccttttgctctctctgtgtcmacaaaaggttatagattaatttgttttcmcgataaactaattaactaaaaaaataaacataagataataagcatcaatgacttgaaatttattcgttagcacgttaaactaattaataaatagactataaaacaggctcagtaaaatgtcaactgtaaacggctatattttttttggataaattaattggctttaggcaatagggaatcttaaccttaattncactaatttattcnaatttaggggggaaatggtttcc

SEQ ID NO: 127 - DNA, 7019 bp; double-stranded, linear
attcccckgcttcytttyccataaaaatacycttttctagatattttaaagcattttatrgaaacgtttcaccaaaatatgaacatctttttcttaaaaataattctgttaaataacagaaaaaagtctggtcaatccgaccagactttttaaatatagatagtaaaatgtgtaatttcagggatcaccccaaaacgggcatgaatggcggtcgttcctaagcctgtattaacatatagttgcgtttctkggtccaactgatacaatcctctggtatacttttctgctaaaacatttgtgattggataaaaaggaatccaaatttgtccgccatggctatgtcctgctaaaactaactgtgtacccgtaccaacaaatgcatccgcgacatctggttcatgggtcattaataacgcatagtcatacgtttctcgataggataatgtttctgaaacggaaggatttcccaataacgagtcatctaaaccaccaataaaaagacggcgtccatctgctaaggttactgtttctccttggtttttcataacggtaaagccactggcctccatgacttcrncatacaccgcagaagcaccgccaccataatcatgatttccccaaactgcatattttccaattgtcgcttgtaactgttttaacttttcaatcatcggttctttttgttgcggatttttggcataattgtcaaataaatcacctgtaaaaacgataatatctggtttttcacgattgactttttttatgactttatctaaccgcttcgtctcataaaattctgaaacttgtatatccgaaagttgcacaacattcaatggttctcgttgatttttctttcccaaagtcacctggattaacgtgaactaaattcggctcaatcttccacgcatagattgggagtgcgataattaagaaaaaaaataagagcattatacttaaaccaatttttttaaccacatcactcgctcctttcttttctttgatttccgaagacttagtatagagaaaaatcttcttaaccacaatctaaaacaaaggaaattaaggctttgttaaacaacctaaagaatttccacaatctcttatccttttcttagcttttttataaaaaaagctagataatttcatctgtcgatgaaattatctagctagaacattcttctcttaatgatgatgttttcgaaacgtttgataaccaattaagcaaaataaaatccccaataaaatcattccagttactgaaaataagcctgctaacatctttcgcatcctctctgttgctaatcttccttatttatagtcactatttcttgttgtaaaattggttgaaatagacgacgttctgctaattttcttgctaaaattgcttcactttttttcgtaaagatacctaagttatggcgcttgcctttcaaagagatataagccagccatttcccagaagcggtctggctcacccctttgtgtccactgctattatttttggggcgtttactttgtaacttccctggaattacgccagcaactctttgtcggtaatccttctttttacgatgaccgcaacttttggtatggccattcaacaaattttcacagcgaacccagcaagattgtccgcacgaacacagacaatacgctttcattgtctgttgaatactttcaatccgtaccacgactaattcatgatagttttttttcaacattgtttgatagcggtggtgagcacatttcgttcgatacccacgaattagttgtcttcttgaagcttctgcatagctcccacaagaacagcgacaggcccaaacaatcagcccttcttttctttttgccgttggtgctactactgtcaactcaccaaacttttggccagttaaatctttatagttacctgcttgtctcaattgactatccttcgtattcttgttctcgccacatctcgattgggtctctctcatagtgctcatttttctgagtctctccctttcttagttctctgaccacctcagcaaatacttgccaatcttttgtttccggcaaatgacgccatgtcaattgacgacaccgtactttcgaactataaaaatcggacaaatacaaatcggtttctaaggttaatttgtgatcaatcatgacatccatataattgaaagaagcaataatttttgcaataaagcggttataatcctccccaccagaaaaatcaacaaatacatgaatcgttttttcaattgcgcaaaaagaccgatcatttaacaaacaaaacataaaatcatagtatagatgcacgcgttcatacattaaaaatcgtttttgatacagcgactctgtcttttgtataaaaccatctaaggcgcgatgaatttgaggaaaccgctcttcaaagaaactgctctgcttggcgggaataaatgcagccaccgaaaagtataggcggtcccagcgataacaaatcaactttaatttttcttttgtttccaccgtaattcgcttttcaaagaaaggaataacactattcatatgatcaataaattcgtctaacatggttaacttatctggaaaaacaatcggactatcaatgtattcatttaaacttaaaaaaagaaaaatatatgaagtctctttgccaaaatcctctttaaaaagaggggtttcgcttgtataaattttttcaaacgcatgctgtaaacagctaggcacatgaacttccgtaaaagagtccactacatgatcagaaaatacacgaaaacgttggatcgttaaaagaataaatagttgtgcgctttgattaagactaaacgttctttgatacatcagttgtaaatcgtttataaatcgtttaatgccaggactattttccagcaaaatgttaggcagcctttcttgattacttccataaaaataatacaagcattgaaaacaaaaacttcggatatttttctcttctccaaccaagcctgttgactttaatttaatatgccaattagctaaaatcagatttagtttatacgagaaggcataaattttgcttttgctcataaaatgaatttgagaaaattcttgaatcgtgtgcttttgatagaggcccacatcaagaagcaacttggccattagtgattgatcaaaataatattttcttaaggcttgataatcaatttgcgataatttttgcgcactaatcagtcctttagctggaaaaagaatttgactccttgaagaaatctgtgtacattcataatttatttgacggcacaacgattctaacttttgagtggataaatcaaaatatccataaaattcttcttttaataatggaccttcactattcataaaagtttgataaataagtaatttatctcggaattcttggtctaataattcatctaacaaagtagtcacattttcaactccaaactatcacgccttaagtatctatttttttaacaagacgtgagtgtcaatcttgcttattttttccacaaatttaaaaatgattctttcaatatttaggaatcttcatagaaaagtattattttaaccaaaaaaagcccccttgcgtcaccaaggaggctttttttgttatttttttactttaaatttaaagaaaagctgatttgtttgactaattttctgtttcttttctagcctattcgtcaaaaatgattgaaacttttggttcgtcttctatactatcttcctataaagttcttactcttttaagtatcagcttctgtcaataaaagtcctcatttggcattgctaatctgaatacagtatgactacttgttgccgctattttttgctgttattttactctttaattgaagcgctagaaacgctgtcaactgttggcttttcggtcgctgactcttcttcatggactgatgcacttgagacactatctgccgtttctggcgcttcttttttggaggcaccactgactgcatcgacgttttttccaccgactaattcttgcccagtttgttttaaataccaatcaacaattggtttaaagtctaaaatatactcattaattcccgcgtaatttccattatcatcatacatcgcttgatagttatgcactacataggtatctggtccgtgcattggaacatgaacgcgaatagcatctgtttttcctgaccgtaattgttgaatcacccattctacatttttcaatgcttttggcggatggcaattcgctaatggattaccaacttgtcctggttgccgtttagcaaacatttcttcagcagccatttttttattgtaatataaaaattgattgttactgtctgcataagtcaattccattggcattgattttaagaaataatttagctgatctacggttaaaatgcctcgatctaattttacatatgtgtcgccttccacagcctgaaccgcttctgctgcttgttctacccaatcatctgctgccatatcaaccccttcgatcgttgtttcaatggttccttttgcatgtaaatcctcaggtaagtcttttggcttagctccttctaattttgaaatcacatcaatgaattccacgaatttttgtaatgtgctttctaaaaattgacgtgttccctccgcaattaagttgccgttttcatcaaatgcttctttagctttccctaataaaaactcgttcccaggcatcacgattgcattgacaccaggtgcatcaagaatttgacggagatgtaattgcgcacgcgaggttccttgatcataataagagcaaccaacaatcattactggtttattttccagcggatgaattttgaatgataaccattctaacacacttttcaaaccggcaggaatggtatggttatgttcgggcgtcgcaataattacgccgtctgcttgtaaaattttgcgattcatattctgaatcaagacactgttcgtttgatccttactttgattaaacattggaatatctttaatttctaaaatttccaagtcgaacattttataaaactctttgccaatatattgcagtagtaaccgattataagaagaatcagcgtttgatccgacgatcccaattaatttcattttattcactccatttcgttaaatcgtttcccatgagaaattttctgcttcttttttattttgcgcatgcgcatgtttcagctgttctgtaatttcaataaatacacaaaaatctgcaaacagaccagctagtttatctatttgttctgaatcttttaacgcattgttttcatcaaaagcttgtaaggaatgcgctaatagaaattcagagcttggcataattcgtgctttcaattcaggagcatctaaaatttgacgcagatgcgcttgtgctctagaggaacctaacgtgccataggatgcaccagtaatcataactggtttatcaacaaacggaaaaatcccgtaagataaccaacttagggcattcatcaaagaagccggcaccgcatggtcatattcaggcgtactgataatgacgccatctgctgcttcaattttttcagcaaccgttttaactatttctggcaaaactttgtcttctggcttgttaaacataggaaagtcaacaatttcaactagttcaatatcagcctcctgcgcaaaatagtgttgcataaattgcaaaagttgacgattggttgattgctctgagttcgttcctactaagccgataatttttttcataatgagctgtcctttctttttcggttctatgaatggataatgtgaagagtatctgctaacccgctgctatataaaatttgctggtcttgtgtaatgatgactccttcaatcccatctagttgattgaggatttcaagcgcttctggaattggataaccaaataaacgcgttgtccaaatctcaccatccactgaagcatccgagataattgtgaggctggccatttcagtttccaatgggtaaccggttgtcggatccaacagatggtgatagactcgcccagcttcggttaaacttctttcataaatgcccgacgtcacaaccgattgattagccacttcgacaagtaagctgattgtttctctggattcttgcggattgcgaataccaattcgccattttttgttttgatgcgtagagggccccaacgtcacaatattgccgcccagattaatcaaagcagacgtcacatggacttctttcaaataggcaattagtaaatcagcgatatagccttttgctaaagcccccagatctaatttcattccttcttcttccaaaaaaaccgtttgttttaagggatttaagtgaatcttttctggattaatttttttcaaacaggctttaatttcctcttctgacgggacacgggcatctttaaaaccgattcgccatgtttgaactaacgggccaatggtaacattcaaatgactagctggatcacaactatgttttttccctaatgcaattaattgatacaactctggatgaacgctgactggtttttgcccagcttgttgattgacagccatcagttccgaagttgaatcatttgcactaaagcgttgttcataagtgatcaatcgttgatgcacttcttctagaattttttcagattcttcatggtctacaaatacatctattactgtgcccatcaaataaatagtttgactttgttgcacctcaagacttcctctccacgaaagattgtgttttatttcacatttattcacaaatgaatcatacgcctttatttgatgccagtcaagtcgtttatatatttttttatataaaataacgaccttaaaattttcatttaaggtcgtaacttgtcttgaactcttttaaaaaacgctttttttattatattttgaaaataaatatataattttctatataaactaatttcccttagataaaattgtttctttcaatgtttgaattgcttccaacaagatgcgatttttattgatttttgcatacgcgcgggcatcttgtagtagttctaaaatttgctcttgcggcttttc

SEQ ID NO: 128 - DNA, 32768 bp; double-stranded, linear
tatttattcttttaacgaaacacacaatgaaggtaaagagactcttggtggtaaaggggcaaacttggcagaaatgacacgcttaggtttgccgattccacaaggattcacgattacaacccgttgctgtatggactatttggcagatgctactttctttgaagaacacttacaatcagaaattttgaaagcggttaaaaatctagaaactgaaacaggcaaatcttttaccgcggacaatgagattctcttagtttccgttcgcagcggtgctgccttctcgatgcctggtatgatggatactattttaaatttaggtttaaatgatcaacgtgtgaaaaaatttgcgaccttaacctctcctggttttgcttttgactgttatcgccgacttattcaaatgtttggagacgtcgtctatcacattcccaaagaattatttgaccaacaaaaagagcgcttggaacaagagctcaacaaaaaaattaccgcttttcaagaagaagatcattttgccttgattgtccgctaccaagaagtttttgaacaacatcaggtggtcttcccgcaagaccctgtcgcacaactttttgaagcaatcaaagctgtttttgattcatggaataatcaacgtgcggtggtttatcgaaacttacatcatattgcacatgatttaggtacagctgtcaacattcaagaaatggttttcggcaatcgtggactagacagtggcactggcgttgttttcactagaaatccggtcacaggggaaaatcaactgtttggagagtttcttttgaacgcgcaaggagaagatgtagtggctggtattcggacgccagaacccattcgtcgtttacgtttgactatgccaaaagtttatcaagattttcgccattacgcagaacttttagaatatcattatcgtgacatgcaagatattgaatttaccattgaaaatgaaaaattatatattttacaaacaagaaacgggaaacgaaccgccgcagctacggttaaaattgctttagacttagccaaagaaaatcgcattactaaacaagaagcactgttacgtgtgacacctgatacgattgatcaattaattcatcccgtgtttgatcaagagaaacgacaacacatggaacgtttagctatgggacttcctgctagtcctggtgcagcaagtggccaaattgtttttacagcagaaaaagccaaagaactgaccaatctaggaaagaaagtcattcttgttcgtcaagaaacttcaccagaagatattgaaggcatggttgtaagcgaacaattgtgaccagtcgtggcggaatgacttctcatgccgctgtggtcgcacgaggaatgggaacttgctgtgtgactggttgtgaaagtttaaccgtcaatgaagaaaccaaacaactacactgcgggccacaggtcatcttagaaggaacaatcatttccgtcgatggctcaacgggggaaatttatcttggcgaaattcctacaatttctgctgataataacgatgmccttcargagctcttgtcttgggcagatgcgtacgctgatttactgttcgtgccaatgcagaaactacacaagatttagagactgctatccgttttggcgcagcggggattggtttagcgcgaacagagcatatgtttttcggtgaagagcgtgtcttggaaatgcgtcgcctgattttagcagagtctgaaaaggaagcaacctatgcgttggaacaacttcttcattttcaacaggaagacttttatcaaatgctgaaagtagttcaagacaagcccatggtggtccgcttgttagatccgccgatgcatgagtttttacctcatgaaaagaatgatattcaattattggcgaagcaactacaacggttcccggtgaccatcgccaaacaaattgaacggttacaagaaaccaatccaatgttgggtcatcgtggttgtcgcttaggtgtgacccaaccacaaatatacaaaatgcaagttacagccttatttactagtgccattcgattagtcaaagaaggaattactgtttatccagaagtgatgattcctctaatcgccgaaaaagaagaacttctctatctcaaacgcattttaaaagaaacgattgacggtctctttgaagaacataaaatgactcctttcccttacgaaattgggacaatgattgaactacctagagcttgtctgattgcggatcagttagcagaagaagcagactttttcagctttgggacaaatgatttaacacaaatgacctatggtttttctcgtgatgatatcggtaaattcattaatacgtatcgggaaaagaaaatcattacccaagatccgtttcaatcattagatcaaacaggtgttggtcaattgattcaattagctgtagagaaagcgcgtcgcactaaaccaaacatgagtattggcgtatgtggagaagtcggtggtgatccgcaatccatcacatttttccaaacacttggcctaaactacatctcttgctcaccttatcgggtacctattgcgaaactcgcagctgcccaagccaaaattttaaccgaaccggctgtgactgaagaacaaatggtccttctttaatttaacgtgtgtaacaaatgattcatccttacaagataaaaagtgctaggracatcagtcgaaacgcttgatgttcctagcactaaattttaagatcaatgattgtactctggttattttcttataaacgcggcatcttttgtcaaggggtctgttacatctgatacatatctttctactttcatatgcaaatcatatttttctctaagttccgtaatacgggtcatcattggagaagcgtggtgtttgtctaatgcttcctgatctgtccaactatcaatcagcagaactgtttcttcatcgtccattggaaaaaagtattcatagcgactattccctttttctgcacgaatcgcctctacaattccgctggcaatcatttctttggcaaattctcttgcacctccatttgtcccactataataaatatttatagtaatcgccatctgtcttcccccctaaatttacttgcctttttacgttcccgactggaattgaaccagcgacctaccgcttaggaggcggtkgctctatcctactgagctacgagaacaatctgttttaattttagaagtcttcactacatctgtcaatagacaaaaagaaagtatcccgcataaacaattatgcgagatactttctttcagtgaaacacgtcgttcgtttatctattattttttttgccgccgatcaagaatcatttttcctaaataataaagtcctgtcgcaatagctatatattgcccaattttattattgcgtgcaactttttcttgtttcgttttcgccattgtccccatcacctttctaaaataattctttttacatttttattatagtaggttctgtcattttttgcgaataaacacacttttaaaaataatcttctaaaattggcatgcctttgactaaacgttggcctaaacgttgagctatcgttgcgtctccttgcaagcgttcataaaaagataacgtctctgctgaacgatagcccaagaatagttgcgtccacgtttggatatctgctttcaaagcagcagtcccttctttttccgcagcacctttagtcactgttgcttttccttgttcgtcaattgtgattgtccaaatgccttcattccatggcccataggaatcttcaatctctaaagaatacgtttctttttctcctgattgaaatggatacttttccagaaatgtttgtaactcaacgattcgtgccatcatgtaaggtaaaatttttacagaagctgctggcgttggcattaaatcatttaaatcttttccagcaaaaccattaatccaatggaacgattgaacggaaccactatgtgagccaataaacccagctaaagctttaaaagctgtattagttaaatagttccattctacgatttcaaaggtgccagcagctatccgataaatcacatagccttctgctttcccttctgacgaataataaatcgcttgattatttggtttacttgcacgattcagcgtataatccagccaccaagtttcacggatcacaccaccagagtgcgctctttgattttcaaggtatacgtctttaatgacctctttaccgtcagcccaagaaactcgtttaatggtacctggaactcgtttaacacgtggccaatcttccgttttaattgtatactctgcttgttcaaatgtttgttcatagccatattgacgataaaatggatatgaaaacggtgctaagtaagaaagggcaaccttttgtttcgctaaatcagccaacatttctttcataatagcagagatgccgccttcaccacgatattctggataagaagccacatagccaattccagccatgggatagcggacaccatggaaattcacttgaaaaggtgtcgccatcacttgacttgttaattgctcatcaattaggaagccatagctttgcgtatgtgacaacaatttttcaaaacgttcttgcgttccgccgtgggttcctgattaaaagcatagataacaagatcaaacatctctttcatttcttctttgcccatttttttgactcttttagttgtcattttctttcctcstcgcacattgtatcaattcattttatcacagaaacgattctctttctaaaagccgttatttgctgtcatttctttgaaccaacgaccgcttttcttaatggtccgtttcgcatcatcatctaaatccacagcgatgaagccataacgatttttataggcattgagccaagaccagttatccatacacgtccacatatgatatccttgaacattactaccttcttgaatcgcttggtgcacccatttcaagtgatcttgcacgaattcaatccgataatcatcttcaatgactccttgttcattgacaaagcgttcttctccttctacgcccatgccattttctgaaatgtagcagcgaatgttgccataattttcttttaaattcattaatgtatcataaatacctttttcgtagatttcccagccacggtaaggattcatttttttgccaggcatatcgtagacatcataaaaatcttctggaagtaagccttctggtcgtgtttcaacaggtgtttcttttgctttggcacgacgtggttgatagtagtttactcctaataagtccacagtattttcagcaattattgctaaatcttctggcgttgtttctggcaataagtcatttgctttcgcccaagcaaccatatcttctggaaaatgacctttaacagccgggtctaaaaacgaacggttaaagaaaccatcgacaaatttagccgcatttacatcggcttcgttgtgctcatcacgaggataagtcggcgttaagtttaaaataatgccaatttcacctgataagttcatagagtgatagacggcaatcgctttggcactagctaaagcttcatgatagagtacttgaatcccttcttttagattcactttatcaggataatgccagccatagagataaccaccttcaactggtacaattggttcattgtgcgtaaaccattttttcacgcgatcgccaaacaattcaaaacaggttttggcaaagtcaacatacaaatcaactacttcacggctttcccaaccgcctttttcttgaagtaccatcggcatatcaaaatgatacaagttcataaagggctcaatcccgtgttctaataaatcatcaatgacttgattataaaaatcaactgctgtttgattgactttccctgttgtaggatctggaattaaacggctccattgaatggatgttcgaaaagagttatgtcccgtttctttcattaactgaatatcttcttggtattttttataaaattgtgaggtcttatctggaccgacttgttgaaaaaatttttctggcgcttcttgataccaaaaatcccaaatattttgacctttaccatcaccttcaaaaacgccttctgtttgaggaccgctggctgcagaaccccaccaaaaattttctggaaattgatatttcatgttatttgctcctttacgatttaatcattaaaaaaaggattgaaccctccgtaagagtccggacgattcaatccttcgattttttactcggctgcttctgcggctgcttcttgtttcaagtattgatctgttgctacttttacgaaaggcatgtagatcaaaatagaaatcaataagttaacagctgctaaaactccgccggcgatactcttcgttgctaaaaatccgccaataattggtggtgttacccaaggtggcataaaggttgcagctggtactaaaccagttgctgtcgccacatacgcaacagttacaagaaccattgggactaaaatgaatgggataaacataattgggtttaaaacaattggtaaaccgaacatgactggttcattaatattaaatagtcctggtgctaaacttaagtttgtaatgactttgtatggtttgttacgacgacctacgataaagatagcaattaacagacctaatgttgcccctgttccacctaagtttacaaatgaatcaaagaaaggtttgtttacaatataaggaattgctttacctgcttctaaagctttaatgttcgcatcaatcgctggtacgttgattgtttgcattaatgggtcaaccatgttggcaccatgtaaaccaaagaaccataagaatggtgtaatgaaagctaacaataatgctgatgggtagctgtttgcaagtcccmtaaatggttgttgaactgcttcatagaatgaaataacgatattgtcaattcctaaagcaaatagaattgatgtaattaaactaaataaactgatkgtaatcattgctggtaataatgccgcaaatgattttgctactgctggtggtacaccatcaggcattttgataactaatttaggattgccagataaacgttggaatagttctcctgaaataagtgcaataatcaaagcaataaataatccagttgcgcccatgccttctaagccgccaactgcgaagaatgaagctacagaaactgtaccggctgcaatgccgtcttttccataagatttaactaaattgtgtgctactaaaaaggctactaaaacggcaaagattgcgaatgtaccgttccaaatgttaccaccaaagcttttccaaattggtgcatcgttatacatcattgggaaaattttgtttaaaaagtcctcatatcctggaattggaatattattaattaataccgccaaagcccctaaaatcattaatggcatcgttacgacaaacgcgtcacgaattgctaccaagtgccgttgcgctgcgataactgacgctttcggcataaagtgtttctccatccattgaacaaatccgtccattgttattcctcctaattaacgctttctcaagcgcgtttttcttataagacgcattgacaacgagattactcgttatcaatacggcgataaagatcgataatttcttttgctaaatctgtaaatgcaatcgcagtcattaaatgatcttgactgtgcactgttaacaatgttacttgcatgttattgccttttgcttcttctgttaacattcctgtttgcgaatgatgtgcatgtacaagtgattcttctgcatctgcaatttttttgtctgctaattcaaaatcccccgattttgctgcggcaatcgcttccattgcatcgcttttagcatttccgccatacatgattaaacccatgattgcttctaagttctgttgtccgtccattacctctaccccattttctgctctagtttgatgatcccattaatgaaattgcttgatctaaaactttttcgccattcatcatgccatagtccgccatgttaattacatctaaaggaatcccttttggttgtaatttttgttcaaattgccctttcatgaaacgaacttgtgggcctaataataaaacattcacctctttattttccaagtttgtatctgcttcagaagccgatactgcaaagatgtctgcttccataccacgatcttctgctgctttttgcatttttgttactaataaacttgtgctcattctgcggaacaaactaacataattgttttttttgccattttccttcatctcctaaattctctttgttttgctttacacctttatataagcaagaagcgtgccaagttttaacacattaaaaaccttgatatgacaacgtttcttgatatagaaagcgtgtacacactaaaaataaaacgattacacacagcttttttgtgtgcgtttccaaaataatagggcaacaaaagaaagtgagcgataacccgaaacgactcatcgctcactttctaaagctgaagagaatcaactggacaaaagccgctttttccctttaagcagtttccatcattttaagcattttataaaactgtttctttttaaaataacttaaaaagatacctaatactgcatcattcagtttttgtaacgccccataagaaaccattgtttctgtataacgcagttcacagcttttttcatcaattggctgtagctcataccgcaccgagaaatcatttttagttgtggatgttcgaaattgataggtcttattttctacagcttcttcaataactattttcgcgcgactatttttactatattctttgatatattcaaacttacgtaactgctttcttgtaagagttttgcctgtttgcttacggatatcaaaaataacagaattcattaattgcgtgtaaaattcatctgctgaaatagttaatgttttcgtaatttccattaccgtttcacctcatcctttgtcgcctcttcttcagcaactttttttcctttaaaaaacaggtaaccaccaagtccaatgagaaaaatccccgttgtcagacttaataaatcatagtttaaggagctgggattcaacgaatacaaaacaatcaagaagccaatactacataaaaataatccatttctaatcattttcatccatcctatctttttagactaccgttgcttggaagtataaaacgccaccccaaggttgttccttaatcagctgttttgcaacttgtgcagcagtttcagggtctccttcaacttcaaaaaataacttaataccatttttttctttaaaagtaaatgtttcattttccccttgatatgcctctaataaagtaataatttcctcttgcttcattgcacttgcaatcgaaatcatgccgctcgctcctttctatacaagtaattgctgtttttattgcttattgctctctttcgcctaatgcaggatccattttgttagcagcgataacaaacggtgtccaaatcaagaaagtgactaccatacataccaacgctacgattggtgcgcgccagtcggcacctgtcgctaagaaagataatagcaacggcggtgtcacccatgcgacttgttgagaaactggggcgactagcccaagatacgttgcaacccagccaattgtagtagcaactaatggcgcaattacaaatggaataaacataattggattcagaacaactggtaaaccaaacataatcggttcattgatattaaagatcccaggccctaatgataatttaccaactgttaaataatctgctcgtttggagaataacaagattgcaataattaggacgattgtaccgcctgaaccaccaaaccaagcaaaagcatcaaacgaaccacggacccacatgtaggctttaccgtcgtcaatagcggctaaaaccgcagctgttcctgtttttccttcataacctttttggaaaatatcaatattgattaattgtgcttgtccccaaattccttcaagaactggtgccaaaacgtttggcccatgaataccaaagaaccagaaaatttgaacaaaaaccgttacgattaacacagcgcctagtccttgtgataacccaaggaacggttccgcgatatatttttgaattaagtcaattaataattgaccgcctgaaagttttgacaccgtaaagttaataattgctacgacatacaatgcgattgttgctggtaaaattgccgcaaacgcttttgaaactgctggtggtacagaatcaggcatttttattgttaaatccgcttgcattaatttacaaaaaataatggttgataaagcgcccataatcatcaccgtaaagaaagcgttaccatttagatggttgagatttaaccaaccccatggattgacagtcaattgattattagcaattgacgcaccaatttctgccccattaattgcgttggcaatcttttctggcacttttacagctaattcagctgtgttatttggtgcaaaagcaacacctgaaattaaggtagctaaactgacaatcccaccagctagctcattcacattgtatgctttcgctaagttatagccccaagaaaaagcgaaaatcaaaccagcgatasccaatgtaccattccaaacaaaaccattaatcccaatgatgacattcaatactgcaaaaatacctttgtctgcttccaaacttgccgcataagttgagacaaactcttggggaagatctcgaataattgcgttaatcattacggcgactgatccagccattgtcgcaggtaatgtaccaataaaagcatcccttagtgccaccagatgtttctgtgcaccaatttttgcggcagttggtaagatatatttttccatccatgccattaatccgttcatttttattcctcctgtatccatttatatttattaaaaaggcagtagcctcattaaacgaatgaatcgagcgtacaaaacaaaacctttggtaacatgcactatccttatttgctattcacttttcctaaacgttttaattccttatcccattaatgagattgcttgatctaaaactttttcgccattcatcatgccataatctgccatgttaattacatctaaaggaatcccttttggttgtaatttttgttcaaattgccctttcatgaaacgaacttgtggacctaaaagtaaaacattcacctctttattttccaagtttgtatctgcttcagaagccgatactgcaaagatgtctgcttccatgccacgatcttctgctgctttttgcatttttgttactaataaactcgtgctcattcctgcggaacaaactaacataattgttttttttgccattttttcttcatccccttaaaagttatgacgttatacactttatttatagcaataattgtgccaagttttttcctcactaaaatactgatataacagcttttgtcatcgaaaaatgcgtgcacacactaaaagaaaacgcttacacacatgaaattgtgtgtaacttacaaaaagaaaacatcaagaaaaaagagagcgttttctcatttcttgatgttttttttatttattattgtttacttttaatttcattttctaaaaacatttgggtaacatgcgcaacttccgcttctggaatcgtcacacgatacgcccgttcaattaacataaaattcgtgcgtacgacatcgatttctaaacgatgtgttttaacatattccgctaagtttggaaaatttcttgtttcttctcctttaattaaagcatctaccagaaaagccaaatgaatcatgattccggcatccacccctggttcaacaataatatgcatgtctgtttgtatttgatgaactgttttttgtaacatgagaattaatttttgtaaggagtccacagaagtaatgacgccacttagtgaatgaacaattgtatcaatcgccacttcatcactagcaatccgtttcagtacatttaatttttcatcatcaaaaatatcatagacggaaaagaagggaatattttgatattcaacatccacagttcccgcaatggccttaatttcatattcttccatcaagttgtcgatatgttttttaaatgtttctcgttcaataaattgcatttgaatcagttccacttttgtttcatcaataactggtaagattcgttggtatagttttgcggcaaccccttctccagtaaagcacgtcacgattactgctttttttacgttttgacgtttttgcagactagaacgaaattgttctctcacaacgctttcaaaagaaagttgaatattttggtaaatgtcctctaaacttcgtcccacgcttgccattcgaatagcttctaagacaatcattgtgctcgtcattgtaatcgcctttgttcggatacctgtttcttcaaacaacatatttccaaacgaatttaatgaacccatatccgtcagtaataraatcccattatttaacgattctttttgcgtaattacttggtttcgtaattgttcatacattgtttgaacttccatcgttaacggcatattcatcgctgttccgattgacgttcctaaaagttcttgggcggttttcaacatacttgaggcagtagaatccccatgcattaagacgaacacaccaacattattttctggagttctttcttctttaccgacattaatagataaaaacatactaataaagccaatttcatcgaaaggaatctctatgttgttctcttcttcaataatagaagataaatctaaggctacttgaaattcttttttcatatttttacggacattatttaaatcaggatggacaatcacgtgaccttctttgacacgttcaatcgtactttgtaaatgaagcgcaaaggcaaagcgcgcagtttcgttgtacgtgtgttccaaacgctcttctgcgatatcataaagacgattcgttaagtcccaaatagcgtctggtaataactccttatgtaaagaatgttgggttaattcntcgacataatttttaaaatacgcattcatatctttggaaatcaattcttctaaatcaacattttctaagtcagcttcggacaagtcagcgactttttctycgatttcattgtaaacttgcatgtctctagctggatcttgtgaccaaacaattttgttggtgcctggctggaaagataaataattacttttactatcgacaaattgatccaagcgctcaggtacttctttaatttttaataatcctttttggacaggtaacgacaaatcccgtttacggataaccaaatgttctaaattgtgcgtccgataataaaggaatgacttagcacaaactaattttaagtcccgcttcacctgaccaatatttccttctgcatcgtataacataaaagccaaaactgcttcgcgttcgatatcaatttgttggcccaaacgtgttgcctcttgctgaataaataacgaaatgatggcataacgctcatctagcgtccgtgcatctaaagatggtaatgtaatcgacatcggaatccgccgattaaaagtggttaaaaagttttctgaggattccgttgtcgcaccaataatttgaacagaggcttcataggtttgaccactttctcctaatggacggtacacgcctttatcaataaacgtaaagagcatttcttgaccttctggcggtaagcgatgaatttcatctaaaaagagaatcccgccatctgcttttgccattaagcctggactatcttcattcgcaccagtataggcacctttttttacgccaaagatatgaccaaataataattgtgggttttgtgcataatcagcacaattaaaagagacaaaaggggcatcttcatctaaggtttttgaatcaatggcaaaacggtacatacattcagcaaaaagagatttccctgttcctgttttcccaaaaataatcgtatgcaaacctcttggtggatataaaatagccgccttagcctgctgaatactcacttttaaagaatcattggcacctactaatgtgtcaaaactaacagaggtggactcatctacatggacttgttctccttcattgattgttggcactgaatagataacaggacgtccagtacttctagtaattttcttttctttgaataattcatttaaataacggctggcattactgcgatcaatcattaactgttctgctaccgctcctgccgttaagccagtttcatttttttgaagtaacgctaagatttcttccttccgagatttcatggaatcctcctcgatacaacgttctgcttgargctcgtaaagcgttatttcttcgctttacgagcycctttgtttttcgtgtttttctttttgtttttcttctttytgcgtgtttcttgtggttctttgacaacagaatttactgtttctggttttctttctttcgtactctttttttctgaatacgtatctttgactacgttctttttttctagttcatctttggcttttggctgttcatgaagtgcaccatcatataaaaagatttcctgataaggaatggccaattgtttcatcaaacgttgataatcccttttggtgccatcgttgataaacgtaatcactgccccttgtgcacccatccggccaacgcgaccagaacgatgaatatagctctcttcggttaaaggaacatctacgtttacgacgtaagggaccccagtgaaatctaagccccgtgccgcaatatccgtggttaataacaacttcactcgttctgctttaaattgatcgatcgccaatttacgcaactgtttactttgatctgaagccagaccaatagccggaacattctcataaactaatttttcttctgctgcacctaaatcagcaacttgattgaaaaagaccatgcttctgaatgcttctgtatgggccaaacgacgtaagtaatcagctttttttcttggtgctaaccgaataaagtagtgggcgacttggcctgctgaagtatcttcttccgtcacatcaatcacctgtaatttttggcttaaagattgcgcttgattcacgacacgatcagcagtcgctgaataaaaaacaagttggtattcggttggtgtgtgtgtcaaaatttgcttggttaaacttagctcttcctcttggaaaagttgatcaacttcatccattacgattgtttttaacaactgagctttgacttttttattcttcattaactctaaaattcgacctggtgttccgattaacacttcgggacgtttttttaacttgtcaatctggcgtgaaacatttgccccgccgattaacgtttgaacctttaattgaagtggcttagcccaagtccgagcaacttcagcaatttgcatagctaattcttgagacggagcaataatcaacaattgatttccctgtcctttttcaacagttaagagtaaaggcmgcmtgtaagcaagtgtttttccmgttcctgtcggcgaaattcctaaaacattttctccttcgcgaaggggcgtaaaacttttttcttgaattgttgatggttcgttaaagccagaagcttgccactgttcttgccaagcctctggaagttgttctaaaaatctcatattgttcctttcctatcgcttaattcttatttatcagcatcaaaaataatgccggcactatgacgtaaatcagtgactactttattgacatttcgagcaagctcaacccattcttcatacttggtgccccaatacttatctgttgggttatttaaaactgctgcaaaatcacgggcttcttcaatcattggattatcggctacttgaatatctaagacatcacgttcttcatgtgcgcgatcatggtactcagccgaagaaatagcattgacactatctaaaatcaaggtcccgttttcaaagtaaatttcggatggcgcaaaagaatcactaattttcccagtgtttaacgtcacgtcaaactgatcatatcgtaaaataattgttcctaagccatcgacacctgtcgcaattttactagcaaaataatggctttcgtttggtacgccaaaccagcctaaggctgcataaactaaataaacgcctaaatccgctaaggctcccccagaaaaatgaggaraaaatatttggctctttgccttctaatacttgatcatagcgagaagaatatttcatatacgtaaaattcgcacctaaaatttggttttttaatggcaataattcagcaattttttggaaactttgctcatgaatattacgggccgcttcaaagaaatacacacgatttttattcgctaattcaataatttctgccatctcatcaggcgttgaaaaagctggtttttcaacaattacattttttttcgctaaaattgcttgtttcgcttgttcaaaatgtaatgaatttggtgaggcaatataaaccgtatccatatgtgcaataccaaaaaacgtctctaaatcaattgcatattccacatccccatagcgagaaccaaattcttgtgccgttgctagtttccgagaataaacagccgttaaatcatacgcacccgtttctaaagctgctgcaacaaattgatgactaatccaattggtaccaattacgcctaaatgtatcataatcaaaaacctccattttttgtttatttactctctttataatagtaatctctcgtacaaaagtcacgtaattaccctgccttaaagcgctaggagttcttcaagttatttattaggatcatcaaatgcctgtaataaatcaaaggttacctgtgacttaagttcaatcgttgctggtgttacgtggcaattgtaagcaaggacttgcacaccttgatcaattgcagcacccacattttcagcaaaggcgggttgcatctcttggtgaagcgttgcttgcttaatttcttcaaattggaccacaaacaaaatgtaacagcggtaacccgctttagttgcagccattagttcagtgacatgcttcaagccacgaagtgttggcgcgtcaggaaaagcaccgatgcctttattttctaaagtcatgcctttcacttcgacaaaagcttgttcgtccgcatccgtttccactagaaaatcaaattttgaatgtgcaaatcgttgctcacgtttaacagtttggatcgtaccaactaaaccaggaagcacaatttgaccattttttaacgcttcattgactaatgtattcggtacttggctatcaatattaatccaaaaagaacctttttttactgcaatcaaatcgtaatctgtttttcttttaggcgatggttgataactaagcgccacaacagcacctggtaaaaaaacttctttccctctgccagtatttttgacatgtgtgattacttcttcattcgtttccattaaacgacagtgtgcaataaaccgattgggtcgttcgataaaataagcaagttggacattcgggtacttcatacacagacttcctttcttacacactataccataaaaaaacaaggaaaagtatagaccaaaaccaacaattttactatcttgtgtcaatcattaaatatttgtcaattctcagcgatttagtcgaatattttagacaagttctatataataaaggtaacgaagacgaataaatgaaaatgaaggttaggaggaatttctttgaaaaaacattggactttcttggttggtgcatctttacttactggattagcaggctctatcctctggaaaaaaaataaacagctcccttccccacaggagcttcaacacaactatactgggcattggtggtttgtggacgtgaagaaagccacgcaacacaccttagaaatcacctcatctttcaatgttttcattgatggcaaacaaacgcatgccttgcttgttgaattaacccctaaacgcttagttatcttagacaagttaggttaccatttaatcattcaatgtgaaaatggtgtccctgcgacgctttacgatgaagccgacgacgaaacctacacactagaacgggccatttacaattaataaatcacccacgacacataaaatgaagtatgtgcggtgggtgatttatttttttacatcccttgcaaaagcattcagaaagttttcttacaacttgaatattattaaatagtcaaatgcgcctttttctgataaacttaggatgatgtttttttgaaaggatgagcccctatgacaccaaatcgcgaagactatttaaaattaatttttgaattaggtggcgacgaagttaaagtgaataataaacaaattgtttctggactcgatgtttcggcagcttcggttagtgagatgatttcaaagttagtaaaagaagatttggttgagcattctccttatcaaggggtacaattaactgaaaaaggcttaaaaaaagcgagtacgttaattcgcaaacaccgaatctgggaagtctttttagtagagcacttaaattacacttggaatgatgtgcacgaagaggcagaagttttagaacatgttacttcacagacgcttgtgaaccgtttagcggattatttaaatcatccagaattttgtccacacggtggtgttattcccgaagataatcaacccattcatgaggagaaacgccaaacgttaacagactaccctgttggcacaaaaattcggattgcacgtgtcttagacgaaaaagaattactggattatttagtttccattgatttaaatattcaagaagaatatacgattaaagaaattgctgcatatgaaggaccgatcaccatttataatgaaaacaaagaattatccgtcagctttaaagcagcaaacacaatttttgttgagccgttgattagagaaagtgaggaaaactaatgaatgaaaaagtagcattatttactattttcggggggacaggtgatcttgccaaacgtaaattgtatccttccctgttccgcttatataaaaaaggattattagctgagcgttttgcggtgattggtaccgcacgtcgggaatggacagacgaatactatcgtgaaatcgtccgtgaaaccattcaagacttaaatcccacggccgaagaggcaactgaattttctagtcatttctattaccaatcacataatgtgaatgatacggaacattataataccttaaaagaattatctgatcgcctaaatgaacaataccacttagaaggcaatcatgtttactatttagctatggcccctcaattctttggaaccattgttaatcacttgaaatcacaacatattatttcggaagaaggctttgatcgtctaattatcgaaaagccatttggttctgattatgaatctgcctacgaattaaatgaagaaattcgtgctgcatttcctgaacaagatattttccgaattgaccattacttaggcaaagaaatgatccaaaatatttcagccattcgttttgccaataatatttttgaatcacaatggaacaatcgttacattgataatgtccaaatcaccttcgctgaaagcttaggtgtcgaggatcgtggcggctattatgaccacagtggcgcactaaaagatatggttcaaaatcatattttacaagtcgttgcattgctttctatggagcctcctgttgccttttctgaaaaagaaattcggactgaaaaagtaaaagctttacgtgccatccgcctttattctgaagaagaagcccttcaaaatttcgtgcgtggacaatacggcgaaggtcagctagctgatcaaacatttgcagcctatcgtgatgaaccaaatgtggcagaaacttcatccactgaaacttttgttgctggtaaatttttaattgataatttccgttggtctggcgtccctttctatgttcgcacaggtaaacgattaactgaaaaaggcacacgcattaacatcgtctttaaacaagtacctattaatgtcttcaaagatgatacgtgtgaagaatgcgataaaaccgatttaccaccgaatgttttaactatctatatccaaccaactgaaggattttcattaaccttaaatggaaaagaaatcggtcaagggttcaatacaactccagtgaaacttgatttccgtcaaagtgctgaaatgactgaaaatagtccagaagcatacgaaaaacttctattagactgcctaaatggcgatagtacaaacttctctcattgggacgaagttgcccaatcttggcgcattgttgacattattcgacatgcttgggataaaacagacgtttctttccctaattatgccgctggcacaatgggcccgcaagctgccttcgacttattagaaaaagatggctttacttgggaatggcaaccagataactggtaccgtgaccgcggtcaacttgatcaataaataagccaaaaaagatccgctagttaacgactagcggatcttttttcttgtttattcgaatccttcagcaaccgcttctggataattttcttcaacaatgtgtgcacaacggccacaaagtgttggtaatttttcatctgagccgacatcttgacgaacggaacgacaacggtcacacgtttcgccttctgctttttcaactaaaatagccatgtcttcaaattgaacagcttcactaggtgctacttcttttgatacttcaaagtcggaaacaattagtaattgagcaatatctgcatcaacagctgtcattaattgacgaatttgttcatttggataaacggtcactttggcttctaacgatttaccgattaatttagaatgacgagcttcttccaacgcttttaagacattgtcacggaaatccataaaggctgcccatgtatccatcaattcttcttcattagtaaacgtttcgtaacctgggaattcagctaattgcacatactcttcttcttcttgtaagaaactccaaatttcttccgctgtatgtggaataattggtgtcaataattttgttaacgaaaccaatgtttgatagaaaacagtctgcatacaacgacgttgataatcgttttcagcttcaatataaacgacatctttcgcaaagtctaaatagaaagaagataaatctacagttaagaagttcataactgtccgataaatatgcatgaaattatatttttcataaccattttcacggatttcttgaatgacttgatttaaacgaaccgtcatgtatttatctacagaacgtaaatcggcataagctacagtatgctcagctggattaaaatcactcgtattcgctaacaagaaacgcatagtattacggattttccggtacacttcagatacttggtttaagatatccattgagacacgcacatcggcttccgcgtcaacactacttacccacaagcgtaagatatctgcccccatttgattgataactttttcaggtaagatagtattgcctaacgatttactcatcttacggccttcgccatcgagaaccatcccttgagaaataattgatttataaggcgctactccattgatagcgacacttgttgtaatacttgagttaaaccaaccacgatattggtcagaaccttctaaatacatatctgctgggaaagttaactcttctctttctcgtaaaactccttcatgtgaagaacctgagtcaaaccaaacgtccatgatatctgtttctttggtaaactcgccatttggtgaacctggatgtgtaaagcctgctggtagtaactcttttgcttcacgcataaaccagatatttgatccatgttctgcaaataaattcgctacatgttcaattgtttctggcgtaatgatggcttccccattttcagcatagaagatcggtaatggtacaccccacgctctttggcgagagattacccaatcaccacggtcacgaatcatattatataaacgtgtttttccccaaggaattagccagtcaactttctcaacttcatctaaaatatcttgacggaatttagagattgaagcaaaccattgtggcgttgcacggtagataactggttttttggtacgccaatcatgtggataactatgcgtaaagaaatctaattttaataacgcgcctttttcttctaataactcagtaatcattggattcgctttgtcatagaaaattccttcaaaaccaggtgcttcatctgtaaagaccccacggctgtcaacaggagaaataacaggtaaatcatatttacggctaacgatatagtcatcttcaccatgtcctggtgcggtatgaactaagccagtcccggcatctagcgtcacgtggtcgcctagcataacaagtgatgttcgatcatagaatggatgttgagctgtcatacgatctaatttttcaccagaaaattctcgcaagacttctacttcttsccaaccaatcgcttctttaactgttgttaataaatctttagcaattacaaattacgaccgtctgccttcacttcaacatacgtaaaatcaggattaactgaaatacctaagttggctggtaatgtccaaggggttgtcgtccagatgacgaaggctgtctcgttatctaaaagacctttaccatcggccacattaaaagctacgtaaatagaaggtgattttacatctttgtattcaatttctgcttctgctaaagaagattcacttgaaggagaccaataaattggttttaaacctttataaatatagcctttttctgccatcttaccaaaaacacgaatttctgctgcttcatactctggatctaacgtaatgtatggatgttcccaatcgcctgacacacctaaacgtttaaaatcgttacgttgtttatcgacttgtgataaggcatactctttacatttttcgcgatactcagcgacagtcatttctttacgtttaacccctttattggttaacacttgctcaattggtaaaccatgagtatcccaaccaggcacataaggagaacggaaaccagacattgattttgaacgaataataatatctttactgattttattcaaagaatgtcctaaatgaatatttccgtttgcatacggagggccatcatgtaaaacaaaggttggttttccttcgtttaatttttgacgttgttcatataagcctttttcttcccagtctttttgccattctgcttcacggtttggcaagttcccacgcattggaaaagctgtttttcctaattgcaatgtttctttcattttcatatgcatttgcctcgctttcattttatcgatttaattgtgttagttcatactaaagatgaacgatagctgataaaagtagataaaaaaagagtactccatcccaagggacgaagtactcgtgttaccacccaaattccaaagtagagttgcccctactttctctgaaattgataacggtaattatccggcagttcctactcaagtgttcagaactgcatctaggatagaggatctgtttaatgccagtgtctgtcaaactttcactatcattgactcgctgctaagaataaacattaaacgttctgttctatctattttgattcttcttcaattgtttcttcagtgacttcaattacaggctttttttctactacagcatctgtgttctcttcagagtttacaacagtttcattttcgttgtcaaggtcttgttcatcaagaatttccttaactgctgtatgtttgtctccgacataactagaaaaaggctttaaaatctcttcccactcttcactctttacttgctctaattgagtttcaagcattaagcttaagcgttgatggaagacacgtgttttcttcttcaagtcttctgtttccccagctaattgacgggcacgttcaattgcttctgctaagatttgtgttgatttcgcttcagcatctgcaatcattgcatttgatttacgttcagcttctaccaaggtttctttggcttggttatctgccgaagtgataatcatttctgattctttattggcacttgatttcactttatcagcggtatcttgtgcaacaataattgattgattcaatgcatctttcaattcattgaagtattgtaatttttcttctgcgtgttttaatgawttctcaagttcacgatttttttgtaatgcatcttcataatcacgtgtgacttgatctaaaaagtcatctacatcgtcttggttatagcctctcatttttgttgagaagtctttgttttgaatawctaatggagttaatgccatattccttcacctctttggattatttttgtaaaaccccttatgaacacattctcatactaatcctgaaatagcaaatatcttactttttttattatacacaacttcgtctgaatgaacagccaaaatggttttcttaaacaaaagttcgagattattttctcaatacccctaagaggacacgaaatttttctttcttggtttttccttctaattcttgaatttgaaggcgcccaaatccccgtatcgaaacaatatctaataagtctaaagcaaaatctggtcgtgtcgtttctgtccaattgacttttactttaccagattcgatcaattgttttgatcgctgccttgaaatattaaatacggcggaaatcacactatccagccgcaaagagctcatagtcgttcgctcttcctgccaaccatccttcggtatcaaaatttgtgtataatcccgttcttctaagcgaacagtaattttaccaattttgtcgacttggttaacaacgaagccagctacttcttgtgctataaaaacctgccacttatcaccatcggaaataatatctccaaaggcttccctacgaaccccaacattcatcaaggtgcctaaaattttcccatgagataatgtcgcaaatttagatggataaataatktcaaataatacaacaccaaaatctgtctcttctggtatgtaatacgctggataaatcaagcagcgttttcgttctgcttgctcataaccaccataaaaagtaaacgataaatcactgttttgtcgaatcaacgtttccaaaatatacgcctgtctaggatcaagaaagtctgtcaaataaggcgcgtattgcatctccacttgctctagccaatccccgacagtgtcaataaaaggatgttcatctttgcggaaatgttgatacacatttgcgttcatagataaatcatcctttctaaaagttattaataaacaatagctcgtaaaatgactgctaagccacccgctgctaggttaaggacaataatccctaccattacgttaaatccaaccattccaatccttaaattcaaacggtcaaacaaacttaagtatggttcacaaattctagagagcaaacgcccgaaagcagaatcatatgctcctggaaaccatgaaagtagcgcgtaaatcactagtaatcctgaatagatttgaacgcctttgtataatagagtaatcagtgttgcgataataacacctccctaaggcttagaaatcaaagaattgtttgttggctaaagattgtgctgtcgcactatcaatttccatattcgctggtgtgcataagaagatttcattgccaacgcgctgaatatctccgtctaaagcatacacagtaccagttaagaaatcaacgatgcgtcgtgcttggtcttcttctactaatgtaaaattaactagcacagcttcttcagcaaataaatgtttcgcaatgctcattgcttctgaatacacacgtggttcaataatagtaattttatgtgtttttgcattggcggtgctttcttgtgctcgtcttgtattcgtagtcgctgattgattagaactacgcatagaaaccacttttttctctgtgtaagcagcttgttgtgtgtctctttcttgatgcgcttcagcagaacgatagcgtgcagaaggtttttcaactacaggctcactttgttgtgtataagctggctgactgtaactttcctgttgttgaacagggcgttgtggtttaggccgagctgcacgacgcggtggttcattaactgctttgcgctcttcatattcttcgtagttatcataataatcatcttcttcgccagataagccaaaaaagctcgataacgcatccttgttaaaaattgacataaattcctctcctttacgcatctctgaataacgctgttccgattcgtataaaagttgcaccttcttcaactgcgattgggaaatcgttactcattcccatgctaagttctgtacaaggagcaaaagataaatgtttctcatttacggtcatttgcagctcttttaattctctaaatgttgcatgtaatacttcttcacttgccccaaaaggtgccatagtcattagaccgacgatttgaattttgtccaaatcagcaagttcttgaatgaaaggtaagacgtcttctttacgaaagccgtgcttgctttcttccccagttatattcacttcaacaaaacaacgaataactttcgttgctcttttttgaatttctttggctagactcagactatctaatgcatgaaaataatctatctcattaataattaattttaccttcctacgttgtaaattaccaattaaatgccactgaatatcattaaatttttccaatccagctttcttttctagtaacttatctactcggttttcagctaaattctggacaccaagctgaacaagctctgctgcttcctcaattcctactgatttagtgacgccaatcattgtcacatcagcaacagagcgctgtgagcttttgcatgctagctgaagttgattattaatatttgttaagttttcagctatcatttctaatcgatgctccttatcgttttctgcggaaaaatggtggcgtacttaattcgtcatcattgtgatttggttcttcacggtggaatgtgtcaaattcttttttgtctacttgttctaatgaagattcatcaacttttggacgtgtattttgttctctgcgaatatcccaatcgccaaaagcacttgcttcttcttgtgattttggttgatccatttccacagattgagttgtttgttgcattggttgaaccgcttgtcttgtttgacggtgcggttttctatccttttttgattcatcaatacctgtagcgattactgttacacgaatttcgtcgcctaaatcttcgttaattgatgtacctaggatgatgttcacatcacctgaagcagcatttgtaacgatatctgaagcatcttgcgcttcaaacaaggtcatatctaagccaccagtaatgtttaataagacttgttccgcaccatcgattgatgtttctaacaatggtgaagaaatagcttttttcgttgcttcaattacacgttcttcgccgctcgctacaccaattcccattaaagctgttccttggttttccatcactgttttcacgtcagcaaagtccaagtttacgtaacctggtgcagtgattaaatctgaaatcccttgaacaccttgacgtaatacattatcagcttctctaaatgcttcaagcattggcgttttcttgtcaacgacttctaataagcggttatttgagataattaatagtgtatcaacgttttcttttaataaggcaattccttcagcangcaaacgaccacgttttggaccttcaaaactaaatggacgagttactacaccaactgttaaagcgcctaattctttagcgatttttgcaactactggcgcagcacctgtaccagttccgccacccataccagcagtaatgaaaatcatatccgcgccttgtaatgattctgaaatcacttgttcactttcttctgcagctttttggccaacttcaggttgtgaaccggcacctaaaccacgagtgtatttagggcctaattgaatcactgtttctgcttttgaatgttttaatgcttgaacgtctgtattggctgtgataaattccacgcctttaacgttttcttcgatcatacggtttacagcgtttccgccgccgccacctacaccgataactttaatgactgcaccgttgttaatgttattgtctaatgaaaattccatgatatcgtatcctcctgtttgtgtgattagtcgaaaatgttcgagaagaagtctttgattttgcctgtcactttttcaccagactcacgttcgttgaattcttcgtattcttcttgaggctgttcagcatatgtgtcatagcgaacttcttgttggacagcgactgattgtgctggtttcgatttttcaccagggattgcatatttggcaatgtgataaatatcgtttagttgcgctgaatattccacaatgctaatgacattagcaaagactgggttacgtaagcccatgtgatttggtacgtatagttttacgttggcttcaaaaatctcttgcgccaaatcgacaatacctggcatactagcggcgccaccagttaacacaacgcctccaggtaattcmaacgcatcaatttcatccagaacttcttttgattttctcaaaatttgttccacacgcgcttcaataatttctgaaaggtaacgttcgtccactcttacaggctctgacttaccgataacatcaacaggaaactcttcgtttgctgaagttctttctggataagcatccccataattaatttttaaggcttcggcgttgttaaaagaagtattcaatacgattgagatatctttcgtgatgaactcgccgccttcttggttaacatgagtaaatttcaattgtttgtcgtgggataacagatgtcgttgtttgaccgccacccatatcaatgacaatkgttccaaagtctttttcgccatctgttaaaattgtttccgttaaagcaagcggtgtaatcactaattcgttaattcctaagccagctttttcaacacatttacggatgttatggatgattgtttttggtccagtatagacaacgccaaacatctccatgcgaacgccaagcattccacgtgggtctttgatgccttcaaagccgtcgacggtaaagtcttgcggtaagattgcaacaatttgacgttcaggaggagttgaacgaaccaaagctgcagatgcgacgttgcgcacatcctcatctgtaatttcttttgattcactgctaacagctatcattccttgacagctttctacttctaataaattcgctggtaatccaacatttacgcttttaatttgaatgccggctttttcttcggcttgtcgaacggcccgttggattgcttgaactgtttgatcaatatcgacgacaatccctcgattcaaaccgtctgattttgcatttccaacgccgatgatgttcatttgaccttcaatatattcagcgacaactactttgacagaagttgtaccaatatcgaggcctacatacattcctgtttttgccatgaacggaattcctcctcctattaattccaatatctaagcggacaaaggcgtccgtttaactatctcttttttagtattattcacttcttccaattttaccataaaaatgggggttttagaaagcagattatacgaatttgttcgttaatttttgaaacatttttgtaaaaaacttattctgcttgttgcacttcttgattttctccatttgtcggcgtaccgttattcgcttcatccgttgctacgcctgcatttgggtccacaacttcttgattttcaaccgctgaatcttcggaaacttcactacccgtttcttcactttctttttcatacggataagaaaaaatgccgacttccatatcaacgattccaggtttgtccatttgctcggctacttgtgaataataagccattttttcacttaaatcagaaatattaacaatcactcgatttccatcattcatatagacattaatcaagtctttattggttttggatggtgcatatttaatttctgaaattccttgtttaatttcttgaggtaatttgttgtaagaggccattaattcagggattaatttatcctctttgaaattctcaaaaattggtttgccactttcagcagctttggtggtttccgccaaagttttaccattctctaaaatcggatgatagccgcctttagtcgcagcaagagcgacaatttgatactcttgaatatcaattttaaatgaattaataccatttaacttaatgttcgccttttttataattggaaactttttctgaatatttgcagaaaaataatttctatttgaatactgctcccataagccactgcccgtttcaagttttgactgctgaataatcgcttggctctccacacttttgttacctgaaactgttacttcactcaatcgactaagaggcgaaacaaaatacaatgccactaaaatggctgtccctaaacaagttaaaataaaggctaaacgcctatataagcgcttgttccgtgttttcttaacgttcggtaaacgatctgcaaaatgctcctcttcttccactgtttcttgtggaagatgttgttgaggctcttcttgactttgttcttgtaaagtgatggtgacttctgcttgttcgttttcaccttttgaagcagcttcttccgcttgcttcttcaaatattcttggttttgtttttgccaaggtgtcagttcaggttgagactcttccgatttttttggaggtaatggttttctttttttgaatatatcgttctcgttactaatcttccacacctcctatctcagactaacgttttcacaacttgatacaaacgatcacttgcatctgggatgccttcccctttggacgccgttgccatctgttgtcttttttcattgtttaataaaatatcatctattgccgcaactaaacgagcgccggtcaattctgcatctggaatcatttcaacagcaccaacttttactaagctttgcgcgtttttcgtttgatgatcattcgtgacgtaaggactcggaattaaaattgctggtaatcctaatgcggtgaactccgcaattgaggttgctcctgcacgtcccaccattaaatcggtattagccatcacttcaaccattttatcaatatacggttgcacacttatgtttgtcaatttcttttcagaaaactttagactttcttgaagttcctgataatatctttctcctgaagcgtataaaacttgatactctctctcttcaaacaaaggaaaggcctgttcaaacgcttgattgattttcaaggcgccacgacttccgccaaataaaaccaccgttttctttgctggatccaagccaaactctgataaaatagctgacttttccaccgttacgacttcttgtccccgcgggttccctgttaaaattgttttttctttcgggaaaaaactagcgacatccggaaaacaaatcgcaattttatccacataacgacttaaaaatttatttgtcattccggggatactattttgttcatgaataattgtcggtatttttaattggtgggccgcataaaccactgcaccagaaacataaccgcctgtaccaatgaccacatctggttgaaattcacgaataattttttttgctttattaatgcttgttaaaaataaataaattgttttaaaattttgaggacttagcgaacgcttgaatccttgaattttaatcgttttaaatggaattttcgcctttggcacaatttgactttctagaccattttctgttcccacatacaagaattctgttgcaggtgcttcttttttgacgtgttcgacgaaggataacgcaggatagatatgcccacctgtgccaccaccagttactagtatcttcattttctcacatttcactttcttttaattgttgaacagcttgcataaaggcttccccgcgtacttcaaaattcgggtattggtcccaacttgcgcaagcaggtgatagtaaaatagtatcatctttttccgaataatcaaaggcaatggtaaccgccgtttgaacattttcagcaaataaaattgtttcaatgttcgcttttttagcagcttccgccaatttttctttggtttctccaaacaaaacaattgctttgagtcccaacagggcaggaaccaattcatcaaatgagttaccgcgatccaagccacccgcaagtaaaagtagcttttggttgtcaaacccacttaacgccatctctgtagctaaaatattggttgcttttgaatcgttataaaaacgtctttgctgaacttcgccaacaaattgcgttcgatgaggaacgcctgaaaagtttgtcaaagtttgtctaatctgagcattcgatacattttttaatttagctacacaaatcgctgcgagtgcattttcaatattgtgactgccaggaatccctagctcatcggcgggcataatatattcttcattgaaatataatttcccatctaaaagataagccccttctactgcttctttcgttgaaaaaggcaatacgttggcagctgtggttttggctaacgtttgaagctctacttgattccaatttaaaatcaaggtgtcctctgcggtcatgtttttttgaatggcccattttgcagcaacatattctttccgcgaaccatgataatccaagtgtgcctcaaaaatatttgtaattactgcaatttgtgggtgaaacgtctcaattcccattaactgaaaactagaaagttccatcacaagattatccttggccgttgcttcttgagccaccgtactcgctggaaaaccaatatttcccgccaaa

SEQ ID NO: 129 - DNA, 6259 bp; double-stranded, linear
ggctggattttcctagtaagagcttgttggamcagcttaataaagacacaagccttttttgacgtcgtcgctcaggattttgctaaaatggcccagtttacgtatcatttacaagaagcaaaaaaagtcacagagtatacaaattctttaagattaaaggatttacaaggaaaataagctgaaaacaacataaaaatagtgtataattgaaaaaattaatctgcgagagaaagggaaccttttttgattgtagatcaccgcagttgtttgttgcctagtctctaagaaataaacctaaaattattgatataaaggatgaacaaatgaaaaaagaagaaatgcaaatgcgtaatacacgtcgtcaaaaatcaggaaaaaataataaaaagaaagtaattattacttctttggttggactagctctggttgctgggggcagttatgtttattttcaaagtcactttttmccaaccacaaaagtaaatggagtttctgtaggctggttaaatgtaaatgctgcagaagaaaaattagcgcaagttaatcaaaccgaagaagttgtggttcaaacggggacaaaagaagaaaaaattcaacttcctaaaaaataccaattggatcaaaaatttttaaaagaccatttacacagtagcaaggtgaagctaccgttaaacgaggcattcaaaaaagaactagaagccaaattagcaactttgagttttccagaggggaaaccaagcaaaaatgcgagtatccgtcgaggcaatggcacttttgaaattgttcccgaagaacaaggcacagtagtggacacacagcgcttaaaccagcagattattgcggatgttgaagcgggaaaaggcaactatcaatataatgccaaagatttttataaagcccctgaaattacaaaagaggatcaaacgttaaaggcaacattgacaacgctcaataacaagttaaataaaacaattacagttgatattaatggtgaaaaagtagcctttgataaaacacaaattcaaaacgtgctgaatgatgatggcacaatcaacaaagaaaaactaactacttgggtgacacaattagaaacaacatatggttctgctaatcaaccagttttatttacagatgttcacggcacgacacgtcgttttaaaaacaacggaagttatggctggtcgattgatggggccaaaacgcaagaactactagtaaacgcgctgaatagccaagaacaaacgaatgcaatcactgctccgttggttggtgataccaaagaaaatagtaaaattgccaataattacattgaaattgatttaaaagatcaaaaaatgtattgtttcattgatggcaaaaaaatagtcaccacagatgtcattactggcagatataacaaaggaaccgcaacagtaccaggattccatacaattttatatcggacaaccgatgtgaatttagaaggtcaaatgcttgatggttctcgatacagtgtgccagtaaaatattggatgccgttattaagtcaagggggcgttgtcacacaaatcgggattcatgactccgaccataaattggataagtatggcgataaagaagcctttaaaaccgatgctggtagtaatggctgtatcaatacgccaggaacagaagtttcaaaaatctttgatgtatcctatgacggaatgccggtaattatttatggacatatctatgatgatgcaccaggtgaatttgataaacctgtagattacggcgaagaagtataaaaagagatattaggcaagaccgtactttggtccagctgtgtatctgaaaagtaaaaattggagacgtcagcgtaacgactgacgtccccaattttttattgacaagcgtcataacccgctctatgatacaaacagaacaagcaatttaaattgggggaacgaagatgccatttgtacatgtagaattaattgaaggccgcacagaagaacagttaactaatatggtcaaagatattacagaagctgtgtcaaaaaacgctggtgcaccaaaagagaatatccatgtgattgtcaatgaattgaaaaagaccgctatgcacaaggcggcgaatggaaaaaataagttttcagagaatttctgttgaatcacttgctttttctgaaaataagtggttaaataagtgcataaatgattgatgagaaagacaactgaacttgcccgcgatctattagagaggaaaatcttggctgaaaattttccagattggcacaagggatgaccactttcgaaacctttgttgaaacaaaggcggtcgcaccgttaacacgctagaggaacacagattatttgtgttcaaaattaggtggaaccacgatattttcgtcctagtattcgttagaatactaggactttttgttttttaacaaggggaacaggtggctgtttcgtttcattgtgaaaaacaggaacacaatgaaacgcttcaaatcaaaaaaattaaaaggagagaattttattatgtctattcacattacttttccagatggcgctgttaaaccgtttgattctggaattacaacatttgatgttgctaaaagtattagcaacagtttagccaaaaaagctttagctggtaaattcaatggtgttttaatcgatttagatcgtcctatcgtagaagatggttcgcttgaaatcgtgacacctgatcatgaagatgctttaggaattttacgtcattcatcagctcatttaatggctaatgccttacgccgtcttttccctaacattaaatttggcgtaggtcctgcgattgattctgggttctattatgatacagataatggagaatcccctgtgacagcggaagatttacctgcaattgaagccgaaatgatgaaaattgtgaaggaaaataacccaatcgttcgtaaagaaatctcacgtgcagaagcgttagaattatttgctgatgatccttacaaagttgaattaattacagatttgccagaagatgaaatcatcactgtctatgatcaaggcgattttgttgatttatgtcgtggtgttcacgtcccttcaacaggacggattcaagtctttaaattactttcagtagctggtgcttattggcgcggaaactctgacaatcatatgatgcaacggatttatggcactgccttttttgataaaaaagatttaaaagagtttatcaaaatgcgcgaggaagccaaagaacgtgaccaccgtaaattaggaaagaattagatttatttatggtttcacaagaagttggttcagggttacctttctggttaccaaaaggcgcaaccattcgtcgtacaattgaacgttatattgtggacaaagaaattagcttaggttaccaacatgtgtatacaccaattatggcagatgtggaattatacaaaacatctggtcactgggatcattaccatgaagatatgttcccaccaatggatatgggtgatggcgaaatgctggtattacgtccaatgaactgtccacaccatatgatggtttataaaaatgacattcatagttaccgcgaattgccaattcgaatcgctgaattagggatgatgcaccgctatgaaaaatctggcgcattatcagggttacaacgtgttcgtgaaatgactttaaacgatggccatacttttgttcgtcctgaccaaattaaagacgaatttaaacgtactttggagttaatggtggcagtctatgctgactttaacattacggattatcgtttccgcttaagctatcgtgatccaaataatacagacaaatattttgatgatgatgcgatgtgggaaaaagcgcaagcgatgttaaaagctgccatggatgaattagaattagattactttgaagcagaaggcgaagctgccttttacggtccgaagttagatgttcaagtaaaaacagctttaggaatggaagaaacattatcaaccatccaattagacttcttattaccagaacgttttgacttaacttatgttggcgaagatggtgaaaatacacatcgcccagttgttatccaccgtggtattgtctcaacaatggaacgatttgtggcttacttaacagaagtttacaaaggcgctttccctacttggttagcaccaattcaagcaactattatcccagtttctgtagaagcgcattctgagtatgcttatgaaatcaaagaacgtttacaagcacaaggcttacgtgttgaagtcgatgatcgtaacgaaaaaatgggctacaaaattcgggcctctcaaacacaaaaagtaccttatcaattagtggtcggggacaaagaaatggaagacgcaacggtgaacgtccgtcgttatggaagcaaagaaacgtctgtcgaagatttatcaattttcattgacagcatggctgctgaagttcacaattacagccgttaaaaaaagaganaaagtcaaaaggacttctgaattcagaagtccttttgacttttttcaacaacaaaataattaaatatttccttagagctgggaataatcctgattttttgactattttttgttacaatgagaatgcgaaactttttagtgaagggactagaggtatgaagaaaaactcatttatagntraaataaaaaaaacagatgccgcagcaaagagtcaacgaggtagaaagccacatattccttttcgattgaacttattattttttgtgatattcactttatttgtttcattaattgtccgtttagggtatttacagattgtagaaggagaagagtttaacaaaaaaatcactgccaattcttcactacaaatcacgacaccatcccctcgaggacaaatttatgattcacaaggaaaagtcttggtttctaacaaagccaatttagcaatcacatacacacgaggaaaaaatattgaaggaaaagatattttaccgattgcgaataaagttaacgaacttattaacgttccagttgatccaaacttaacggatcgtgacaaaaaagattattggttagcgaatcctgaaaatttaaaagcagcccaatcccgtttaaccgatcaagataaagaagatgaaaaaggcaacaaaattacggacgaaggcacattatatgccaaagcagttgaaaaagtcacccctgaagaaattgcgtttgatgaccgaaccttacaagcagtaacgatttttaaacgaatgaatgcagcatcacaaatgaacacggtcttcatcaagaatgaaggggtaacagaaggtgaaattgcgacaattggtgaacacacagcggaaatatctggtgtttcaacagggactgattggacgcgtgattattctcaaagtggcgcattacgtagcctgttgggcaccgtttcaactgaaaaacaaggattgccagccgaagaagtcgatgantatttgaaaaaaggctatgcacgaaatgaccgtgtcgggactagctatttagaaaaacaatatgaagacgttctacaaggtaaaaaagcaaaatcagaagtcgttttagacaataacggaaagattgtttcacaaaccccaatttccaaaggggaaaaaggctccaacttaaaattaacgattgattcaaatttccaaaacaaagttgatgaaattttacaacgaaactattcacaaatagtcaaaaccattggaccatactcagaaaatgcatatgtcgttgctatgaaccctcaaacaggagctattttagcgatgtccggatttcatcatgatttagcaactggagaagtcacacctaatcctttagcacctattttgaattctgaagttcctggatcagttgtgaaagcaggtactttaacagctggttatgaaacaggcgtcattaaaggcaatgacgttttaacagatgaagctattttactagcaggtagtaatccaaaagcttcttggtggaatgcttctggcggaacaaccatgcaattaactgcggagcaagcgttagaatattcttcgaatgcttatatgatgaaattagtctttaaaatgatgggtgtgaattattatcccaatatgattttcccttatgaagtaggagatgacactgtctttaaagaattaagaaaagcttttgcagaatatggtatgggaacgaaaactggaattgatataccaggagaaacaacaggaattcaaracaaggactttaaggattcgtcatctgcgccacaaggcggtaatcttcttgacctatcttttggacaatatgat

SEQ ID NO: 130 - DNA, 9767 bp; double-stranded, linear
cgctgactcaattagcgtaatggagtttgttttagaacttgaagatgaatttggaacagagatttcagatgaagatgcagaaaaaattgaaacagttggtgccgctgtagattatattgtgagtaattcataaaaaataataagacaaagtcgattaacattcctgttaatcgactttttttgcgtacataatggttattttattaagcaataaggctatttttacacatatttttgtaaaaaaaatcatacatgtaaaaaaataactgcgaaaaaagttattttatcttgctttttatggaataattctataaaattatgaaaaaacaatgagctgtaaattaacattgataaaaattagaaagtgctatcattaaatattagttaatttatataatgtttttgaaaggacgtaaggggtgcgtatggatgcaaggaaatgaacaattactagaggtttcaggattagaaacagcatttagaatcaaagatgattattataatgccgtcgatgatgtttcatttgaattgaagaaaaatgagattctggcaatcgtcggagaatctggttgtggaaaaagtaccttagcaacaacgattatgggcttacatgatcccaatcataccaaaattactggggaaattttatacaacaatttaaacttaactacgtttaatgaaacattgtacaacaaagtcagaggaaacgatattgggatgattttccaagatccgttatctgcactgaatccgctcatgcgaattgaagaccaaattaaagaaagtctcacgtatcataccaaaatgaccgcacaacaaaaacaagcacgggccattgaactgttagatcaagtggggattcccaacccagagcgtgtcgggaaacagtatcctcatgaattgtctggcggcatgcgccaacgggtgattattgccattgcaatcgcgtgtaaaccaccgattttaattgcmgrtgaaccaacaacggccttagacgttaccattcaggcacaaattctcgatttgttaaaagatttacmagaagaaacagggagcggcattattttaattacccatgacttaggtgtagttgcggaaatggctgatcgtgtagcggttatgtatgcgggtcagtttgtagaagtagccactgctgaagaattgtttagtcatccgaaacatccatatacacgttccttacttcagtccattccccaagagaattcagatgaagaagaacttcatgtgattgaagggattgttccttcgttaaccaaattacctagaaaaggttgtcggtttgccccacgaattccttggattgatgcatcggaacatgaagaaaatccaacattacatgaagttgcaccgaatcattatgttcgttgtacatgttataaacattttcattttagagacggggaaggggaagcgtaatgacagaaattattcaaattaaagatttaaaagttcattatccaattcgcagcggcttcttcaatcgaatcactgatcatgttttggcggttgatggtgtggatttcatgattgaacaaggtaaaacgtatgggttagttggtgaatcgggttctggaaaatcaacgacaggaaaagcaattattggtttagaaaaaattacaaatggtgaaattatttatcaaggacaagatgtaaccaagccgcgaagtcgaaaagcgattggatacaacaaagatgtccaaatgattttccaagattcgatgtcaagtttaaaccctaaaaaacgagtactagatattatcgccgaaccaattcgaaattttgaacggttaagtgaccaagaagaaaagaaaaaagtcaaaagtttgttggatattgtggggatgccagaagatgcgttgtacaaatatcctcatgaattttctggtggacaacgccaacgtttaggcgtcgcccgagcggtggctaccagccccaaattaattattgcagatgaacctgtttcagcactggacttatctgtgcaagcacaggtattgaattttatgaaaaacattcaacaggaatatgggttaagttacttatttatttcccatgatttgggcgtagttaaacatatgtgtgacaacattgccattatgtacaaaggccgttttgttgaaatcggtacacgccaagatatttacactaatccacaacacatttataccaaacgcttactttcagcaattcctaaaattgacgtagcgaaccgagaagctcacaaagaagaacgaagaagagttgagcaagagtatcgggaaaatcataaagactattatgatgaaaatgggcgggtttataacttacatgcgattagtccaacccaccaagtagcgttaaaaaatggaggtgctgaataatgtggaaaacaattttacgccgtttgttattgatgattccgcaagtgattattttaagtgtcttgattttcctgttggctaaaatgatgcctggtgatccgtttacaggattgattaatccgaaccaagacccgaaagtgattgaagccatgcgcgaagctgccgggttaaatgatccttggtacgaacaatatttccgttggattggcaatgccttacatggagattttgggcatagttttatctttaaattacctgtgtccacgctcattgctggtcgggtggggaatacgattgcattggccgctgtgtcagttataatcacgtatttaatcgccattcctttcggtttaattgctggccgttaccaaaattcatggtttgacaaaatggtggttatctacaacttcttcagttttgccgtgccattattcatctttgccttgattatgctctttatttttgggtatcgcttagactggttcccaacgagtggaaccgtgactgttggtttggctgagggaacgtggccgtattatttagataaactgaagcatttaattttaccaggggtcactcaagcgttgctagggacagcggtcactattcaatatttgcgcagtgaagtgattgatgttaaaaacatggactttgttcgtactgctcgttcaaaaggagtgccaacgaataaaatttttaatcgacacatttttagaaatgcagcattaccaattgcctctcaattaggttatgaaattactgctttgattgccggatcagtcgttattgaaaagatttttgctttcccaggaattggaaaattatttattgatagtatcattcaacgtgactattccgttattaccgctctcgtgttgattttgggattggcaacccttatcggaaccttaatttctgatattgtaatgagtattgttgatccaagaattcgaattcagtagaaaaaacacgaagaaagggtgataaaaatggaattgacagaagaaaaaagagaagaagtcttacaagaaagtattccaccaatgggctttcggatgattgcgcgagaattcgtcaaagaaaaaatggcgatgttttctttaatccttttggtcattatcttattagccgtttttatcggttcgttagtgttagaccaaagtgccgttatgcatgtaagtattttagataaatatgcggaaccaggtaccgttacaatgaatggcaccaagttcattttaggtgccgatgaagggggtcgtgatgttttaggacagttgattatcggggctaggaactcgattttaatcggttttgccattacgattattacgtctattatcggggtcggtttagggattatttccggttattatggaggcatgattgataacattttgatgcgtatcgtggattttattatgattttgccaattatgttaattattattgtgttcgtttccgtgattcctaaatatagtatctggtcctttatttggattatgtgtgcgttttattgggttggaaaagcgcggttgttccgcagtaaaacgttatctgaagggcgccgagattacgttagtgcctctaagacaatgggaacaagcgattttaaaattatgtttcgagaaattatgccgaatttaagttcattaattattacgaacttaacgattaatttcgcggccaatatcgggatcgaaacaacgttaactttcttaggcttcgggttaccacaaagtgtcccaagtttaggaaccttaattggctacgccagcagtggggatgtattagtcaataaacaatgggtttggttacctgcatcaattctaattttagtcttgatgttaagtataaactatgttggacaagcatttaagcgctcagcagatgcacgacaacgattaggctaattagccaaaaaatgagggaggaaaagagatgaacaagaaacggattttaggtgcaatcacgttagcttctgtgttagtattcgggttagctgcatgtggtggcggcaataaaggcgggggcaataaagcaacggaaacagaagacatttcaaaaatgccaatcgctgttaaaaatgataaaaaagcaattgatggcggtacattagatgtcgctgtagttatggatacacaattccaaggacttttccagcaagaattttatcaagacaactatgatgcacaatacatgcttccaacggtacagccattatttaacaatgatgcagactttaagattgtcgatgggggtcctgcggatctgaaattagatgaagatgccaatacagcaaccattaaattacgtgacaatttgaaatggtctgacggtaaagatgtgacagccgatgacgtgattttctcttatgaagtcattggtcataaagactatacagggattcgttatgatgataactttacgaatattgttggcatggaagactaccatgatggtaaatcgccaaccatttctggcatagaaaaagtcaatgataaagaagttaaaatcacttataaagaagttcacccaggaatgcaacaattaggtggcggtgtttggggctcagttttaccaaaacatgcctttgaaggaattgctgttaaagacatggaatcaagcgatgcagttcgtaaaaaccctgtgactattggaccatactacatgagtaatattgtgacaggtgaatctgttgaatacctaccaaatgagcattactacggtggtaaacctaaattagataaattagtgttcaaatctgttccttctgcgagcattgtagaagcgatgaaagcgaaacaatacgatattgcattatcaatgccaacagatacgtatccaacatacaaagatactgaagggtatcaaatcttaggacgtcccgaacaagcctacacgtatattggctttaaaatgggtacgtttgacaaagaaacaaatacagtgaaatacaatccaaaagctaaaatggcagataaaagcttacgtcaagccatgggctatgcaattgacaatgatgcagtcggccaaaaattctacaacggcttacgaacaggggcaacaacgttaatcccaccagtcttcaagagcttgcatgatagcgaagcgaaaggctatacgcttgatttagacaaagcgaaaaaattattagacgatgctggttataaagacgtagacggcgatggcattcgcgaagacaaagaaggcaaaccactagaaatcaagtttgcttcaatgtcaggcggcgaaactgcacaaccacttgctgattactatgtccaacaatggaaagaaattggcttaaacgtaacgtatacaacaggacgcttaattgatttccaagcattctatgataaattgaaaaatgatgacccagaagtagatatctatcaaggcgcgtggggcacaggttcagatccttcaccaaccggcttatatggtccaaactcagcctttaactatacacgttttgagtcagaagaaaatactaaattacttgatgcgattgattcaaaagcatcatttgatgaagaaaaacgtaaaaaagccttctacgattggcaagagtatgccattgatgaagcgtttgtaatcccaacgctttacagaaatgaagtcttgcctgtcaacgaccgtgtagttgactttacttgggcagttgatacgaaagataatccatgggcaacggtgggtgtcacagcagactcacggaaataaaaaaacagattctagaagacataaagctcttctagaatctgtttttttggataggatagtttcttaggccatcttattttatgtgaaaatttttgttacttcaagcaattacaatttatatgtatgcgttatttttttgttatagatgaattgttttttatgcagtatggtttttgatgggaggttctgtttttttattttatttagtgtgtatatctacatgtttgttatgaaatgttattttttttattatatatataatactccctttacgtataaagaacgataagttacaattagattaagttttagttagtttttgaaggtgtgtttggtattgtttataactaaaacttatatttaaagaaaggagtgaatggatatgccactttatatggagaattatttgcttgcattgcaatcaaaatattcacaagaaataactgtaaaatgggtttgggcagttgtaatattactttcagtgattggctgtattggttatgcagtttactgtagttgggtaggtggaacatttgctgggagtattaaaattggtgttcccgacttggtacacgttaccttcaattgtaaacgttgatatttaaggaggaaggagcctctattttatggaggcttcttgttaagaaacttatgataagaattgaaaatttaacaaaaaaatttgataggaaagttttagataatataactatctcattgcctaaaaaccgagttagtgtgantgtaggtataaatggaagtgggaaaactactttattagattgtaatgtaggattgaaagatgcaacgtctggaaaggtatttattgagagctattctaatgattctgaaaagtttaaagaatgtatattctatataccatcggaattttatctacctaattatatgacgggtaaagagtacttaaactttgttttatcaagatatcgctgtagtgatatagaacggatagatgattttttagaactatttgatttaaaatttgctggaactaatttaatagaatcgtactcatttggtatgaagaaaaaaatacaaatagttgcagcagcactagctaacactgattatatattaggtgatgaaatatttaatggacttgactttgagacaacattgcttacgttagagctgtttgaaaatttatctagagaagtagggatagtgattatttctcataataaattaattattgaaaggttttcagagaatattttattgatgtccaatggcaatttaactccatttttaggggcgtcagagaatttagaaaaagaagtgataagtacggagaaaattcatgaaaaaattaaatacatcaaaggatatcatcctattaatcgagttatttattgataatgctttacgaggtttgctcaagcactctattttgtcaaaaaagagtactcgcatcgtaataggtgtgtgtgtattttttatctattttgcatactttttttttaatatgagtgaactagctagaattgtaccagattcagaaaaaattagtcatattttgatagaacaaggtcgaaaaataactttttatagttattttagtaatacatttgttttaggtataatagcatatattttagttgataatactgttgcattagataaaaactccttattttttgtgaaaacattgccttttagaaagaaagacatcagcttatcttttatgctattcaaatttgtaattatgatattgctttatgaattagttatgatcatttctacgccagctattaaacttgtgacgactgttcctattgaatatgtcattttttttattgttcagcatcttttttatctagtggtaattggggtgattgagtttatacattgtttgtttacattctttttgaaacgaagagtgaaacaaattaatagtctcaaagtgataggtgatagtttattaatgatttttgctactttttatttttttgattttcgttatggtttagaattatttctagcaaaccaattgtggagtatctcctatatgattcctatcactttttttctaatagtggtatgtttaatgcttattagtataggcctattaagactaattagtattcttgaaaatcaaatgtctcaacattcaaaatatatatacattccattcttaaataaagttatatttcgttataaagcgaattggtattttattagttttactacagttgttatgttggttatttttttccaaagtggtttaagaacaatgttattcattttgacaactgttatggccttttcaggcgttttattattaagctatggagatattactgctgatttcagaaaacaatatgatttattgagaataaaaattagaaatgaatggttgagtcmactattgckagtgataatgttggcaatgccattgttactacttgtttttggggatttggggagttagctcaactaattacagcgttgtcgttatcattagtagctataattttgggatatgtatttccaaaatcacaaggaagtttaaatgaaacgacttcattattgttattatttattgtatttgttctagttagtttattgacaaatcgctcttttggttggttgattctaattgttttagtantcttgcatttgttagtaattaagaaggtgagaaatgaaaaagaatagtaaatatttaggaagtataacagttatctatttgttagttcttgtgatcgaaacattatgggagctattccataccagtcgcacagaatcaacgaaagtcactaccttattaggaattacgattgataatcgtataagtaaacatgaaatttcaactacttttggtttgacaattaaggtattagtactctatttgttgttattgttagttgtctatattttgactgggttatttggaaaaaagaaaatatgattattaagttatcaatattgtatgtgttgtcaatatatgtcgtgttacttgtacatgagtggttacattttattttagccmaattcttcaaatacaatgcttatataaagagagttggtctatacccatttaaagtggtgtatacgaacagaaataatcctctagataatttattgatttcagcgatatctccgcttttcttggttatagtaggaataattttgccattaaattattatactgtgattttaaaagtatcttgtattagtaatatttttaatctcttaccgtttactgcagatggagaaataattttgctttcaatttttcaaatttttaggaggagaaataaatgaaaaaaagaaaagtgttcattatttttcttgttagtttgattatatttgtttttggttattacttagcgtttaatcaaaataagtatgtatcatataatgacgagacaaaacagtttgtacatactgatacttcaaaaataatggaaaatctggtgaacagacaacaaggaatttattattttggctttccgacttgtccttggtgtctagaattattaccaatactagataaagaattagagaaggaaagtatgaatgcttatgctgtaaatactcgtggtgatgactatacagaaaatgatgakgaattattacaaaaatttkatcaaaaatatactggggatgagtcgctttctgtaccttttattgttgcta

SEQ ID NO: 131 - DNA, 7900 bp; double-stranded, linear
aaaatcgttttggattttttctcggntnctttctatttaagttattttagttggatatcgttatttaataaggctattatatggtataatgataattaactgaagtgtggaggaaataaaatgttatcaattgttgtcccttgttataatgaggaagcagcgattccgcgttttttgaagaagtagaaaaaattagccagaaactgtctcattcagtagaatatatatttgtgaatgatggctcaaaagacaatacgttagctgttttaagacagctttatcgcgaacatccagagaaggtccgttatctttctttttcacgaaattttgggaaagaagcgggcttatacgctggtttaaaagaagcaacaggtgacttagtgacagtcatggacgttgatttacaagacccgcctgagttattacctcaaatgattgagatgattgaaaccagtacagatttagattgtgttggcacacgacgcataacaagagacggcgaaccgcccattcgtagcttttttgcacggatgttctataaactcattaatcgaattgctgagacggaaatggtggatggtgcccgtgactttcgtgtcatgacccggcaaatggtcgatgcgattttagagttatctgagtataatcgtttctcaaaagggatttttagttgggtcggctttaaaacagaatatattgaatttaaaaatcgagaacgaattgctggagaaacctcttggtctttctggagtctattaagttattcaattgacgggattgtcaatttttcagaaacaccattgaatattgcttcatacgttggcgccttttcgtgtattggttctgcactagcaatgttagtgattatctttcgaacattagttaatggtgatccaacgagcggctggccttcaatggtttgtattgtactttttgtaggtggtttgcaactattatgtttaggaattattggcaaatatatcggtaaaattttcttagaaacgaaaaaacgaccaatttatattgtaaaggaatcagaaaaagattctaaaaaataaccaaaaaagcagagaaaaattctctgtttttttgttgtgcattaaaaaaagtgtgaatagacttttcagaaaaacaacattttttacataaaaaatacattaactttacctatttttatcttaatgaaacagctttgctctcgcggttgcaagaaataaatgttaaaatcaaaaggtatgctattaaatgtttttttggaggttgggtcatgatagaagttatcgacttgaaaaaagtattcgataatgggtttgaagcgttaaaatcggtcaattttacgattgagcaaggggacttggtttgtttgttaggaccaagtgggtgtgggaaatccacaattttaaacttaattgcaggtttattgcatccaagtgatggagatattcagtttcgacagcaatcggttgtcaaaacagcaccaaaagatcggaacatcgggttcgtttttcaaaactatgccttatatccacatatgactgttctagaaaacgtaatgtttcctttgacggtaggaagtaagaaagttcccaaggcagaggcacaagctattgccgaagaatatatgaaactaacgaatattgaagagttaagccataaaaagccaggcacactttctggtggtcaacaacagcgtgttgcgattacccgggcgttagttcaaaaaccagatgttttattattagatgagcctttaagtaacttggatgcacgtttgcgtttgaaaattcgtgaagaaatccgccgcttggtgaaagaagtagggattacaacaatctttgtaacgcacgaccaagaggaagcgctatcaatcagtgataaaattattttattaaacgaaggggttattcaacaaaatgatgaacctcaaaacctttacttagaaccaaataacttatttgttgctcagttcataggtaacccaattattaatttattgtctgttgaagtgaaagacggcaaaatgtaccacaaaagttttgaaattccgcttgagcgttttgagcaagcacgctttaaaatgccaatgactgatgggaaatatacgtttgcttctcgtccggaagatgtggtaccagctgaaacaggtctctttaccacaacgacagatttagtggaattgattggtcgagaacgtattttacgatttacattaggaaatgaacaagtgaaatcaattgtaagtgtagaagaagcgattgaagaaggagacactttatcttttgatttttcatataaaaaagtatttatctttaacgaagcgggagaccgggtttactaatgaaaaaatacaatccagaaaatcaaccaaaagcatggctcttccttctgccatcattaggaatcattttactgtttagcgtttatccactgtttcgttctttgtggatgagtttccaaaaaggttccttaattaaccaacgctacgctggtttagaaaattatcaacgtgtattgaatgatccaatcttctataaagcgttaaaaaatacagcgctctatgcatttgctgtggtaccgattgccttgataatttccctagcaattgcttggattatctttgaaaaagttaaacataagagtttctttgaaacgattttctttatgccttatgtaacgagtacgattgccattgggattgtcttccgttacttctttaatggcgattatggaattgtcaattacgtcttaggctttttcggcattccttctgtcaactggctagataatgttcaaatgagtatgccaacattgattatttttggggtttggacgagtttagcatttaatattattattttgttggctgggttgagaaatattgatgaagaacattttaaaattgcaaaaatgtttggcgcctcagacggcgaaattttccgacgtattacgtttccgcagctagtcccgaccattgcctttttattaacggtcaacttaattggcgcctttaaagtttatacacaagtttatgctttattcggtggccgtgcggggattgccaatagtgccacaaccgcagtgtactatatttatgacaaattccacattgcaggacgtcccggaattgcgatggccgccacagtgattttatttgtgattattttagtggtcactttcttacaaaataaactcttaaagaaagtggggcaataagccaatgaaaaaagttttaacgattatcgcatttgttttcttaggcattttagccgttattacgttatttccatttgtctatatgattttagctggtttaatgagttactctgaagcgaccagcatgccgccaaccatgtttccgaaacaaccacaatggcaaaactacacagaggtctttcaaaaagcaccctttcttcggtatttcttgaacacagtctttgtttcaggcgttacaacgattgctacggtagtcaccgccgtgttagcttcattcgcattaacgagtttgaagttccgttttaaaaatgtggtcattgctttgatgatttcgttgttaatggttccgtatgaatctattatttttaccaattatcaaacgattgcgcaattaggtttgttaaatacttacagcgccttaattattccatttttaactagtattttttatatttactatttaaacggttatttaaaaggtattcctgatactttttacaaggctgccaaaattgatggcgctagtgatttagaatatatttggcgtattttagtaccaatgtcaaaaccagcgttggtaacagtagggattttaacatttatttctagttggaattctttcttgtggccattgttggtgacgaacgagaaaaaataccgtctattgaataatggactatcggcctttgcgacagagagcggtagtgacgtacatttacaaatggctgctgcaacattaaccgttattccaattttaattatttacttgattttcagaaaagaaattatcagaggagttgcaaaaaatggaatcaaaggctaaaacaactgtgacttttcacagtggcattttaacaattggaggaaccgtgattgaagtggcgtataaagatgcccacatcttctttgattttggtacagaatttcgaccagaattagatttgcctgatgatcacattgaaaccttaattaataatcgtttagtgccagaattaaaagacttatatgatccacgtttaggttatgaatatcatggtgcagaagacaaagactatcaacacaccgctgttttcttatctcatgcccatttagatcattcacgcatgattaattatttagacccagctgttccgttgtacaccctaaaagaaacgaaaatgattctaaatagtttaaatcgaaaaggtgattttttgattccatcaccgtttgaagaaaagaattttacccgagaaatgattggtcttaataaaaacgatgtgattaaagttggcgaaatttcagtggaaatcgtgcctgttgatcatgatgcgtacggtgcttcggcattactgattcgcacgcctgaccatttcatcacatacacaggtgatttgcgcttacatggccataatcgtgaagagactttagctttttgtgaaaaagccaaacatactgaattattaatgatggaaggcgtaagcattagcttcccagaacgtgaaccagatccagcccaaatagcggttgtcagtgaagaagatcttgttcagcacttggttcgtttagaactagaaaacccgaatcgacaaattacctttaatggttatccagcaaacgtggaacgttttgctaagattattgaaaagtcaccacgtacagtcgttttagaagcaaatatggctgcgttgttacttgaagtatttggaatagaagttcgttattattatgctgaatctggtaaaataccagaattgaatccagcgttagaaatcccgtatgacacgttactaaaggacaaaacagactatttgtggcaagttgtgaaccagtttgacaacctccaagaaggtagtttatacattcacagtgatgcacaaccgttaggggactttgatccacagtatcgcgtgtttttagatttgttggctaaaaaagacattacttttgtccgcttagcttgttcaggacatgcaattccagaagatctggataaaattattgcattgattgaacctcaagtattggttccaatccatacgttaaaaccagaaaaactggaaaacccgtatggtgaaagaatattgccagaacgtggcgagcaaattgttttataaatttttttaagggagagaaaaaaatgaagttcaaaactctagcaacaacagtgttagcaaccgcagctattttcgcattgggggcttgtggtaacggtaatggggccaaagaatcaaacgatattgtgaaagaagtgaaggaagatacgacaatcactttctggcatgcaatgaatggggttcaagaagaagcgttaacaaaattaacgaaagacttcatgaaagaaaatccaaaaattaaagtggaattacaaaatcaatctgcttaccctgatttacaagccaaaatcaattcgactttaacttcaccaaaagatttaccaacaattacgcaagcgtacccaggctggttatggaatgctgcacaagatgaaatgttagtggacttaaaaccatatatggatgatgacacaatcggctggaaagatgcagagccaattcgtgaagtattgttagacggcgccaaaatcgacggcaaacaatacggcattccatttaataaatcgacagaaatgttattctataatgctgatttgttgaaagaatatggtgttgaagtaccgaaaacattagaggaattaaaagaagcttctaaaacaatttacgaaaaatccaacaaagaagtcgttggtgctggttttgactcgttaaataactattacgcaattggaatgaaaaacaaaggcgttgattttaataaagacttagatttaacaagcaaagattcacaagaagtcgtggactattaccgtgatggtatcgaagcaggttacttccgcacagctggttcagataaatatttatctggcccatttgcaaacaaaaaggtagcaatgtttgtcggtagtattgctggtgctggttttgttcaaaaagatgctgaagctggtggctatgaatacggtgttgcaccacgtcctgaaaaaatcaacttacaacaaggaacagatatttatatgttcgatagtgctacgccagaacaacggacagcggcatttgaattcatgaaattcttagctactcctgattcacaattgtactgggcacaacaaacaggttatatgccaattttagaatctgttttacacagtgatgagtacaaaaattctaagacaaccaaagtacctgcacaacttgaaaacgcagtaaaagatttattcgctatcccagtagaagaaaatgctgattcagcctataatgaaatgcggacaattatggaaagtatttttgcttcatcaaataaagacacgagaaaattattgaaagatgcaacatcacaatttgaacaagcatggaaccaataatcaataaataaacagacgtgggaggttgggatctgagtcgttatggctcgtgttctaaccttcctgttcttttgggcggaagaaggagagaaacaaaatgcaaataaaaattttagcaacaagtgatatgcatgggtacattatgccaacaagttatagtgaaaaaaagatggatttaccttttggaaccgcaaaagcagcaaccatgctgaaaaagttacgggcgtctgccaaaggaccagtttttcaaattgaaaatggggattttattcaaggttcgccgcttagttactacgtaagaaaagcagaaacacattcagtggctgccatcactaaaatcattaatcaaatgaattatgatgttagcattttaggtaaccatgaatttaattacggtttagattatttaaaggaaacgattgccagttatcaacagccagttttagctgccaatattcttggtaaagatggacaaccttatttcggtcagccgtatgtcatcatagaaaaacaaggggttaaagtagccatccttggcgtgacgactcaatatattcctcattgggaacagccggcaacagtcaaagatttaacgtttaaaagtgtcgttgaaacagcggcggaatacgtgccaaaactgcgggaagaagcggatctagttgttgtcgcttatcatggcggttttgaaaaagatttagaaacaggggaacccacggaattactaacaggagaaaatgaaggctacgatttattggaaaaagttcctgggattgatgccttagtcactggtcaccaacatcgagaaattgctacaaaactgaatggaatacctgtgattcaaccaggttttcgaggagctttcgttggagaaattactttagaaattgaacctatggctaaaggctatcacgttattggaagtgacgcagctattcatcctgttggaaacgaacaaccagatacagaagttttagctttgacaacagcgttacatgacgaggtagaagagtggcttgatcaaccagtgggaaatgtggaaggggatatgacgattcaaaatccgaatgccgtacgcctcaaagaacatccatatatagaatttattaataacgtccaaatggcttcaagcggaacggatatttcagggactgcactttttaacaatgaaggcaaagggtttaataaccaaattacgatgcgcgatatcattaccaactacatttatccaaataccttggctgtattgcgtgtcactggacaagacctccgtgaagcgttagaacaaag

SEQ ID NO: 132 - DNA, 5480 bp; double-stranded, linear
tccttacatttcatgttataaaatgtaacatagaaattaagaacaaaagattaagatcagttgaagtccgaaacagcaaaagtggcgaaaatatgttcggtatgttaaactaataagtggacattctgccagaatgggccgataatttaagagaaattagacactttgagggggagttataaatgatcgaaagagaaacttccaatacctttcatttggcttctaaatatgagcctgccggagatcagccagccgctattgctgaactagttgacggtgtcaaaggtggagaaaaagctcaaattttacttggagcgaccggaacaggtaaaacatttacaatctctaatgtgattcaagaagtgaacaaaccaacattagtgattgcacataataaaacactagctggacaattatacggggaatttaaagaatttttcccagataatgcggtcgagtattttgtcagttactatgattattatcaaccagaagcatatgtaccctcaagtgatacatatattgaaaaagattccagtattaatgatgaaattgataaactacgccattcagcgacaagttctttattggaacgaaacgatgtcatcgtggtagcatcagtttcttgtatttttggtttaggggatccgcgggaatacagtcaacaagttgtttcattacgtgtgggaatggaaatggatcgtaatgagttactaaaaagcttagtcgatattcaattcgaacgaaatgatattgattttcaacgggggcgttttcgtgtccgcggtgatgtggttgagatattcccagcttcacgggatgagcatgcgctacgtgttgaatttttcggagacgaaattgatcgaattcgtgaagtagatgcgttaactggtgaaattgtcggcgaaacagagcatgtcgctatttttccggcaacacacttcgtgacgaacgaagaacatatggaacacgccatatcgcagatccaagaagaattagaggcacgtttgaaagtgcttcgcagtgaaaataaattattggaagctcaacgtttggaacagcgaaccaactatgatattgagatgatgagagagatgggctatacgtcagggattgagaattactctcgacatatggatggtcgccaagaaggagagccgccatatacgctgttggactttttcccagatgacttcttacttgtaatcgatgagtctcatgtaacaatgccgcaaattagaggaatgtataatggcgaccgagcacggaaacaaatgttagtggactatggtttccggttaccaagtgcacttgataaccgaccgcttcgtttagaagaatttgaacaacatgtaaaccaaattgtttatgtatcggcaacaccaggcccttatgaaatggaacaaacagagactgttgttcaacaaatcattcgaccaacaggtttactagatccagaagtagaaatccgcccaattatgggtcaaattgatgacttggtgggcgaaattcatgaacggatcgaaaaagatcagcgggtgtttgtcacaaccttaacgaagaaaatggccgaagatttaaccgactatttcaaagaattaggcttaaaagttaaatatttgcatagtgatataaaaacactggaaagaacggagattattcgcgatttacgattaggcgaatttgatattctaataggtattaacttattacgtgaaggaatcgatgtgccagaagtttccttaattgcgattctagatgcggataaagaaggcttcttacgtagtgaacgctcgttagtgcaaacgatgggacgggctgcccggaacgctgaaggaaaagtcattatgtatgcagataaaatcaccgattcgatgcaacgagctatggatgaaacggcacgacgtcgggcaatccaagaagcatataatgaagaacatggtattgaaccaaaaacaattattaaagaaattcgtgatttgatttctatttccaaaacagctgataaagatgaaacagtggttcaattggataaatcatataaagatttatcaagacaagaaaaagctgatttattaatgaaacttgaaagagaaatgaaggatgcggccaaagcattagacttcgaaactgcagccacattacgagataccattcttgaattgaaagctgccaaataagtcaaccaacggattaagtaaaagatacgatgaaccatcgtatcttttactaatcttttctctatagaatgacttgaaatgatttgacgtaagagatttagtaaaaggagaacatatatggcaaatgataaaattgtgattcatggtgcacgcgcccataacttaaaaaatattgatgtcacgattcctcgtgacaaaatggttgtcgtaactggactatctggttctggcaaaagttcattagcgtttgatacgctttacgcagaagggcaacgacgttatgtagagagtctctctgcttatgcgcgacaatttttgggacagatggataaaccagatgttgacagcatcgatggtttaagtccagctatttcaattgatcaaaagacgacaagtaaaaacccacgctcaacggtggggacggtcacagaaatcaatgattatttacgattgttatttgctcgggtaggtcatccaatttgtcctaacgatcatattgaaattaccagtcagtctgttgaacagatggttgataaagtcttagagctaccagagcgaacaaaaattcaaattttggcccctgttgtggtcaagaaaaaaggccaacataaaaaagtgtttgaaatgatccaacgtgaagggtatgtcagaatgcgggtggatggtgaaacctatgatgttagtgaggcaccagaacttgaaaaaaataaaaaacatgatattgcgattgtgattgaccgtatcgttgtgaaagaaggcattcgctctcgcttgtttgattcgtttgaagcggctttgcgtttagctgaaggttacgcaattgttgatgtgattggtcaagaagaaatgttgtttagtgaacattatgcttgtccttattgtgggttcacagtcggtgaattggaaccgcgcttgttttcatttaatgcaccatttggcgcttgtcccgattgtgatggtttaggtgttaaattagaagtggacaaagacttagtgattccagatcccactaaaaccttgagagaaggggccattgttccgtggaaccctattagttcccaatattatccacaaatgttggagcaagcagccaccagttttgggattgatatggatacgccgtttgaagaattacctgcagaccaacaagaaattattttaaatggttctggcgagaaaaactttcattttcattatgaaaatgactttggtggtgttcgtgatgtggaagtgccatttgaagggattttaaaaaatattaaacgacgttatcatgaaacgaatagcgattttacacgagatcaaatgcggttatacatgacagaattgacttgtcgaagctgtcaagggtatcgtttgaatccgcaagctttagctgtaaaaatcaatggcacgcacattggtgaagtcagtgaattagcaataaaaaatgcggtccaattttttgaaggtgtgtctttatctgaacaagaaacaacgattgctcggccaattttaaaagaagtcgaagatcggttaaccttcttaaaaaatgttgggttagattacttaaccttaagtcgagctgctggtacactttctggcggagaagcacaaagaattcgcttagcaacacaaattggatcaaacttatcaggcgttctttacattttagatgaaccatcaattggtttgcatcaacgagataacgaccgcttgattgactcattgaaaaaaatgcgggacttaggcaatacattaattgtggtggaacatgatgaagatacaatgatggcttcggattacttgattgatgtgggacctggcgctggacatctgggcggtgaaattgtagccgctggtacgccggaagaggttgctaaaaatccgcattcattgaccgggcaatatctttctgggaaaaaagtgattcctgtaccaaaagaacgtcgcaaaggtaatggcaaagcgatcaaagtcactggtgccagtgaaaataatttaaaaaatgtcagtgttgaatttccgctgggtgaatttgttgctgtcacaggcgtttcaggttcagggaaaagtactttagtcaatcaaattttaaaaaaagcgctggcccaaaaattaaatcgtaattccaataaacccgggaaacacaaaagcatcactggttatgaagccattgaaaagattgttgacattgaccaaagtccaattggtcgaacaccaagaagtaatccagcgacttatactagtgtttttgatgacattcgcgatttgtttgcccaaacaaatgaagccaaggttcgtggctataaaaaaggtcgctttagttttaacgtcaaaggtggccgttgtgaagcttgtcgcggggatggtatcatcaaaattgaaatgcactttttacctgatgtctatgtgccttgcgaagtttgtcatggcaaacgttataattctgagacgttagaagttcattataaaggcaaaaacatttctgatattttagatatgacggtggaagatgccgtagaatttttcaaacatattcctaaaattcatcgtaaattgcaaacaattgtggatgtaggcttaggctatgtgacattggggcagccggcaactactttatctggtggggaagcacagcggatgaagctagcgagtgaacttcataaaaattctaatgggaaaaacttttatattctggatgaaccaacaacaggcttgcataccgatgatattgcgcgattgcttctagtattagagcgtttagtggaagcgggcaataccgttttagtgattgaacataacttggatgtcatcaagtctgcggatcatgtgattgatctagggccagaaggtggcgacggtggtgggacgatcgtggcgaccggaacaccagaagaagttgctaaagtcaaagacagttacacaggatattatttaaaacgtgttctgaaataaacattaatgattagataaagaaccttgtttttatgggaaacaaggttttttattataaaataacaaatattttttaataaaaattaaaaataaatgttgacttaatgtgtaattaaaagatatactatgtttgttaacaaaataacaatgaatacgaagggaagtcttaaatgaaaaacaaaaaaataacaacaagtttattaacagcaggaatggtcttagctatcggaatcacaccttttgtacatagtaacacatggaagcagcgaccttaatttcacaatcagaccatgaaaagtaatgagttttaccagaaagactaaaagaagcacgggcatcaattgggccggcgcagtccagcgt

SEQ ID NO: 133 - DNA, 10391 bp; double-stranded, linear
caggctttttaatgacgaatgtcgttcaacaatccatgcgcgatttgcgtcgcgatattgaagaaaaaatcaatcgtttgccagtttcttattttgataagaaccaacaaggaaatattttgtcacgggtgacgaacgatgtggatgctgtcagcaatgcgatgcaacaaagttttatcaatattgtttcagcagtcttaggtattgtgatggcggtagtgatgatgttcttaatcaatccgctgatggcgattttttcagtgattatgattccgttgtctctgattatttccagaacaattgttaaaatctcccagaaatatttccaaggaatgcaaaattctttaggagacttaaatggttatgtccaagaaaatatgactgggttcagtgtcttaaaactatatggtcgggaaaaagaaacccttgaaggctttaaacaagtcaatcatcgtttaaatggttttggtttcaaagcatcctttatctcaggattaatgttgccattggttcagatgaccgcttatgggacctatatcggggtagctgtccttggtagttactatgtggttgctggtgtgatcgtagtggggcaattacaagcgtttattcaatatatttggcaaattagccaaccaatggggaatattacgcagttgtctgcagctttacaaagcgcttcagcttcgaccatgcggatttttgaaatcctagatgaaccagaagaagaacttaacgaacaagatgttcctttgccagaacctattttaggctctgttgaatttgaaaatgtcagctttagttatgacccagaaaaaccgttaattcgtaatttgaactttaaagttgatgcgggccaaatggttgcgattgtgggaccaactggcgctgggaaaacaaccttaatcaacttactgatgcgtttttatgatgtaacagaaggcgccattaaaattgatggcattgacacgaaaaaaatgaaccgtagtgatgtccgatctgtatttggaatggtattgcaagatgcttggttgtataaaggtaccattgcagataacattcgttttgggaagttagatgccacggattatgaagttgtcgatgcagcgaaaacggccaatgtggatcacttcattcggacaatgccagacgggtatgaaatggaaatcaattctgagggagataacgtttcccttggtcaaaaacaattgttgaccattgcccgagcggtaatttctgatccgaaaattttgattttagatgaggcgactagttcagtcgatacacgcttggaagccttaattcaaaaagcaatggatcgtgttatggaaggacgaacgagtttcgttattgcccaccgcctatcaactattcgtgaagctgatttaattcttgttatgaaacaaggagaaatcattgaaaaaggtacgcatcatgagttgctggaacaaggtggcttctatgaaaaactatacaatagtcaatttgctgaagaaggcgactatgaggaataaaaagaggtcgggacagaagcgtttaactccgagaaataagaaggaatttccgaaaattgttctgtaatttttggagaattccggcttatttccgaaggagttgcttttgttcccgccgtttatcagtttttgagcgtggagcaaaaatccaaagtgatttttgtcccacgctcttttcttgtcttttttactatgaaagtgaggaattcttgtctatacttaatgaaaagaggtgacagagtttgaaaaaagaatattttattgctgctagtgcagatgtctatggaaacgtacaactagcaaaggatagtaatatttggtttcagtcggtcttaagaggtgacagtaacacaattaccattggtgaaggtagtaatattcaagatggcacgattattcatgttgatgaagatgccccgacaattgtaggcaagtatgtaacggtgggccatcaatgcatgttacacggttgtaaaatcggtgatggtgctttgattggcatgggttcaaccattctaaataatgctattattggagaaaacagcctgattggtgcgggctctttagtgacagaaggcaaaattatcccgccaaatgttttagcatttggtcgacccgcgaaggttatccgtccgttaacggcagcagaaatagccagtaatcatacgaacgccttacattatattcaacgagcagaagaatttcgccaacaaaaatacccgaaactaacatagaattaggaggaaaatgatgaagaaaattaaagtaatgacggtttttggaacacggccagaagcaatcaaaatggctcccttaatcaaagttttagaagagcaaagtcaaggatttgactctgtagtagtcgtaacagcgcaacatcgccaaatgttggatcaagtgttagaagattttcaaattacaccgaatcatgatttaaatatcatgaaagatgggcaaaccttaacagatattacaagtcgtgttttgaatttattaactgaggttcttgtgacagaacagccggatattgtcttggttcatggcgatacaaccacgtcatttgcggctgcattggctgctttttatcaacagattccagtgggacatgtggaagcaggattgcggacctggcaaaaatattctccgtttccggaagaaatgaatcgtcaactggtagacgtgttaactgatatttattttgccccaaccactcaaagtaaggacaatttaatcaaagaaaatcatccagaagaacatatttatgtgactggcaatacagcaattgacgcgatggcgtacaccgttgatgcccactatcaaaatgatttattggaaaaaatccctacagaccaacgcatcgtgctaattacaatgcatcgtcgtgaaaatttaggcctgccaatggcaaatgtgtttaaagctgttcgtcgacttgtaatggaacatccagaaattgaagtcattttccctatgcacaaaaatcccaaagtccgtgaaatagtagcggaacacttaggtgaattagctcgtgtgcatttaattgaaccattggatgtcaaagattttcaaaattttgcagcgaaaagtgctttaattttaactgattctggcggtgtgcaagaagaagctccttccttaggtgtgccagttttagttttacgagatacaacggaacgtccagaaggcgtagcggcaggaacattgaaattggttggtacagacgaacaagtagtctatcaagaggcgaaaacattattgactgattctgatgcttaccacgcgatggcgcatgcacaaaatccgtatggggatggtcaagctagccgccgaatcgttgaagccattgcctatgaaatgcagaaatcagataaaaaaccagatacgtttacagcaaaataaataaaaaggcagagaagcgctgaaaaatgtgcttcttttgcgtatcttattttgaagaatcaattagacaaaaaatgctagaaagtagtgaagtgaagatgtatcaaacgattttatttgatttagatggcacaattacggattctggtagcggcattatgcgttctattttatacgcaacagaacaattaggctggccagctcctagcgaggagacattacgttctttcatagggccgcctttatatgagtcgtttttgcacatggcgccttcagctgaagcagcgcaacaagcagtgggtcattatcgagcgtattatcagagaaaaggtatgtttgaaaatcatgtgtatccagggatcccagaggtactaataaggttaaaggaagcgggagcaaagttatacattgcgacttccaagccagaagaatttgctaaaaagattattactcattttgatttagatcgttattttacaggcatatatggagcgagtatggacggtcatcgttctaaaaaagcagatgtgattcagtatgcattaacggaagctcaactagacccaaccaaagaagcaattatcatggttggtgatcgtaatcatgacattcttggtgctcaacaaaatggcttagatagtataggtgtcttgtatggatttggtgaagaaacagagttacaagaggcgggagcgacattcctagtacactcgcctaaagacttaggtgctattttgctacgaaattcttaatagaaaatggattttcgataaatttaggaggattttaagatttattatcgtttcaatagaaaagcgccatcataggctttaaacgttatcaatgatgaattttttatcggggaatgacggtctttttattaaaaacatttaattttaaagaggtttcatgtataatagtttcagtcataaacgatagaatagtaaggagggttagttttggctaatgataaccaaaataaccaagatcccaaatcttcgcttagagatcaagtaactgggtctttaaatggtagaaatgatggcgatcaacctgattcctctgaaaaaaatgataggtcaccccaaccttcatctgatgaatcacaagaaacagcgagccgcacaacacaaacacgtgcaggttctagagctgctcgaagacgtgggaaagacaagacaacacagacagtcgaagagccaaccccgattgaaacagacgaaaagccaacaaatacaaaaaaacaaacacgtaaaaaagaagatcgtttagtcggtcgtatcgtgttaattgtagtttctgtattagttttaatgatggcaatctttgggtttactttttataaatatgtagatgctgggctacagccactagacaagaacaataagaagcttgttcaagtgcatatcccagaaggatcttctaataagcaaattgctgcggttttagaagaaagcaacgtcattaaaagcggaatggtttttaactactacgtaaaatttaaaaacttaacagattttcaagcgggctattatcaaatgtctccaagcatgacactcgatgaaattggtgaaatgctaaaagaaggaggtacgccagaaccaactaaaattgcagatggcaaagtaacgattcctgaaggctacgatatagataaaattggcgaagctattgaaaaaaatacagatttcaagaaagcagatttcattgcattaatgaaaaacgaagacttcttcaatcaaatgaaagctaagtatcctgatttacttgaaagtgctgcaactgcagaaggtgttcgttatcgcttagaaggctatttgttcccggcaacttatgattactacaaaaaagcaacacttcctgaatttgtcgaacaaatgattgctaaaatgaacacagtaatggaacaatatacgccgacaattcatgcaaagaatttaaccaatcagcaagtcttaacgttagcttcattggttgaaaaagaaggagtcaaagaagcagaccgcaaacaaattgcgcaagtattctttaaccgcttggctgccgatatgccaatccaatcagatatttctattttgtatgctctaggagaacacaaagaaactgtaacgtatgctgacttggaagtggactcgtcttataacttgtataaaaatactggttatggaccaggaccattagatagcccaagtgaggagtcaattaaagcagtcttgaatccgacaccaagtgactatttatactttgtagcagatatttctacaggaaaagtctacttctcaaaaacatatgaagaacatcaagtattagtagatcagtatgtcaataattcaagtagtgaataaaatgaaaacataaaagagcttggtgaatcaattttgtatgattcaccaagcttttagatactcaaaaagtaatctgtttaacagagggaaagagtagcaactagaaatttatataaataaaatttagcaaaatcacaaaaattcaataattatatttacaatttagaaaaagcgtggtactcttttgtggattgaaagcggaatttttttcaataaccaaccaagaactacgtatcgttaagcgaaaaaggagaattaacatggtagaaaaagtatatccaatgactcttgaaggaaaagaaaaattagaacaagagctagaagaattaaaaacaattaaacgtaaagaaatcgtagagcgtattaaaatcgctcgtagctttggggatctttcagagaactcagagtatgaatcagctaaagatgaacaagctttcgttgaaggacgtattacaacgttagaaaatatgattcgttttgcagaaatcatcgataatgatggcgtggaccaagacgaantttccatcggtaaaacagttactttccaagaattgcctgatggagaagaagaggaatacacaatcgtaggaagtgccgaagccgatccattttctggtaaaatttctaacgattcaccgattgcgcaaccnttaattggtaaacaattaggcgaccaagtgattattgcaacacctggtggcgacatgacagttaaaattacaaaagttgaagcaaactaaataattgagtagggcaggcagcttccaaggcctgtcctttcgcaatctatgacatttagggctaaagtcctatggtaacctgaggcgcaaaccactatgattaaataaaataaacgagtaaaataaatgacagagggaggaggcaaatctatgaataacccttggcgcttttttatcgtcgcagaagcattactttttattctggcgttatggcaaattgtacataatcctggattagctgttttattaacaattggcgttttacttgtggcctacgtttccaggaaagcatctaaaacacattttaacaactttcaattcgtcctcggcgttgtttttattgtcattggtgcaatgaatagcacggctgtttggtttatgttgatttttggcgtactctttatcggcttaaaaggctttgagatttcaggcgtggatatagctgagcgagcaccttggcgaaaaaaacaaatgattatggtggagacggcggcaaaagaacctaaaaatggcaaacggtttaaacgccgctggtttgccaacgaacgcattggtaacaatatctatgaatgggacgatatcaatattgatttaatctctggggacaccattattgatttaggtaatacgctactaccgaaagaagacaatattattattattcgtaaaggttttggccgcacgcgaattctagtgccgttaggtgtagctattttgttagaacattcaactttttacggaacggtacgttttgaagaagaaaaatatcaattgaaaaacgaatcattaaaaatttacagcaatgattatgataccaatcttcgtcgtttgaaaattatgacgaacactttagtaggagatgttgaggtgatccgtgtatgaccgatcggatttcaagacgcatgatttcattatatgcgtcccttagcacctttattgttatcttaattacattgttttcatattttcattcgattaaacaaaaccggtggttattagagcttcttcagagaaaagtcttttatttaccactaattgtgcacattgttctcatatccttactaataggcttattgacctttttactgatttcattggttcaaaaagggcaatatggacggattgaagaaaaacttcggttattggccaacggtaattatgaaagtccagtcttaaacaaaccaacgaccagtgaaaatcaagaccattatctaaccgaagtcgaacaagatatttggtcgattaaaaataaattattagagatgtctaaagaattgcaattattaaacagtcgaccgcaattaatggatgggcaaacaaaagaagaaattttagagaacgagcggcatcgtttggcgcgggagttgcatgattcagtcagtcaacaactttttgcagccatgatgatgttgtctgcattaaatgaacaagcacaacgaacagaaaccccggaaccatatcgtaaacaactagccatggtggcagaaatcattaatgcctcccaatcggaaatgcgcgcgctactattgcacttgcgtcctatcagtctagaaggaaaaagtttgcgtaaaggtattgaacaattactgaaagaactacaaacaaaaattaaaattgaattgatttgggatgttgaagatgttcatttaaatagcagcattgaggatcatcttttccgaattgtgcaggagttactttcaaataccttaagacatgccaaagcaaaggaattagaggtatacttacaccaagtcgataaaaacgtgttattgcgtattgttgatgatggtgtcggctttgatatgaaggaacaaagtaataaagccggtagttatggcttaaataatattcgagaacgtgttgtcggcatgggcggtacagttaaaattattagttttaaagggcagggaaccagcgttgaaattaaagttcctgtcataaaggaggaaactgcaagtgatcaaagtaatgttagtggatgaccatgaaatggtccgtttaggcgtttcatcatatttatctattcaagaggatatagaagtcgtaggcgaagcagaaaacggtaagattggctatgaaaaagcattggaactacgtccagatgttattttgatggatttggtaatggaagaaatggacggcattgattcaacaaaagcgatcttgaaagattggccagaagccaagattattattgtgacgagttttattgatgatgaaaaagtgtatccggcgattgaagctggtgcagcgggctacctattaaagacatcaacagcacatgagattgctgatgcaattcgggcgacttatcgcggagagcgtgtgttggaacctgaagtgacgcataagatgatggaacggttaacaaaaaaacaagagccggtgttgcacgaagatttgacaaaccgggaacacgaaattttaatgttgattgcacaaggtaaaagtaatcaggaaatagctgatgaactctttatcactttgaaaacagttaaaacacatgtttcaaacattttagcaaaactagatgtggatgatcggacccaagcggcgatttatgcttttcaacatggtttagccaaataaatatcagataaatccataaataaattctaggaaatccttctaggaatttatttatggatttgttatactaattttaacgaacagacaggagcggtcagaagaaatgaaacaaaattttgcaattattggtttaggacgttttggcggcagcatatgccaaactttggtggaagctggtcaagaagttttggccattgacagcagtgaagaccgtgtcaatgaatatatgaatattgcaacgcatgcagtggtggctaacgcccaagatgaaatgacgttgcgttctttagggattcggaattttgatcacgtagtgktggcaattggtgaagatattcaagcgagtattttagtgacactaatggttaaagagatgggggttcccaatgtcttggccaaagcagtcaatgaatatcatgcccgtgtcttagataaaattggggcagacatggtcgttcacccagagcgggatatgggcattcgaattgctcacaaacttgtttcacgcaatattttagattatattgaattatctagcgaattttcattagctgaggttcgggtcaccaatcctaaattttacaataaaaccttagcagaattaaatttccgtcagcgatttggtttaactgtggtagcgattcgccgctcgaaaacagaagtaattgcttcgccagatgcttctgaaattgttcgagaaaacgacaatttattagttatcggtgataccgcagacgtggatttattagatgaaaaaatgaatggctaagcactttattctctaaaagcactgcgctgtgctacaataaatggcgacagagatgtgaaggaggaacaaagaatgaaattagaagtgacaccgaaagcccaacaatggtttaaagaagaaaccggggttcagcctgagacaggcattcgttttttcggaaaaatttacggaaaaacacctgttcatgatggtttttccattgcgatgtctgtagaagcgccagatgagccaatgattaaagagaacctagatgggattacctattttattgaagaaacagatgattggttctttaaagggtatgatttgattgttgattatgatgaaaagaatgatgaaccgcgttatcmatttgaagcaaaccmagragatttaacmaaataattttagtgctaaacaaaagaggctgaagtagtgcgtaggactatttctgttgctttcgtttaaccgctagtcanngtgagaaaaaatcgttttggattttttctcaggtctttctatttaagtattttagttggatatcgctatttaataa

SEQ ID NO: 134 - DNA, 3852 bp; double-stranded, linear
aatgttaaaagganaaataatagagttaaagttgaaaaagtggagttagattatgtaggaagtattamtgtkgatakggatttattagaagcagsaggaatatatgaatatgaaanagtacaaatagttgatgttaataatggaaatagatttgaaacttatacaatagctggagagagaggaacagggatgatttgcttgaatggagctgcagctagatgtgtatcaactggagataaaataattttaatggcatattgtgaattaaatgaaaatgaggttaaggatcatagacctaaggttgtttttgtcgatgataataataaagttgaaagagtaacatcatatgaaaaacatggaaggttatcagatataattctttaggttttgtaatgttatttatatatagctagactattattgaaatatttattgattactaattggatagatgtcaataaagtagacacaaaaagagaagatacttaaagattttcaaagtaaagagcctccatttcatttggtgtaagcatatctcatgttccatgaggacgtttggtgttatagaagccttcaatgtaggcaaaacaagccaaccgtacttcttcaattgaatggaatgaacggcgatttaattcttcttttttcatatattaaaaaaaagcttcggtaacggcgttatcccacggataacctggttttgaaagtgagtggacaatcggatgatcctctataaattttctaaattcaaaagaggtatattgagacccttgatctgtatgaaaaagaacagaactcgttaatgcgaatggcaacagtttttttgacaaattttataaggtgcagaacttctttccgtatactattccgattgtcctagacaatgagcctcctcggatgtgacgatcttcggcaggagctaacagttaaagttagactgcctcgctagcgttagcacatccgagctcattatcaaggattcgctgcgccaatctctggttacggtaaccaaccggtgtctcgtagccaagtgtaccgtgcaaccgaagtggnttccaccaattgacatagtcaaataactccaaatccaattgttgtaaggtttcaaatgtgtattgatagacaaattctactttcaacgacttataagttgattcagctacggcattatcaaaaggacagcctttatgactcaatgatcgattgatgtcaaaagtcgttaataattcatcaatagcttggttatcaaactcttttccacgatcagtatgaaaaatctcaacctctgtcagaggttgtctgatacggctaaatgctttttttactagaacggcatctttatgttctccacaagaatagccgagaatttctcgattgaacagatccaaaatgaaacagacataattccattttttcccgactcgtacataagtcaagtctgttacgatcgcttctaatgggttgtctcttaagaatttacgattcaatacgtttgtcgttttggcttcattgcaagtagaatgatgtactttaaaataagcaacagtatagctcgattttaatcctctatttttcatgattctactaatttttcgtcggctgatctgaatgcctcgttttgataaggctttttttatttttcttgagccgtaggctttcggctgaggataaattcttcagcgactacttcttcaagttctgattcgtctttctttggttttgattgataataataggactgacgtgatagacctaatattctgcacatcgctgatatagggtaaagatgcttattcgcatcgattacttgtctcttcgtccgaatatcagcgctgcttgctttaaaatatcattttccatttctaattgctggtttcttttacgtagttctaacaattctttttgttcaggcgtaagattatctttttctttgaatgaaccactcgttttagattgctttacccatttgtcaaatgctgaagccgttagttcatattctcgaatgatttctacacgtggctttccagctaagtaaatattgactatttgttgcttgaattcttgtgaaaaagttcttcgtgttctcttagatataaaaattcctcctggtatgttttcttctagtctacacaccttaatttttctgtctagttaattgtagcctatccagtgcttctgccggagaaaatcagatccgaggatgctcattgtcaagggcaatcggagccataacaccgcagcattcacaacaccttataatttttgtcaaaaaaagtgttgccattccnatagatgaaattcttcaattgagagtgtaaaatattttgtgtaaatagaaaaaaggaagtcccttctgtagaatagagttaccacaacacattcacagaaaagaggacttccatatgaacgattttactacagaaattctaaagacyctagcgaacnaaaggcgatttgatgaattattagttgctttaattatttataaataactataatgcttttattatagtatcgtaaatagtttatatgaatacattaattgtaaaaatggtggatggctctgaacgattaacaatatttttttgttttgactatcattttattgttcagaaataatttattgcactttttgaggtaaatagtttagaattattttaatataagtacttcagatttaataaaggagaaatatctaatgaaaaaaattgatttaataaatatgataggtatgttaatagggatattagtaaatatagtaattttcacagattggctcggggtgttattttctaatcttattcccatacttattataggcatttgtggaattatactttcaatattagaactttttgaaagcagaaatacaatgaatagaatatttgcttgtattatattaattgttaatctattgcctatggtctattttacttttttatattttgcactgggatgaaataaattaaccaaaagtttctttttcttataatgtgtatcaatattaaaactgaaaaagatatggataataggatcaaagccctcattggaacactcaatatattatcagatttaaatttcaaatagataatttcattttttagtaatatcgaaagatacttttttaatgatgagagtgtaatgtaaaccgtgtaagtaaccattaatcctaggcaggtggttgcttcgcggtttttctttttctacaataagatcaagaggtgattacacgatggctagaaagaaaagaaatcctgatgccgaaaagttagctgaatccattctgaatgcctatcaacctgaatctgtcgatgacatgcaagatgctttgaaagatgtgtttgggcccctttttgaaaaaatgcttcaaggagaattgaataatcatttaggttatgatgcccattctaaagagcctaaggaacacgataaccgtcgaaatggctatggaactaaaacgcttaaaaccagttttggtgaagtagctattgatgttcctagagaccgggaagcttcctttgaaccagagttaattcctaagagaaaacgagatgtctccgacatcgaagggaaggttctttccatgtatgcacgaggaatgagtcaacgagatattgccgcaaccgtcgaagctatctatggctttgatatttcccatgaaatgatttcagatatcactgacgctgtccttcctgaattggaagaatggcaagcccgccccctagcaaagtgttatgcctttctattcgttgattgtatgtatgttactttacgagaaaattatgaagccaaagaatatgctgtatacaccattcttggctatgatctcaaaggaataaggagattttagga

SEQ ID NO: 135 - DNA, 8805 bp; double-stranded, linear
attggctaagcgtttaaacaaatgcgtcttctaaataayaggttttaatgacatgacttanttcycctttttgtccataatttcttgtaatcgtgcacgattttgttcatttcttcttgattgacagaacgaatgtcaaattcaatgatgccattgttggcttgatattctcgcgtataaatggctggactttctgcttttaatgcttggatgacttccttagcggtttttctgccgtccactttgacactggcgcgataaatgtctcggccagcgccatcttggacgattttggcggttaaatctgataagttgttgatggcttcaacaaacggttttaagcgctcttgcatcgaagcccctgattcactgccatgtgccaagtattcttccactgcttgcgtaaagcccaagatattgtctttgccaattttcattgctcgaccaatgcctttgccttgtaggcgcacccagtcaatgtattcttttttcccgaccactaaaccggcacttggcccttcaattgctttggcgccgctgtaaatcaccaaatcagcgcctgcttcagtgtatttgaaaagatcttcttctgctgccgcgtcaacaattagcggcaccttgtggcgttgcgccactttggccgcttcggccaccgtcagcatacttttttgcacggtatggtggcttttgatgtatagaatggccgctgttttttcagaaatcatcatttccacgtgttctggactgcacatgttggcgtagccagcttccaccacttggccgccaccttgcgctaccatgacttctacaggcgtgccgtagtccacgttgtgccctttaggtaaaacaatctcccgctgttcgattttttctgtatagggatgatacgcgtggtacaagctgccttttccaatcaaggcagccaccgattgggcaatccccgccgaagccgaggaaacgatttgggcatcttctaccttcaacaagttggctaaaaaggcccctgtttgcacactaagttcactcatttcaaagaaatgttcgccgccgaatcgttgagctgctaggactgcctccgaaactttggagacacctagaatggtcattttgccagaagcattaatgacttcttttaagtggaatttttcgtaactaattgtcatagatttgtcctccaataattgttttgattgggcgaatttgctctttggctactcgtgtcaatccattagaatcagtcaatgttttttcttctgcttgaatcgtgaaaatcgttaaatcagcatctttacctatttccaacgtgcctttttgcgttaaatggaaattctcagcaggagccttggttaccttttcaataatttctggccaatcatagccgaccacacggagtttttccatcgttgtggctaaatcataaacaggaccattttctcggttacggatgtagatatctgtgctaattgatgcagctttcattccctcgcgcaacgctgtttcagctacgtgaaaattgaaactatccgtaccatgcccgatatcaaatacgactcctttgttgtacgcttgccaagcgaaatcttttattttatccgttgcttggtctaagataccattttctttcccattaaaacaatgggttaggacatcccctttttccatcaaggctaaaatttcatctaaatgaggcggtgctgatccaatgtgaaccattaagggaatttcttggttctcttgctgaatctgtttggccaattctaaaggcgtaatgccgttatcgccaataacggtcctactcatacgggctttaatccctacaacaaaatctggtaattcttgaatcgcttttttgactaaactcgcttgtactttacttaaatctgcgagttcgtcctgagcaacgatgccccatttagaaatattgactaatccaaaaacatttgtttttgcttgctgcgctaagtcataaaattcatgaatgttttcagcacctgttgtcccagcatcaatcactgtcgtaacaccctttttgaccccaatttcatctggataatcataataaagagccattttttcaaaacaatgaacgtgatcatctatccagcctgcggatacataagtacctggttctaagtggatagtttcttttgcagaacctgaaatagttgctgcaacagcagctatttttttctctttaattgcaatttcaacaggcataccatttactgtctgtccattttttataagtaaatcgtagtccatattcttccctacttttctataaatctaaattttgtccaaggcttaatgaattctaataatacaagttcttcttctataatacgccctactcggtttttgcgtgagtcttgatgtggttctaaaacgacttgtaattcatttttgtattttccaaatgcatcatttcccacaacaacatctccaggttgtagcattgcttgattatcatgtgggggattaacttcatttttatattttttacgcacttctgtggaacgaatcatctgctgagtgatatctccacggcgaaaatgttgattttttgttacgatttctttttcaatttcagaagtcgcttcttcaaaaacaatggtcaattctgtttgataacgattcaactgacccaatgcttctaattcttcgttggaagcataagcatttccaataacaacatcatcaattaaatttgttgcaaataaatgtttagcttgaacagtgactggcaactgtctatgcatttctaaagtaggtagcccatcattcacatcccaaggaccaatttcacctacctgtgatgaaataaaagcagctgtccgaataccttcctttttaaaacggatgctacatttttcaaagaaatcatacggcaatgcagttcccgcttgtggataaaagttatgacaaccatataagaaaggtcgattcgcttcatacgtcaaaatgttatcaagataagcgacatcattactcatattcaactcaatagccacgccgaatggattaaacgtcaacatggcttctttatttccatcaaaccctgtatccaaccgaatcccatcagctcctaattcgctgaaaaaagtcaaatcatcatatgaaatttccaattcatcaaagatacttggaacgacatctaaaattgtttcaaatcctaaatttttcgcataactaattaattctttaaattttttctgaaccgcttctttgccatcggtcacttctaacatactcataaaaattcgagtaaacccacattcgctggctttttttaaatacgctttatcttgattgatatcactatgatctggataaactgatacacctaatgctcttttcatcttcgttctcacactccgctattttcaaatttatttcgaaatttccaagcaatcaccgagctacacaagattgttgtagagccaacgagcaatactggttgatttagaaatccgccaattatcatggaaagagtaatacaaactgccgtaaaaaccaacgtctttaccaaaccaaattgataaacaacagtaggcaactgccctttttctataataatttgactaacgataaaaaagaaaatgaaccaaataatcatcttatacgctcctgactttcttctctgacttagaaggggcaggatattcatatcagaacacccgccctaacattttttaattttttgctgcttgttcagctgctaattcttctgcttctttatccaattgttgtttttcataaactttgaaaaatggatagtagatagccattgtaattaagaagttaacaatcactaatactgcggccgagaaactccaattggtactcatccaagcagcaattggtgctggaattgcaaacgctaagcgtgcagccatcatcggaattatattagcgactgttaagaaataagataacgttgtggtaattaacggtgccacgataaacggaatacctaaaataggattcattacgataggcgttccaaaaataactggttcattaatattaaacaagcctggtaasaacsataaacggccaagacttttcagatacgttgatttagaaaacatcattaaaacaactaaagaaagcgtagttccagcgccaccaatccagataaaccattgtaaaaactgttctgtaaaaatattaggtaactgatgaacgtttgcgccattggtaaaagcttcaaggttttctgcaatcgacatatcccagaaaggacgaataactgggcccataatcgctggaccatgaatccctaaaacccagaagaaacagattaagaagactgttagtaagccgccaaataaactgttaccagcaaggatacctttaagtggcattaataacgtactcaagaaaccattcaaatcaaaaccaattacgtggcgaataacccagaataataaaagaataactgctcctggaattaacgcaataaatgaatttgacacttcaggcggtacgccatctggcatcttaatcataatatctttttcaataaagaagcgataaatttcaacagataacagcgctgttacaatcgcaccaaataaagaagctgaacctaaatttgctaaattaatatagcgccctgctgtaatgacgttgtcaacatcttcaaagacacgtgttggtggtgccgctgttactaaaaaggccattaatgctaaaattccgcacgtcaaagagtcaagcttataacttttggccaatgatgaagcaatcccaaatgttgcataaagtgcaagtaaccccatcgtatagcgggaaggaatatctaaaattgcttgataaggttcaatcaattttgtgtatgcctcaattggaatattttgaaaaattgtaaagaatgagcccacaattgttaaaggcatcgttgcaattaatccttttctaatcgctgtcatatggcgttgcgaaccaaatttattcgcaatcggcattaacttaacttccatccactgtacaaaaccattcatttgttaattcctccgttcaactaataaarataataattatttcgcatttataataacatagtaacattataatgtaaacgcttattcttatttgtgacagagaaagtgcaaaacaaaaggctttttcttattataaagaaactgggaatattgcaccaaaaatcattgcgcctaaaattgcgcccccagcgattggttttttccaaatgtaaaaacctaaagctcctaatgtagcaccaatcccaataggaatcgaagcacccgccgcactcaaaataattaacgggcctaagaagcgtcctgaggcattaccagcccccatcatcacatccgcaccaaaagtggaatttccttgattgatagtaaatttccgaatcaacacaattacgccaccaactgctaaccctagtagcgcacctgttaaaagtgctaagccaaagttttctacaggtgctttaatacccatgctgaggaaaattgcaggtacgccaatcccgatccccgttaaaattgagccacctaaatctaaaatcccgactaaagaaccttctaaaattcgtgcaaacaggaaacttgcaccaaatgctgcggcagcgccataagaaccaccatctaaaccagcttttagcatcgcaacaattgaaacttcattaaaggcgcccacaccataaactacatacatatgtgttcctgcaaaaattgccgctgacataatcccgactaaaatgggaaagccccaatcagcataccaaaaacttttgccttttaaaccttcttgaatttcttgttcttgttgtgcccattcatttttttcttgctgttccatctatgagacctccttttttctatttaacggtgaagacattgtgtaaattatttaaccattgaggaatagacaagcggaaactttcgatcatttctaagtcgaaccctcggaagaagccacttaaaataaataataagataatgacaccaagcatgccgcgtgtcattcgggtccaccctaaatcatcgacacctttaccgattaagatccctaatacaactcctgggacagcattgcccatgactaattgagataatccgccaaataatgttccccagaaacccgtccgttttcctgcatctaaagccgctagccagaataaaacaggcatcacagtattgattaaaatcgttgctgcaggtaccaacaccgcaaccgctgttacttgtagcgattctggaattgctgcagctgtactatttaagaaagccacagtcgccattcctacaaagaccccgacaatccccatttttttgggattatgcatcgttttagtgacatctttatcctttaccaataaaattgctgcagcccagttaggcacaatccggtgggtcacatcttgtgtaaaggcccctgctccgacggccgaagcccaagcattaaagaaaaaacctaaaccaaaagaaaagtgtgatgctggatctccttgtgccgcgttcatttctcctaatgttctaaatgcccctaacccttgcgtttgtggtgcatgaaacatccgagcagcgcctgcgccagctgcaaaacctagtaaaccaccaataagcaatgacttcagcaaaatgattacaaattccattccttcttcctccctttatacgcctctttttgaaagaaacggaactactactgcgttcggttctttaattgtttccgttaaaaaatcaacttcttcgactgcaatggcttggatttccacttctacagctagttcgacatgataaatcactctctttctaggaaagaagaagaacagaaatttttctgtataaacttgttcttttgcctgacgaatagttacttctttcggttcaatccggatgaggacctctgttgtttcttttaatactttttttgaaacatcattcaatgcacttgcaaaagcttcattcttcttattaccttttccagaaacaatcacggtttgtgttgaccgttttgtggcatccataattaccgctcctttctaagttactactttctatgctccgtgtttcttaataaatgcttcagttactcgtttaccaagttcttcctgatccataaaaccaaatccaagaacagttttcccatcgttaattgctgttaccccttcttcgattgatcgcatgccatgtctttcgggatacccgtatttagtagcagccgttaacgctcctgcaccaccacttccacagaaagaaatgcctaaatcagccttttcttgttgcatcacatctcctaaacgcatatcagcgcccattcctggaacaacaaccgcgcgaccaccggcttgctccactccttttgcaacattttgtccttttcctaaacgatctgcgataactactgtaatcataacttttcctcctattaattgttttgtttagcaacttcaaaatgaacagctaaaacataccattcatcttctgataactgaccaattgcttctgttgtttcttctgcaattttcaacgtttctggcgttagttccgtaaataacgtccgatcaacaccagctaatgtcgttccttctcttgaacgattcagcatctcattgagatggttaatcaaaatcgtccactgtaattccgttggttcaatttgtgcttctgctaatcgcgcactggtttgtttgataatcgattgtagcttttctggttcagcactttgtcgaatgatctcctgtgcttccattgctagttccatcctcttcctcctttggttgttctaaataattaagtaatgctgaaatttcagcatgattgacaggtaactcatttttagcaaataaacattcaatttgccgaatttcttcttgcctttcatgagatacttctctattacaaggaatctcttcgtattgtttattaaacgtaatccgatgtgtcattaataaaacgtgaagtaaaaaggcttcttgatattcgctcagtaactttgtttgaaacattcgttttaactcttcataaataatatacgcttttactaataaatcttggctttgtatccgttcatttttttcaattacatcagatttcgtggagcgagcggtacctttcccttgacgtttccctaataaaattttatcgacctcttcccgaatcaaacttaagtctgtgtccgtcaacaatggactaactttaataaatgggtatgtcatttcttcaattgggaaaatactcaataccaaatcgggcttttctgcttgaatcacttcagttgcatttaaaacagaagcaaatcctgcgagttcaacgtttggtacttcctctaaaattttttgttcaattaaactggtcacacctaagcccgtcgagcaaacatacacaatcctaacaactttagcttcctgctgttgtcgttcctgagctgccaaaaaatgcaacgcaatatatgcgcagaaagaatcgttgactaacaaaacagaacgttgaattaattgtttacaggcactttgaatagctaaaaacaacgctgggtgttttcctttgatttcttcagaaaacggattgtattcattaataaataaatgtttctttgtaaaacgtaaggacaggtgtgcaaacaagttcgtaaataattggcgatcatttacaaaaggataattcagctcttttgaaacgctttcaatcacttgctttgttaattgaaccatatcttgccgttgatgggttccgaataaatcactataaatataaaaatattcatccgctaataaaggcaagtcataccgttcaaacacctcttgtaaaagtaaaagtggtattcgtt

SEQ ID NO: 136 - DNA, 2738 bp; double-stranded, linear
tattttttgcttaatataattaatgacatctttcttttgttctttagcctctgatatatattcctttagttctttatccgtaattgttgaactgttaattccttgttcatacaattgtcgtctagtttttgaaacatcatctgttggattcaattctctattctttaaattctcggttgtttcaattgttatagatgatgtagaagttggtgttgtgtccggattactactatcttttttagaagactgggtagtttgctgcttagttgatacttcagtagatgaagcgtcgctattttttcccccagtattattactacatgccgttaaaaataaggctaacaatagtacaataagtttttttttcattatatcctcctataaaataacgaaacatggtcggccttctgtccaatcaattggatcatttgacggggtattccaaagtgcttgtgttgacacccaacctgagtaaaactggcgaccatacggatcataggttaaagtgtaaccatttttgtactcatgaacgacaatagcatgtccaatcccaacattttgatataaaataacgggatatccttcagaaagataggcgtttaatgtagctacatcattaataactttgatcgaacggccatatgattgagctgttatcactaaatcagttgcagaagcgccaaagtatctttgatttaacccgccataagatgccattcttgttgcaacactgacaggatttacattataaccgtaagagcctcttaaaatcatagataaacttgttggaacacatcctgctgcgccaatggtatagtttccgatataagtattaatccattgtgggtcacgttgagaataataataaggttttttctttaatctttctgcacgtaatctgtttgctatctctgctggtgtgcgagcttcatcgccaactaaaaaggmttttccgatcctttaggagcagtttcrccytttctaactaytttgatttgratrgcttcyaaatgtttagakgcagcttgacttccagctgrggcrccattagctgcccaattyaaccaacctttatcttggatatggacacggtaatagacatcataatatcttgaaacatcaccggmcagtttaattttaatggcttctaattgtaaattttttccagttgtgccagayaatgccccattrgctttataakcttgccatccgatattttggatgtgcgtagagtattctatrtttccagctagagcagcatcactcaggttgattttgattgcttccagttgtaaatttttcccacttgtaccagctatttcrccattcttgacaaccccttgccaaccaatattttgcacgtgtgtttgatarttgacakttggtttgatttcatctggacgttttgcttcatttccaactaaaaaggattttccatttcctttaggagcagtttcgccctttctaactactttgatttggatggcttctaaatgtttagatgcagcttgacttccagctggggcgccattagctgcccaatttaaccaacctttatcttggatatggacacggtaatagacatcataatatstkgaaacatcaccggacagtttaattttaatggcttctaattgtaaattttttccagttgtgccagataatgccccattggctttataatcttgccatccgatattttggatgtgcgtagagtattctatgtttccagctagagcagcatcactcaggttgattttgattgcttccagttgtaaatttttcccacttgtaccagctatttcgccattcttgacaaccccttgccaaccaatattttgcacgtgtgtttgataawtgacagktggtttgatttcatctggacgttttgcttcatttccaattaaaaaggcttttccatttccttcaggtgccgcttcgcccttcttcactaatttaatttgaatggcttctaatcttttagcggcgctttgactactgcggactcactgttttttgcccaattcaaccaacctttatcttctatatgcacacgataataaacatcatatgcgttagctatttctccagttaagcgaatttgaatcgcttcgagccgcaaagactttccgcttgtaccagacaattgattatctttcacatatccttgccacccaatttcttggacatgtgttctatattctacagatccagccaaatctgaatttgaaatattcattttaattccttcaagacgtaaagagcgtctgctagkcccagaaatttccccgtttttgacaaccccttggccawccgatgtcttgggatatgtgtctgataattaattcaggacttttyctctgctttgccggtgctataggtgtgtcctcattacttkgtgatgttyccaaagtagtttcagtacgtcgctactatyttctgtatcattaacagttgttacttctgatgtagaaacttcagtggtggaatcggaggttgaggaagtggacgttgtttctgtttcctcttgagaatttatgatgcttgggttcatttcttcagtgacaccgctactcatttgtcgctccgttagagatgtttctgaagccaccgtttcttcagtagttcccttagagcgttccaaagcgtaagcagaaataggggtaacgagaaatcccgacaacaaaaccgctaacatagaactagttataacactttttttcattaatttactcctt

SEQ ID NO: 137 - DNA, 5550 bp; double-stranded, linear
gattggacgaaagtaactaataaatctgtttttataactggtgcttcaggcatgattgggacctttttaattgatgtgcttatgtaccaaaataaaacgagaaatgcgaatatttcgatctgggcgatgggacgaacattgtcgcgtttagaagagcgatttactagttatctagaagatccgttattccatatagttatcggagatgtcacagaagaaattcagatagcagaagcttgtgactatgtgttgcattgtgctagtaatacacatcctaaatcatatgccagtgatccaattggaacgattatgaccaatattgctggtacgcagcatattttagattatgcggtcaaagcgaatagtgaaaaagtgttatttttatcaactgttgaaatctatggagaaaatcgtggagatcttgataaatttacggaagactattgcggctatattgactgtaacacgctacgggccggttatcccgaaggaaaaagagcaagtgaatcattatgtcaagcctatattcagaaatatggtattgatgttgttattccaagaattagtcgtactttcgggcctacgatgttactttcggatagtaaagcttcttctcaatttattatgaatgcagtccataaagaaaacattgtgttaaaaagtgcagggacccaactatattcttatgcatatgttgcagatattgtatctgctcttctgtttttattagttaaagggcaaaaaggggaagcttacaatgtttcaaacgaacattgcgatattacgttacgtacttttgcggaaacattagccaatgtggctggaacaaaagtgattcatggagaagccaccgtccaagaaaaacaagggttttctaaagcaacaaaagcactactagacaatcaaaaaatctacgcattaggttggcggccactgtacgacagtatggaagaaccattaaaacatacaattaaaattttagaaggtagcggaaattgatatgcccaaaattagtattattgttcctgtatacaatgtagaaaaatatttagaaaaatgtgtacgctctattttagctcaaacgtttactgactttgaattaattctggtggacgatggctctccagacagttctggagcaatgtgtgatcagtttgctgaacaagatcaacgggtaaaagttatccataaagaaaatggtgggctaagcgatgctcgtaatgctggaattgaaatagcaacaggtgagtatttaggtttcgtagatagtgatgattacattgcagatgatatgtatgaactattatatacaaatatcgtaaaagaagatgccgatttatcaatctgtggtatttatgatgtctatgaggggaaagagccaattgtaaaaagtttaatacagggaactttttccagagaagaagcattattgttaattttacaaggaaatattatctccgtacatgctgtaaataagttatataaacgaaaactctttgcggatttaagatatcctaaaggaaagtatcatgaagattcatttattatagtagatttgttgtctgaatgtcagaaagtctctattgattcaacacaaaaatattactattatcatcgaatgggcagcattaatacagaaacattttcagataaacaatttgagtttatagaagcttgggagaagaatgaacttaaattgaaaggtaagggagcagttatagaagaagctgcccatcaaagagtttgttttgcgaattttttagtattagataaaattttgattagtaatgctccgaagaaaaaagaaacgaaacaaattgttcgctatcttcgggaaaactttatttttattatgaaaaataaagtttttacaaaaagtcgtaaactatcaatgattttacttatgtttggtcttcctttttataaaataccaattaaattgaaaagaaaatagtcaagtccagactcctgtgtaaaatgctatacaatgtttttaccatttctacttatcaaaattgatgtattttcttgaagaataaatccattcatcatgtaggtccataagaacggctccaattaagcgattggctgatgtttgattggggaagatgcgaataatcttttctcttctgcgtacttcttgattcagtcgttcaattagattggtactctttagtcgattgtgggaatttccttgtacggtatattgaaaggcgtcttcgaatccatcatccaatgatgcgcaagcttttgaatattttggttgatcgatataatcatgaatcaatcgatttttagcctcacgcgctaagttaatatctgtgaacttaaaaattcctttaacagcttctctgaaagattttgaattttttttaggaatggtggtaaagatatttcttaggaagtgaacttggcatctttgccaacttacgttggtgaaggattttctaatggcagagactaatcctttgtgcgcatcagaaataacgagttccgtaccttgtaaaccgcgttcttttaggtattcaaaaaatgttgtccaggtctcttcgctttcgccactttgaatcatgaagccgataatttcacggtcgccatctttggttattccaatcgctatatgacagctttttgagagtactcgattttcttctcgtacttttatatagagtacatcggtcattaagtaaggataatttttttctgataataaacgattctgccactcgttaaccataggttctagctgttctgttaagctagaaacgaaggacttagagacggatttaccacaaagttcttccacaatttttgatactttacgagttgaaacgcctgatacatacatttccaacattgaagccatgagggctttttcgtttcgttgataacgttcaaacactgtgggtgaaaaatggccatcacgtgttctgggtacttttaattctagcgtgcctacacgtgtcgtaaagctgcgctcataatagccatttcgttgactttgtcggttttctgttcgttcatattcttttgcttgaatatattctgttcgttgattttccattagttgattaaataccgttgttaaaatatttttagaaacgtcatcctttacagaatattcaataatgctttgaatctcttcgcttttcagtgtaaaatgtacttgggtcatgtaaaagtcctcctgggtatgtttttgtcgttaaaaacattgtaccgtaaaaggactgttatatggcctttttacttttacacaattatacggactttatcgacaaactgataaattaaaagattcagtaaataattccatcgaagatattatcaatgaaaagagtttaactttaagtaatcaagtaaaagaattagaaaaagaatatgaaagcaaaatacaagaagcagaaacaataaaagatgagagtatattaaaagcagcaactcaccactatgaaaaacagaaacaaaaaattgaggagtcttttacagaagaaattaacaaagaagttgaaaaaacgatcaatactgttgtggaagaacaaatagaaaaagtggaagaaaagaaaaagaagacaacagaagatgatgttcgagatcatttacgaggatttgcccgtacaattcctgcattcttaatggcatacggagttgaagatacaagattagaaaattttgaggttaatattgatgaagccacattcgaagatttgacgagtattacaatagaggaattcaagaggctccgtgatggatttgagtatccagataataatggggaaactaaagttatcccaggattattcaatgaagttgtatttaatgctagtatccaggaatttttggagacaaaaaaccgtttggcaaattattttgatgatagcttgcaagaggacatttttgattatatcccaccacagaaaacaaatcagatatttacaccaagacgtgttgtaaaatcgatggtagattccttagaaaaaagaattccaggaattttttcggataaaacaaggaaatttgcagacttatatgttaaaagcggtatgtacattacagaaatagtcaagagattaaatcatggattaaaagatcagattccaaatcaacaggaacgtattaaatggattcttgaaaatcaagtttatgcatgtgctccaagtaatattatttataatattgccaagaactacatattgggagaaatggagcatgtttctaatacaaatattattgaacttgatacactggctttggcaaaggaagcaaagttatcagaatgtatttataaggaattcggagatgttaagatgaaatttgatgtaattataggaaatcctccatatcaagaagaaaatactgaaaggaatagagatgacgctatctatcacttattcttagatgaggcgtacaagatcgcagagaaggttgttatgattacgccagcaagatttttatttaatgttggatcgactccaaaaatttggaatgaaaaaatgctaaatgataaacacttatctgttgaaatgtatgaacggaaaagtgaaaaaatctttcctaatacatcgattattggtggaatcgcagtcacttatcgtgatgcctcaaaaatcctaggacctattggaacttttacaccgtatcaagaattaaattcaatattgagtaaagtaaaagaaattaaccaagaaagtaactttagttcactgatgttcgtacaaaataaatttaatttagataagctatatcgtgattttccagattttgaaacacgtcttggaggaaatggacgtgaacgccgtttaacatcttcaatatttaatgtattacctgaaattttttcagataaaaaaacaaaagaacataatctggcaatttacggtagagaaaataataagcgaacatataaatatgtctctaaagaatatattgaggaacatccaaatatgtataaatggaaggtttttgttccagcagcaaatggtgcttcgggtacaataggagatagtccagcaagaattattagtttcccggtcttaggtgaacctaattctggtcatacccaaacctttataagtttaggagcttttgatacgaagtttgaaggtgaagcgttgttaaaatacatcaagtcaaaattcgcccgtgcgatgctaggtgtattaaaagtaacgcaaaataataagactcaagaaacatggtcaaaagtgcctgtattagatttcacaaaagattctgatatcgattgggagaaacccttgcctgaaattgatcagagtatatataaaaaatttagtttgaatcaaaatgagattgattttatagaaaaccatataacgtaccttgatgaagaaagtttaaataatttataagtcaagatagatacttgtgattaaaaaagtaattgtattcaactggcatctatttttggttcaaattggttcaagtaatatcaatatcaatctatttccatacatttttatctatataacatttcccaaaacgttgatataaatggattaggatgtattcaacacacgtcgtatttttata

SEQ ID NO: 138 - DNA, 28690 bp; double-stranded, linear
agaagaaaatancatcaaatacgctttctctagatgggttaaaatgcttggagtacacattacgatacgattgttgcttccattgtgattccttttgaagaaaaagatggctntgtgacagaactatctgcaggccaagcctttaaccgcatgatgggagatcctgacaaagaggttcgtcaacgtttgtttacagcctgggagaaagcttggagtggcaaagcttcaattttagcagacaccctaaatcacttggatgggttccgtttatctgattacaaattgcatggcactacagattatttagaaaatcccttaaactataatcgaatgagtcaagaaacattaacggttatgtgggaaaccatccaaaaaaataaacaaccattcgtcgactttctaacgcgcaaagcgcaattatttggcaaagaaaaaatggattggcaagaccaagatgcgccaattattttaggtgatttagaagaaaaaacgtattcctttgatcaagccgctgcctttattttagaaaatttccgtaaattcagtccaaaaatggctgattttgcccagatggcttttgaaaaaagttggattgaagctgaagatcgtccaggcaaacgtcctgggggttattgtacagaattacctgaaacacaagagtcgcgtattttcatgacctttggcaattcaatcaacgaagtagctactttagcccatgaattaggtcacgctttccatagtagcgtgatgtgggatttaccttcattgaatcgagagtatgccatgaacgtagcagaaacggctagtacctttgcagaattgattgttgctgacgccaccttaaaagaggccaaatcagatgttgaaaagattaaccttttagacacaaaaatgcaaaatgccattgccatgtttatgaacattcatgcgcgttttatctttgaaaataatttttatcaagcgcgccaaaaaggtttagtagcggaagaagatattactgaattaatgttagcggcgcaaaaagaaagctacaaagatagtcttggcagttatcatcctcatttctgggcgagcaaattgcacttctttattgatgatgtgcctttctataatttcccatatacttttggctatctattcagcatgggtatctatgcgtatgccaatcaacaaggcagttcttttgaagaccaatacattgcgttattaagagacactgcttcgatgacaagcgaagaattagcgaaaaaacatttaaatgttgacttaacaaaacctgatttctggcaagccggcattgatcaagtcctaaaagatgtggaacaattcatgactttaactgaaaactatgtaaactaagcaaaaaagaagcagtaaccaacatcaggttactgcttctctttttttcaaatagtttcgatacgcaaggtagcccacaagcattagtccaaacgtaacaaattcaactactggcatggctaaccaaacaccggttaatcctagtaatttcaccaaaataaataaaactggcacaattaaaaagaacccacgcaaagaggaaatcattagcgccattttcggtttacgaactgccgaaaagtaataaatccccataaaattcaatcctgtaaacaagaaggaaatcgcatataagcggatggctgtcctagcaatttgcgccaactggtcgttcccttcgctattaaagacctcaataatttgtcccgtaaacacttgactgattaaaaagaacaggaagccggcgaccaagtacgtaataaagctaagtttaacaaatttacgcaacaccttcgtttcccctaaaccatagtatcggctgagtaatggttgcgccccttgcccaatccctgtaaaaatagcaatcacaataatattgagattggcaacaatcgcataagctgaaatcgccacatgaccaactaagtttaacaaaacaatattaaataaaaacatgacaaaggccgaagaaaattcatttaaaaaggaggaaaaaccaatcgacataatttctcgaacatcctgaaatttcactttaaacttttcaaaacgtaaaactcgttgcggcgaccacttatgcaacgtaatcaggattaagcttgttaacggtgacatcaccgttgcaatggccgcacctgccataccccacccaaattgataaataaagacataatccaaaataatgttgacaattcccccactgacaaaagcaatcgttgccaaacgaggattatggtcatttcttaaaaaagtaatcaggcaattgtttaaaataaataataatgaacagctaaggtaaatcatataatattcctttgccaaaccaaacaagacaccggtcccctgaagcccccgaataatttgatcggaaaaaatcaagctcactaaagtaaagagactccctataacgaaaactaacccaatcgttaaactaaaatactgattggcttttttgatttctttttgcgcaaccgtggtcgaaaacaacgtagcgccgccaacgccaaacatccaacctaatccattaataatattaacgagtggtaagacaatgttaagccccgccaacgcctcggtgccgatcccatttgcaatgaaaaatgtgtccgccaaaataaaaattgattgcgccgccatacttaaaattcctaacagaacatttttataaaacaacgcagtaaaatggttttgctgtgtttgctccatacccaaatctccttctaacaaaaaaaggactcattctttttgcttcaaggttacgcaaaaatcagaatccttcaattattcaacccagcgattaaataatctgtctatttattgatacttctagggtagcattctctcttcgaaaaaacaaccatccttttatttttctcattttaaactttcttaagcagttgcagttgtttttgaaccacttgccaatcttctttcacgacttcttttaaacgataattataaaagacagccgctggatggaagagtggaatgatttgataggttttctgcgtccaatgatagttttgtgattgctcatcaaatgtttgaatgggcgactgaatgaccgttccgtgcactgcagtgattgttggctttggtcctaaaagtcgttgcaacccaatattccccagtgtcaaaattagttcaggttggcaaacagcgatttcccaatcaagcaaaggtgcaaaaattttgatttcttctttggttggcgttcgattaggaaatttggttactctttctcccgtttttgcaatctgcttcgtttttacagaaaaaggccgactcctaaccgcactggtgatatacaccgtttcacgacttaagccaacttgttgtaattgttccatcaacaattgacctgaacgccctataaatggtacgttttctttaatttcttcttttccaggggcttccccaatcagcatcacttttggctgttgcggaccttgaccttccacaaaaccttctaatggtaagtctttcgctttagctaaaactgcttttttcagatgttcaggatagtgcatttaccatcacgcctctcttctggtgttcttccttcgctatattgattataaataaggcccaaaagaaactcaaaaaaaggagcctattcatttaagcgctggtttttctacacacaaagctttgtctttagctaaataaaaaggccgtaagtaaccaactaaattagacattggtaaaacctccgatggtaaatcgagctttaatgtctcctttaaataggctttgcgtgtcgcaatccgttgccacatgtctggataagtttgctgaatctctttttgcagtgtttcatcagccaaagccacacattcttctgcactcacccctgtataaccaggtacagaaggaataatatccacttgaaagagcatgccactttccaagcgaatggctgaatctggataaataggcgacgacatccattcatcatccgaaactaaatgcccaggattcaaatgccagtgatagatttcttttggtaactgttcttcaatcgcttggtacatttctcgccctaacagtccgattcgaatggtttcaagccagtgaacgacagcttgaaaatagggttttgctacgcgctctaaataatcacgttgcgcttctggcaattgctgctcgttttcaataacaaaacctgttcggctagacaagccgcctttgtagcctgtagttaatgataaggcatcacctaactgaatttctttggcagtcggatacatgtttgcatattcaaaacgttgaccagttgccgcaatggttactaccgtcggcgtttgaccttcatcatttaacaaagccccaatgtccgtttcacgctgtcctatttcaattgcatttaaggcctttaacatactgcgagaagccaaattcgccccatattcatagtgcgccaattcgttagcattatttgttgcgcgagccccctttgctccaatcaataagtgggtcccatttagtaaacgagcttctttcggcagcgcttttttcagtgcttcgacaataaaatgtggcacatcaaacatagtagcaggttcttgctgttgtgtcgtaaacattttccacccaacgatacctattttttgagcagtttcatcgagaagcgtttcaaaaatctgcgacaacttttgttccccagccattggttgattaggtagtgaaaaagctagataatgaattaaatcggctgagatgcgggcatgttggcacagttttaaattttcattacctaaaataagtgtcgccgcaccatccttatttaacacaagaagtccttcttcaaacctcggaataaagccagttaagtattcaaaattactgccatgctctttgtctgcatagaagaccaattgatcgaatttttctgtttccattcgttgtaatactttctgcttgcgcgccatcatcgtttcattcgtcaaatacgttggaaaaacattctcaaaaacagtaggttcagcaatatgtgtataattaatttttcgcttcattattatcctccattattcatctgcgacaatcaacgttacgcctgcttgcgctaactgctcacagaatttttcatcaggtcgtgtatctgtcactaaacaatcaatttctgttaattcgcaaattttaaataaacccgttttgtttaatttcgtttggtctgctaaggcaatgacttgtttgccttgttgaatcattcgccgcttgacttgaccttcttcttctgtgtgaataaataatccttgttcagataacgcaaacacacctaataatgtatagtcgggggcaaattccccaaccttagcgactgtttctgccccaaacaaaaagagttgttgtttatgcagttgcccaggtaatactgtaatttttgtctgatccatttgcgctagaagtagcgcatgactgagagagttcgttatcgcgtgaatcggactattttccatcgctcgaatagctgcttccaccgtggttgatgaatcaaaaaaaatggacgcttgtttgggaatatttgcccaaactttttgggcaatcgcttgttttttctctggatgcttcactattcgttgagcataatcgtaaatagttgcttcagactgcactgagatagcgccaccgtgcgttctctttaaatgtccttccttttctaaacgaattaaatctcgccgaatagtatcttttgaaacggagacttgctnccgtaacgcttccatggaaatacttttttgttcattcactattttttgaatcttggctaaacgttcttcaatcaacatgcttcctcacctcttctaagtaaagatagcaccttttgcatcattttgcaaacaaatgcaaaacaatgcaaaaaaagacaaaaaaactagtccttcattttctaacgaagggctagtttgagagtggttttaataggtaaattgaataatcatgccgctaggatcttctaacgcaagtaaatgatctttggcaataaaatgtaactttgcttcttccgcattggcttggactatctctaaatctgccgcagttggtaaacggaaggtgtaattttctaagccaaattgattttcttgaatcgttggcagctgtttgccgctccatgtatttgtcccaatatgatgatggtactgacccgctgcaaaaaacttcgcttgttgaccaaagttagactttaagccaaaccctaagtttttatagaacgtttcagtggcatctaaatcggccactttcaaatgaatgtgcccaattttagaacttcggaaattcctagccagtgaccgtcagcttctgcagctaaactatcaccgtctaattcttctgtcacaccgataatttcaccatttggacgaatatcccagacttcttctggtttatcccaataaatttcgatgccattattttctggatcacttaagtaaagggcttcactatagccatgatctgctgcgccaatttgcacattttcctgcaaaagccacagcaacatattgcctaaatctttgcgggttggtagcaggaaagcaatatggtacaagccagtggtaccctgattttcttccccagctgttagttcttttaagacaagaattgcatcgttggtgccttgtggcgctagccaagcacgtccctctccttgttttaaaagttttaagccaattgttttcgtataaaagtttaccattttatctaaatcagccactttcaaagtgacttgttgaatcccaatattacttggtaatgcttgaaccatttgctttcactcctttcctcttcgttttactaaagcaatgatttagttgaattctttaaaacgagcactatcttccatgtattctttttcgccagctggcgcttcaatggaaccaatgaccatttgtgcacgtaaattccagtttgcaggaattgaccattctgcagcaaccgcttcgtcaataactggattgtagtgttgtaggtttgcgccgatattttcttgcgctaaggcagtccaaacgttcgcttgtgttaaaccagttgcttgttcagaccaaacagggaagttatccgcatataatgggaagctatcttgtaagtttttcacgatatctgtatcttcaaagaataaaattgtgcccgcaccagctgcaaaaccttgtaatttagcttgtgtgtttggaaatgcttctgctggagttaatggttttaaggcgtcttcagtcattgcccataattttttgtgagcatcgccgaataagaacacaacacgttgtgtttgagagttaaaagctgttggactttctctaacaacttcttttactaaagcagttacttcttcttttgaaattggtaagttttctcctaaagcatagattgaacgacggtttttcatcatttcagtaaattttgacataatatgttcatcctttcgaatttcctcagtaaatycattaattntgtktacatgcttactatactaccttactaaaagtaagtaaayctttttgtcttactttttgtaagttttttttattttttagtgaaaaaccttattctaccaaagaaaaaacaaccagcttttttctaagaaaaagaaaaatctggttgtcgattaataaatgtagaagtcaattgaatcgttttcggccgtttttcttgaaataaatgtgtggctttttcccctaattccattaatggatgacagattgttgaaaaatttaaaatttcacttaataaagtttgttcctgtcccactaaaaagagtggtctttcaataacggcttgaatccctgcggcaatttcatcaccgttggtcacaaccgcttggagcgttggatcttgcccacagtgacgtcctacttcacacccatcttcataggttaaacagtccttaaataaccgattttcaggaatcgctccataaatttcctgatatgcgtcaactaaatagcgtgcgcttgtacttttttctggtgcacggttaatcgtaattgccacttcactacatccttgttgttcaatgctnggaagacccgccgataaacggttaaacgatcgatatagatactagcataactagggtcttctattttntcacaaaaaacaacttgctctttatatggagcaaacacacttaarggatttgcctttgacaaaacaatcatgccatcaaacgcacccngtggcccattttttccmagtaacttttttncaacttctttatcataatccgttggtaataaactgaccatcatcccttgttgaaatgcttggtggataatcccacttaaaatagcatcaaaataaggttgattcgtataaggaaccatgacacctaatgtattacttttcccaaagctaagatttctcgctaatatatkgggcttatagcccaactcatcgataattgcttggattytcagtcgtttttcttcagaaacataaggatgatgattaatcacacgcgaaacagtcgtaactgaagatcctgaaaggcgcgcaatttctcgaattgttgtcatactttcacctcattactttacaaaattgagttaaataaggcacaatccctgtcccgtaatcaacaaaacgataaaaggtctcctgccaagcaaaagaaatttcctgaatatcctcctgctgtgtcaagtgccatccgttatctgatggtnacggratttcttgatgccaaatcttatagtattttttgggactatttaactgcagacttttggccgtcgtagtcacsgrgacaaaatagtaatccataccaagtctatcgcttatctccactataacattcattttcatgccctccaatattttgatacacctagcttaccttatgaaacgcgtaccagagcaagaggaaaaataaaaaaagtgagaccatgttatactagatgtatcatataaaagcaaaggatgagtgcaatggaaactgttacagtagcaacaaaaagcgacttactaacaaatttgaacaagcaaacagatgaaatcattatctcgggggcacttgcacaagaaatttaccacttaaaaaaacaacaattaaccgaaacggaagaaatgggctttttagtgggcagccaaggtgctggctcatttttaacctatttaatcgagaagttatcctatataaattcggcgctatcgccagaagaacaaaaaattgaacatgcgattttgcgtttgtatgttattaaaaaattaactccagaaactactttattacgtctaaaacagttagattattaaaattttatttaatcaagatagaccaattccccgcgtacaacgagtccctttcattaatcacttgatataattacctttattcaagttcccaccattgtcattatcgattaaccaatggtatattagaagtaacagataagtcattttatttgaaaaagtgtttgggaaatgtttggggaggaatgtttatgtgtcaaccgcaggaaaaaaagaaagaaatttctgttgctaagttacgttatcgttttgaagtaccaatgattatcattggttttgttttattgtttttcgcattggggttagttgccttattgatattgagtgatttgccgattcctgactggttattaattgtcttaattgcaccaattgcgccagtcattgctttttttaccattcgttatatgtacatggatactgcttctaacggagtggaaattacagaaaatcagttaccagaaatttattccttgtatattgatttggcaaaagaaatgggctttggcactaaaaaaattaaggatgccacgtctttatttaatcaacgggaatggtgtcttaaacgcttttgcggcaaaatgctctttacacagacgctatgttgtcattcacagtgatttgttggatatcgcgtacaatacaggcgatttttcgctgattcgctttattttggcacacgagctaggacaccataaatgtgggcacactaatttatggcgactaatgttatccattattttgaaaccagttgcgttagataaaagttttacaagaacgcaagaatataccgctgatcgcgcaggtttatactacgccgaagaaggtgctttaagtatgatttatttattttcaggaaaatacatgggcagtcgtgtggatttagaagaatactttcacagtattgatttacatgatgataccatctggcttaaattgagtaacttcttatccgatcatcctgttggcttccgtcgaatgcaaacattgaaaaaagccaaagatactggcaattgggacgttcatgggaaatttttctagcaagagccaaccatcattaaataaangtgctgggacaaaagattctttaacttttgtcccagcacgtttattaatccaccaataaatgaacaaattcttctttggtgatatttacaaagtagtcttcaaagttaaacgctgctaatgcttgccaaattgatgaatactgatagtccacacctaataaagctgcaacgatttccgttgtttcttttttggcaaaataatcaccataaatcgttaactcaattattttacctttttcaacagtcaaacgtgcatccacgatgccgcctttaaacttttcttcttttttgatcgtaaatttaggcgcttcaccaaaaatccaagcttcattgccatacacttcagcgaccaatttcctaatttcctgttgatctgctttggttaggacatattctttctccgcaatttcagttagagattcgacatcaaagagctccatcagtaaacgattgcgaaattcctcaatggttaattgttgatatttttcgtctaagtacggccgtaaattggttacgcgtccccgaacagattttgtcccttttgattcaatttttttcttagaaacagttaaaacacgttgaacttctgccaaatcaacatcatacatcaaggtaccatgagtatacatcttccccttttttgtatacatggcattgccagaaaattttttcccatcaattaataaatcattgcgaccgctaatctcggcccccgttgcgcccattttatgtaatgcttcaataattggtttagtgaacgctttaaaatccccaaaagcttgatgtccttcctgaacaacaaaactaaagctgacattcccgagatcatcataaacagcaccaccgcccgataaacggcgagtaataacgattcccttctctctagcataagctaagtcaatttcttcataagcattttgatttcggcctaaaataacacagggttcctgaatataaaacaacactaagggctcttcaaaagagagagtgtttaatagataatcttccgttgctaaattttcacgaatatctcgtgactgcattatgacataacgcataaggtcgccccacttctttttcttctagtgtatcactttctttcaaaattggttcactaaacgtcttctctggccattctcaaaagcggatgatcaacaaaaaaacgaacgtgggacaacaatcactttggatgtttgttccacsctcaaaatctaataaacagcaattgcagaactgtttagctttttaatctaaccaagttactacttctgaaacatctcgtcggactgtttcaaagccgggtgtttgagctttgccaatcggaataatcagtccgttcactaaatgatcctcaatattaaataacttgcgaacagcttctgtttcaaaaccagacatcgccacagtatcatagcctcgatcttttgcagaaagcatcagctgcatcgcaactaagccttggtctaacattagccactctcttttttgttcttcgctaacatcatagtaccaagaaacattttcattaattccttgacgaatttcttccgtcatcgttccttgtgcgacagctttagcactgatttcatctgcattggccactgtataagcagtcaaatcacctaataaaataatcaccgccgctgcccctttaactgctggttgttgcatcgaaacttcgtaaagggcctctttttgttctttttctgtgacaattaaaaaacgccatgaatttaaattggtactatttggcgcgaacatcgcttcctcaattatggccattaattcctctttaggaatctcaacatctggcataaaatcccgaactgagcggcggctgcgaacaacatcttgatacatcatatttcttcttccttcctcttgccttacttgacatagttattattactcactatgatggagaaaaaaagtacgcactttttattcacctaggaagaaaaaagtaaccattacgtgtcacaaggagaaactatgacaactgataaacaaaccagtatcaacttagccctttccaccattaacggcaaatggaaattatcattaatggatgaattattccaaggaaccaagcgcaacggtgaattgatgcgtgcgctcgacggaatcactcagcgcgtcctgacagatcgcttgagagaaatggaaaaagatggcctagtccatcgagaatcctttaacgaactacccccgcgtgtggaatatacgctcactccggaaggatatgctctttacgatgccctctcttcactttgccattggggcgaaacatttgcacaaaaaaaggcgagacttaacaaataagtctcgtctttttttatctattttgggtattatgggtaaacttaagatatttttgaagtccttcttgaattgaataaacgggcgaaaaacctaagcctttcaaagcagaactatctgaaagagaatattttatatcgccatctcgttccttttgataagaaactggcaaagaaagtcccactaattggttcatttcttcaattaattgattaagggaaatggcaacttcggtacccacattataaacatgtcccaacgcttcacttttggttgctactaaatttaatgcagttaggacatcctcaatgtagataaagtcacgtgtttgctgaccatctccaaatatttgaaattggctcacttgcccttgctctaattggatataacgatccatcaaaatggacaggacaccagaatagggtgaagcaggattttgattgagaccatagacgttaaagaagcgaactgcgctcgtgggtaccccgtgtaaatggtattcattgagaacataacgttcagcagcaaacttatcaatagcatagggactcaaagggcaaatcaccgaagtttctcttttaggcaacgttggctctgcaccgtaaacggctgctgacgaagcaaaaacaaaacgtttgagctttttttgatatttttttattgattccagtattttcaatacacttaaaaaattgacctcatgggtctctagaggctgtgccacagaacttgccacgcttgccacggccgcaagatgaaagatatactcaaacgaatgctttgaaagtacttcgtccaataattgctgatccgtcacacttcctttaataaaaaccaactgctcagtttgttgcaaatttgacactcgccccatggacaaatcatcaatcacaaaaacttgatactgttgactataaaaattagccaaattagaaccaataaagccagctcctccagtaattaatagtttcttcacctctttgcttcctctctttttttttaatttaattccacttttttcgtgttattttctctttggaataaaaaaatgcaatatcgaatgaacacataacttacaatagccacagctaataagagttcaaaagtagacaaaatatttaacagactcgttaggcctaccttttctgcaaataaaggtttaactttgactaatgctgtcgcagaaattactaatgggaatgtaaaggcagcataacttggatagaatgtcacttgcataattttatatagattcactactacaatcccataaatacattgagataaaattagcaagaaaacaactaatggcatatacaaatgaccacccattgaaatatagccagctaaacataacgaacctggcgctgtcataatcgtcaataaaggaatggtcgattcaggcatttctttcgacttcgtaattctcttgattaaaattggtaacaagagtaaataaaagaacaacgctacccaaaaaacaatttttcccaactcattgataaacaattgagaagtattaggaataacgccaatgccgacaaacgtaataaaccagcttggataaatatgttccagttcgatttttgttggaaaaatatgcaccgctacaaaataaatcattaaaataaaatgtaaaatcactgcgccaatccacaacacgttaatccaagcagcattggtaaatatccgatctaagaaaacacagataaccattaaagccattgtaaatgttggtgataccgaagcaataattggatcatctaaggtgcttaatgcatgtttcattgtaaaaataatttttaaaataactaaaatcattaagagactgccaagtacacaataaatggtcccaattgttgcatatcccaaggaataaagtaaattccccaaagaaaccatccctaaaattagtccgcaaatgggaatcgggactttccgcaagaattttttcgcactttctaccattatgtagtcacactccgtctttatttattattattgatattaatcaaaagtatgttattatactaaatgaaatatttatatttgtaaaataaatatttgcaataccaactattaagatagtaaatagaaagaggcgattttatgttcgaatggatcaaaacatttattgctgtgtatgaaaccaaaaattttagtacggcggccaaacaattgtatatttctcagccaactgtttctttgcaaatcaagaaattagagcaacacttttcgatcaagctgttctatcgtaatggaaaacaatcggttattcctaccaaagaagctgattttttatatccaaaaatgctctcgattattgaaagcttaactacttcttttgcgcaagctgcagaaaaagagaattttaaagaagactgcattatagcctcttcaaatacagttgctatttatttactgccagatattatggagagtttggttaccgcttttccactcatcaacttttcgattcaactgatgaattcaaacgaagtcgtggatatggttcaaaataatcatgcccacattggactaattgaaaaacccattgaaaccaaaaatctacacaaagaaattgtttatgaagatcaactagttctagcaggagatgccgcttcaaaattttggctcttaagagaaaagaactctggcttacgttttttcaatgagctttatctcaacgaacacagcatcaacttaccaattatcgaattaaacaacaacgaagtcctgttacaattgctaaaaaataacattgggcaatcaattgtttctcgattatctatttccgatgagatcccttggcaaccaattgatcagtcctttgcttctcgaaaaattttcattgtccagaccgatcaccatgccaatacttccttctctgaagtttataaccgaatcgttgaaaaaattcgtgaacgacaaacctaaaaaacaggagaacgacttagctttcgctaaatcgttttcctgttttttattcatcagtttcctctaccaattcaaattcaaaaggttctaactcaaatagttggtgtaaaatttgctgggtttcttggaacacttgttgtggctctttacacaaaagagtgctttgaatggtctgtttttttgattgaaaaagaattctcgtttcctcttccttaaatacaacttgatgagttccctttcaaacaccgtatattcttcgaacatttccataactaatttttgacgaaacccttctttgagtgctaataaagttactaaatctgcaacggttagcgkttctaacgcaantgkttcatcytctacatgaaccaagataatncgtacacttcacattcggacaggcattgcagccgccattaatcaagtctgaggtagttgttaytttcacctgtttcatcttaatccttctttcctacttttcgagaaaaacacaaggggtctcctcaaaaatattcaataaaatatgatttacttcttgaaagacttcttcgtgattccggcattgtttttccattactaaacgcagatcattcacaacaaaagtcaacgtcgtcgcttgttgggaaacatgtatacaacggttgcctttaacaaaacattctgtttgttcttcaatgaatggttctttttgatagccatatgctgaagcgacacattccaggatttcgtagatttctatttttggaagttcatagctacagctaccgataactagttgaaaacggttcggctgtttttcattattgcttgcataatacactgttgtcgttgtcattttgcctccttatctcctctattttcctactcttatcataacaaaaaaagcacgcttcccttatttaaattgttaataaagactattacagattggtataaccacacctaaaaagttcgtgatataattcactaagaaagaaatattacagaaagaagagatgaacgatgaaagtatttaacaaaaaagtcgcaattattggtactggttttgttggcacaagtattgcctattccatgatcaaccaagggattgcgaatgaattaatcttagttgatattgacaaagccaaatctgaaggcgancaattgacttattagatggtgtgkcytggggkcmagaaaatgtaaacgtctgggctggcgactatcaagactgccaagatgccgatatcgtcgtgattacagctggcgctaatcaaaaacctgggcaaagtcgtctagatttggtttcaatcaatgcagaaattatgaaaacaattgttaacaatatcatgaaatctggttttgatggaattttagtgattgcctcaaatcctgtcgatgtactgacttatgtggcctggcaagcttctggtttacctgtttcaagagtaattggaactggtacaactttggacacaactcgtttccgcaaagaactgtctcaacgtttagcgattgatccacgcaatgttcacggctatattattggcgaacacggggattctgaagtggctgtctggtctcataccatgattggtaccaaacctattttagaaattgtggatacgacagagcgcttaactagtgacgatttaccaatcatttctgataaagtgaaaaatacagcttatgaaattatcgatcgcaaacaagcgacctattatgggattggtatgagtactgcacgcattgttaaagccattttaaataatgaacaagctattttacctgtctcagcttacttagatgggcaatatgggcaacaagatgtatttacagggattcctgcagtcgttggcaatcaaggtgtgactgacattattgaattgaatctgaatgccgctgaaaaagaactcttccaaaaatcagtgacacaattaaaacaagtgatggcatcgttacaaccgaacgcttagtaatttttaactaaaaataacacttcaactaaattattctctaccaaaatagattctaattcccctttatcgttctttttggtaccatgaaagaagaacttcaactaaagcagaaattaggaggacaaaaaatggtaatccaaggagatacgttagaaaatagcgcacgtcgtttattgcaagaacgtggcgtaacaatgaatgatttagctgaacttgtgttatttttacaaaaagattatattgacaatttaacattagatacttgtttagaaagtgttgatgccgtgttaacaaagcgtgaagtacacaacgcgattattacaggtgtccaactggatattctggcagaagaaaacaagctactctcaccgttacaagaaattttaacggaagatgaagggctttatggcattgatgaaattatggcgctctccattgtaaatgtttatggatctatcggttttacgaactatgggtatatcgacaaggtaaaaccaggcattttaaaagagttaaatgcgcatgatggcgaacatgtccacacattcttggatgatatcgtgggcgcaattgcggctgcggctgccagtcggttggcccactcacaaccagatttaagtgatattactaaataaaaaacttgcctcttcatttttatgagaagaggcaagttttttatttgctggacttctcacaagctttctacttaacagtaattatttgccgtgttatgttacagtcaagaataaacagctaaaggaggttatctagaaatgaaaaagtttttacgcgtatttttaatttttattggggtattctttcttgcaagttgcggttcaaaaatagagacaaaaacctttgtaggttcgccacaagatgggattgattccaccttaacctatacgtaccaaggagataaagtcttaacgcaaacggccaaaaacattgtttcttatgacaaattggggattacaaaagaagaggcaaaaacagcgttggaacccgtttctaaacaatatgaggacatcaaagggcttgattacaaactgacctatgaggacaaacaagccatcgaaaaattgacgattaattatgaaaaacttgattatgataaagccaaaaaagtggatggtatccagattgatggagattcttctaagggaatcagcatgaagaaaagccaagaattggtggagtcacaaggttatacagaacaaaaataataaaagaaagcgtgcgacaatgggcattgtcgcacgctttctttttattaattacattgatgttgccatcttcactgcttgaattgggtcaaaatgatggacagagtaaacgactgtaccggcttgccaaactactgagtttcgattatagtcagtggttcctgccacgttcagtgtgatttgaccaacggtattcggtgctggtaatgtttcttgttccaaaatgttgacaacatttttcgctaaatcatcaggcgattcaccattgatatttgaggcccgtacgactaaactccaattgccttcttgccaagataagtaactagaacctgccgccccttgtttatacccagtaatattgtaacctaaatctactggttgaccgccattgtcaatgatttggttcactgcattttttgcttcggcatcagagccatatgtttttttctcaaaagaactaattggcgttaactgattgacacgtgcatcattcactggaatcgcttctttttctgcataatataaaacacggaaattgttttgatccgcttgtgaagttgtcgctgcagttaaaaagttattcgtttgactcgttaaaattgcctgcggtaagccttgaccaggaaacatgtttgctagctggttaagcacttggttggcttggtcatctggattcgcatttttcgctggtgattgcttctctgctgagccattatttgccgcttccttcgtagaagaagctgttgctttcgaatcagctgttgttgttcctgacggtttcgcatcactagattttgttgttgctttgctacttgattcttttgtagcagatgcttttgtactctcgactgtggtactttccgcagcactggaacgactatccgtattttctgtactttttccgccgccgcatgctgctaaagcaagggttaaaagaaaagcactagaaataagccctatctttttcataagaattcctccttgttttccctacccttattgtaccttaatcatgtgtatccgtcacttgtttgtgtttcgttctaagttggtttaaataacagaaagtggacggtaggattcgaacctacacctcaacattgagcaagaataaactactgttagtctctatgagtttaacaccacgttcatccacctatttgattgatcctttgtatcataacttagaataattaaattgcctttaaggagcttcaaagattatatgaagaattgtaaaaaatctgtgacgaaaaaacgattgaaccaatcagtagatacactgaggttcaatcgtaaccaattgtttaattatctgaaaaaactcacaattcaacgttagtccctggtgcttttttgttttccccttgttgtttttttaagaatatccccaaaatgacggtgataatgggacaaagcaatgggaaaaaggcatatggtaagtattctagtgcaccaacttttaacgttcccataatgaaggtaccactaactccccaaggaattaacgagttgactgccgccccagcatctgccaaagtacgagttaaatattttttatcaatacctaaacgagtaaatgaggatttaaatgtttcccctggtaaaataattgacaaatattgttcgccaactagtaagttaattcccacagaacttaaggcagttaaagcgattaatttggctggattattcacatagcctttaattttatcaattaaagtagccacgatgttaaacttaatcaacaagccgcccaaacctaatgccaaaataatcaacgcagcagaacctaacatgctttcaatcccaccacgagataaaagtgtatcaatactttgatcccctgtatctgccacataaccactcattaagatggtagaaactttcgctaaacttaggtgatgatcatttataaaagctaagatgaccgccactgtagagccgactagtaacgttggaatagccggtacctttttccaggcgaataagaataaaaccgctactggcaacaatgtaatcggtgaaatccagaatccttgatgtaacgtttggaccattgcatcaaccgattgtaaatccgctgaaccagattgatgccccaagaagatatagccgacaatcgaaataataaacgccggaataacagtgtacatcatgtttagtatatgttcaaaaaggttcacgccaccaattccagcagctaagtttgttgtatcagataacggtgaaatgttgttccctaaaaaggcacctgaaacaactgcaccagctgtcatcgcattgtcgaatccaagaatatgtccaatacctagaaaggcaatccccatagttgaaacagtcgtaaaggagctccctaccgtcacaccaactagtgcacagaccacaaaaacggttggtaagaagaacttcactgagataattttaaaaccatagaccataattgttggaatcgtcccagataagatccaagtagcaactaagacacctatcagcaagaaaataataatcggaatgatccctggtttgatcccttccacaatgccctcgtggatctcatcccaagaaaatcctttccatttgccataaagcaacaacaacatgaatacaaaaagaatcggtatgtgaggggttaatttttgaccaataattaagtacccgagaatcgctaacaaggcaatcaaaatgcctaaactttcagcgaacgaaacagtgggtttcgttgatttcatatgaaaacctccttttatggaaagcgaaaactgaagcaataatcgaacttgcttcagttnccaaacgacaatttactatagtcatcaggtgaaaaggcactcagcaaaataattgctagcctttttattcacctaaatcttcttttacttccgttgcccaacttgcttttttaaagcgattamtgattaacggaatcacaaacataacaatagtgattaatgcaactaagactgcatcagtcacggttgttgtacctaatgtggcgaaaataacaatgataacactaaaaattaacattgctgccactaaataagctaagccattaccttttttaccaattcggtaaggacgtagtgtatctggttgagatttacgtaatttaattagggaaatcgcaatcaatacatacacaatactataaataattgttgttgcatttgttaaagttaagaatacagcgttgacatcatccattaccccataaagtaaagcgaataatgagataaccacagattgtgttaacacaacgttacgagaaacgccatatttattttcgcgatggaaaccaaattttggtggcaataagccatcacgagcaacttgaataattgtttttgatggtccagtaacccaagcagataattgtaataacacacctaagaagaccatgaaactaaagatattaccaataattgttggtaaacctaaaacgtcacaataaagcaaaattggttgtgtaatgttagacaattccattttgccatttggaacaatattagcaacaaacattgcattaataacgtttaataaaactaaaccaattaatgaaatgaaaacgccttttgtataattttttgttgcatctttcaaacgaggaatataaacagaagacatttcaatcccaacaaagataaatgcaatccctgctagatatttaaatgtgtccatattttctaagtttggtaaaacttttgaccaagagaaggcacctaaatagccgccaggtgttaagcctactttaatcattgaaagaagacctaaaacaaacataactaatactgggatgtaaacacctagccaaacaccaatatttccgccaactttcgccatgtcaaatttcaagttcaagattgtaataatccagtaaatcactaagatacaacctaatacgaaccaatgattttcacctaaatgaacattaccaaatgtattacctagcaaagggcctaatgtagaagcaaccattaccattcctgggaacatttgcacccatagtaaccaagcgacaacaaaaccccatttgctacctaaggcagttttaacccaaagttgagggccaccttcttgaggaagcatcgtagataattcaccagatatcaatgcgattggaccagcaaagaataagaccgcgaaaattgtgtaagaaattaatgtccaaccaacagcagcaagtgttgggatactacgtacagttgcacacaatgccattgttaaaccgataaaagtacctaattcaatttttttaacttgttgtttatccaattttgtacactccttataagattttggataaggagcatgaatgactgttatacgctgagtaaaacagtcattcgactgcctcttacccagacaaagaattggttaagaggttagccatctgattgatttatctcttaaataaatcaatcagacgaacgttccctcattcggttaccatttcttttttccgtttaagattcaattattttacgtcgtaaatttgttctaatttttcttgtaaagcagcttgaatcttaggagcgtaaacatcaaattcttctttatcgttcatgtatggagtcattacagcagcacgtaacacagttactttacctgcacggttccattcttcgtcactaaatcccaagctgtttacaaattttaatgggctgttgccataatctggaatagcaaagtcagtatgtgaagtaatgaattcgttgttgtaaatatttcctttaacgtatgatgcatagtcatatacatcatggtttaatttgttcattgctactaaatcatcgttgcctttttctttaaacacatagtcaaccatgttgaagtctggatgagttaatgtgtggacttcgatttctttgtcgccaactttgaatgttaaatcattcaagaagttatagaaatgatgtgatccttcaattgaagcaccaattaatttaccataacctgcaacgtttaaaggtaaaacgtgatgtgcagcccatacagaagcagctgttgcaccagcttttgaaccttcaaggatataagcacctagtaacgcaggaatatcggcacctttttcaaatacgtaagttgcgaagtaagaaataacgtcgcgcatacggatatcttggataacgataccaccagctgaataagggatataacccattttatgagggtcaattgttactgattctgctaattcgattgctttatatgcatcatacacttctcttgaaatgtgttcttttttctctttgaagacaccgtattcttcgtgaacatcttgtaaatcttcgtaagggatgaagttgttgtcttcgtctaagaagatggcacgtccataaccaccataagcagcatcaacgtgtacataatagtaaataccgtctttcattaattcatcgcgtaaagcaataattttatcgattgagtcaacggcaccttcttcagtagaaccaactacaccgacaacacctagcactggaatttgttcttctgctaagccacgaacgattttttctaattcgttgatatccatacggtagttatggtcaactggtactgggataacttgatctaaaccgataccgataatatcagcagcttttaaccaagaatagtgtttagtttgtggaactaaccatttaccgattgcttgtaaatgtttacctgaacgagctgaatgagctttgatttcatcaatttcatcttcagctgattctaataagtccataatttcttttgttggcatgttcaatagttcccaatctgatttgccagcaactaattctggttttacttctttcatagcaaatggtaatgatttaatgttacgggcataccataagccttctaagttagctaaagaaccatcagcaacgatgtgtccccaaccatttttgtagctcattaagtgagcaaattcatgtcctacttcttcttccatttgagaagttgctggagaagattcataggcaacgttgttcccgttccatagcattgcaaagttgtaagctaatagagaaggcattaatgtttctgagttcatatgtccccaatatctacctgctgtatgccatggaactgaatgtgtacgcatgcgagaagagatttcattcaatacatctttcatatggttgacagttttttcgtagctttcagatgtgcgttcttgagaagagataactggcatgtcttgtggcatgtagttttgacgccatcctaaatgttcatctactaagtcgatcaacaagtctttatataattgtccgttttcggctttgtccccaatgaatagtgcattaaggttcatttcgccttttgctaatttttcgtttktcatacgaaaattcctccttacaaattttaatgaattagattttgcattcacaacttacacccaaacggctaaagtgtaaagaagaaaaataacaatggttatcatagctctttaattttataattttttcacaaggtgtcttgtcagaaccattatataaaaaaataagagtgggattgtgtgtacaatcccatcttattaggtgtattaacggtttcaccactacctgtaagagnaaatagaattttaactttgatcaaataatcacacgtcttctcttcgtgaaattattatcaatttctaatccattacttttgctaaaaagtaatttttcttccmtttccgtacaacaacgaattttccatcgaaatgttgtgttggatcgactgcaaaatctaaatcggtaactcggtcaccgttaatacttatagctcctccgctcacatcttcgcgagcttgacgttttgatggttcgatttctgtgtcaactaaccaatctacgatgtttttagcatctttggtaatttcaacagttggcacatgttctaacccttgctcgatttcctcaatcgttaagtctttaatgttgcctgagaaaagagcttctgaaattttttgcgcttcttctaatgctgcatcatcgtgaacaaatcgtgtcacttcttcagctaagcgtctttgtgcttcacgtttacctggttctttttcaactttttcagtaacgcatcgatttcttctttatctaagaaagtaaagaatttcaagtatttgatgacatcacgatcatcttggtttaaccagaattggtagaattcaaatggtgaggttttcttaggatctaaccagatagcgccacccgctgttttcccaaattttgtaccatctgcttttagcattaaaggaatggttaacccgaatactttggcttctggtccttcttttttacgaatcaaatctaatcctgcagtgatattgccccattgatcagcgccaccaatttgcaattgaatattatgttttttatgcaatgtgtaaaagtcaattgattgaagaatttggtatgtgaattctgtaaaggaaatgccactttctaaacgactagcgacaatgtcttttgccaacatcgtgttgacattaaagtttttcccgtaatctcttaaaaaatctaataaagatagttctgataaccaatcgtagttgttcaccattgttacctcagcatctttaccaaataattttttcatttggtttgaaagactgtccacattatgttgcacagcttccatcgtttgtaagacacgttcggttgttcgtccacttgggtcaccaattgttccagttccgccaccaattaaaatgtatgggtgatgacctgctaattggaatcgtttcatcatcataaaaggaattaaatgtccaatatgcatgctatctccagttggatcgacaccgcaatatagcgaaatgctcgtattttctgtaagttctcttagtccttcttcgtttgtttgttgattgattgcatcacgccatgctagctcgtcaatgatattcatgttatcaccctccatatttataattatctctttataggaaatcgttcatttaacgaaacaaacgattaacacacttgtttttacacgatatcccgtgtttatttctatgtatacacgggttcacgaaattttctttggtctgccacgtattcaaaaaaagaatacaaaaaatccctaagtcgtcgaaacgacttagggacgaatttctcgtggtaccacccaaatttatacatagtttagtttatttaaaatactatatacctcttaacaaataacgctgttacccgtgccctgtaggcagaagctcaagaatgtaattcgataaataacgtgtactagtttccagcgccactagctttctgtaacagtggttatttctctactgcttttctgtcattgctttgtatttaacttgtacatgtagcatattccttttcgttttttttgtcaacactcttkgcttaatttttkttacttttataaaagatgtccctttttcacaaaaataaaataacgaattcaaaataatatttatttgttttaaaagcaactacagataaaaaaataacgaaaaaatttaaaaaatattcttttaaatttttttgactttttttgkgattttctatacttttataaaattcccgargaaaaatgacgaacttcggatcagaagttcgtcattttgtgaaaaacagttttaaagaattggtgaaaataatcgtgaaatttgttgtttaaaaatcaaccattttgacatgtcgcgaacaacttctggagtcattgttgtacatttttttcgatcttctaagaaaattgcttctaattgatcaatgatttttttatcatataacacagcatttgcttcaaagtttaatttgtaacttcggatatcttgattggctgaaccaactgtgcagacttcatcatccatgatcattgttttcgcatgtaagaaaccaccgttataaattaaaatttcaatattttctttcatcaataagcggccgtaatactgtgttgctcgataaataaacggatggtcgggcttatctggaatcataattttaacatctactcctgaagccgcagcaacctttaaagcagccaagacactatcatcaggaactaaatacggcgtttgaatccagactcttttcttggcagaagtaatcaatttaataaaggccaatttaatttgttcacggtcactgttaggaccactggcaatcatctgaatggatgtatttgcctctggcaccaatgcttcaagtttaaagaaataatccaattgatacgccacacgatttttctcgggggaagagacgttccaatccattaaaaaacgcatttgcagtaatgaggctgctggcccttgaatccgtaaatgtgtatcccgccaatagccaaactttttagtcgttccggcatattgatcggcaacattaaagccgccaatgtagcctacttttccgtcaataacaacaattttccggtgatcatgataattcaaacgaaacttcaaaagtgctttttgagaagtaataaacgtttggacaaaaccaccgttttttttcaattcattcaaatgatgaaccttggtgccctttgagccaaaggcatcgtaaagcaaccgcacttcaaccccttcagccgccttttcttctaataagttcaaaattttggtgccgatatgatccgttacaaaggcataatattcaatatgaatggagtgctgagctttttttatatccgccatcaacgcattgaatttttccgtaccatccgtaaaaatttcaacatcatttttcttagtcagaggcatcctatttaacgaggaaaaaaagtctgtaaactgttgttgctcctccgtcggcatcttttgactataaagttcaaaactttcttcttggaaattctggaaattctctaattcccgtaaatcactttgttgcaaataaaatttcttttkgtcggktaaacctcgaccaaagrataaatataagaaaaaaccaaaaacgggtagtgg

SEQ ID NO: 139 - DNA, 6146 bp; double-stranded, linear
aaattattgaaaaatcaccgaagcaaactcatacaaaatatacaaaatggcaaacagagtccatttataaacaaaaaataaaaagtcgtttagactttttattagaacaaagttcttcaattaatgacttcctagaaaaagcagaagctttgaatttatcggcagacttttctaataagtggacgacctatcgattgcttgacgaaccacaaataaaaaatactcgtagtcgaagcttgtcaaaaagtgaccccactagatatanttatgaaaagattattgaacgattgaaagaaaataaaaacgttctaacagtggaagaatgtgtcaaaagtacgagaaaaaaatgaacaagaaaaaaataattttgactatcaatttacmatagaaccatggcaactgtctcacaaaacagaaagaggatattatataaatatcgattatggctatggcaattctggaaagctctttgtaggagggtataaggttgatccattagccaacggtaattacaatatctatattaaaagaaatgagtatttttattttatgagcgacaaggatgctactaaaagtaaatacttaacaggggcttcgttgattaaacaattacgactgtataatggacaaacaccactgaaaagagaacctgtgatgcaaaccattgatgaattagttagtgccattaactttttagcggcgaatgaaatcgaggacacaagacaactaaaattattagaagaaaaattagaagttgcttttcttgaagcagaaaaaactttagagactcttgacgagaagatgttagagctgcaccaattaagtaacctcttattagaaaatgaactgcagggagatccagagttaattcagaaaaaattgaaaacattgttaccggacgcaacgcttgcggaattttcttatgaagatgttcgaggagaaatagaagcaattaaaaccagtcaaactttgttagagagtaaactggaacgaactcgaaatgaaattaatcagcttcatgaaattcaagccgtacaggaaaaagagccagagaagcaaaccgacattaagcccaaactataaactatctattggtgaacggagaggagaattttatgttagtttttaaacgtattttgtctgtaatactatttttacctttttttattcttcatttacttttccgatatattggaattttaacattgcttactagtggatttaccaccactttattattgattattgcccgagttttggcttttctttttttaataacaccaattgtgatcttagcaacagaagaacttagaatcgaatgggcaagttgggttggttggcttttatttggattacttgttctgctttttcattatctagctgccttgaatgaagaattaggaggctggtttttagatttttctgattggttaagcaaggttcctagcaaactgtgggctgaataattgctcctatgctaaaacgccttaacttaaaaaagccaaggcgttttatggtataatatacgagatagtaaaggtttatgacggtggctaatctctgaaaaaggggtgattgcctatgttgatttttggctatactcctagaaaggactagctttgactatttttgaagcgttaatgtttgcgattacttttgcgacattaattctaaaaattagtgataaaaacaacaaaaaataaccgtcaactttagccgagtttggttattttttgtaaaaatatttaactatcggtcaccgtcttaaacggtgctatcatgagggcgtatgactagtacgtcctctttacatgtttattataacacattctctacaagaagaaaggcggaagcctttcttttttttcagcgcgccttaacggcggtggcggtgggagtttggcgcgctgaaaaaaacgctcttttcttgatttctaatcaagaagatactcgctaaaagcgagtatcaggtttgtcttatattatgatgataaggcgtgctgtaaattctcttgccattgtctgactgcttgttttatcttttctggtacttsctgacggttacatwtnccttgtatttgtataacctgttgatttcgatattctaatgtgaagtaaggcatatctggcttttcttttcttcggataaaaacaatcgttgtttttccttgcgtatgccgttcgatatagtgttgactgcccacacaatggcgtagaatacttccttcttgaatgatttcttgtaatgaatgtggtgtgagaaaaagcaaatcgtcaatttcagcttctaacgctttaatttggtttttccgttcttgatactgcttttcttcaatctcacttttcaaaaggtttagcgtgttcatagcgttatcgtgagctacttgtaagttttcaggatacaatacactatcgttattaagtggggtgttcaactcttctaacatgtgtaaatagtccatataatagtcaaaacgctccccttttcgtataaaccatttttgaaactttgttaagttcacttctttcggtagttgcttaatttgcgaataatgcacgtacttttctatttcgtttatcataggcgcatttcgctcttttaacgttttttctaacatgaattcatgaaaggttggatttcttgtttttaatttttgtttattcgcttttagccatttcttagtaattactctcatatctactttatgaaaatacagtccaaaaacgttgcgatagtcgtcaaaaatgatttcattcgctaaggttgtggcacctatcttttgtaaaaactcaatttcgtttcggtatttgtaaatatgagctagttcttgacgttctatttcaggtaactgtaagtactttaattccgatacagtggttagtttttcttgccagttatttggatagaatactgtatttgtataagcactactcataaaaccataatttgctaacaagccctcatgccaatgtccgttctcataatgggctttaacatgggtatcgtttgaaaaccgttcaaggtttgacggctcatagataaggttttctattccatctgtaatcgtctgccaataactatgggtttgaatttcaattcgttttgcacgaacgagaatgattccaaaggagtaaaatttcgttggaaacgataatcgtgagtattttgttaatcgtttttttatgatagggcaattcttgcgagaactcgcaagaattgtctcctttttgttttgccattcatacgtgggtatttgtgcagtacaccagttaaaaaaggctttgggtggggttaatggttttggtgtttttttattcatacgcactcgaacaaatcaatttgttcgtccacctcttttctttctgattttgtttctgattttttggttggtttcttttttgttgtggtcgttactttaccaactgctttggtttctggtaatttctctaataagaaatactcttttatccaactgaaaaccacttcgtccgccaccatggcgcttgattggtttttggcttgttcttgggcttttcctatgcagtaagtcatagcaccttttaacgttctatcttytttgagaatacctagaaaaagcgcttcgtctgtttgtcggcataaccagttatgaacaacttctagtgtactgtcatggtcggtttctagttcttttarcattttctcaaaagcttgttcttgcgtgctttcttgagctgtaaagaaaaatcgttcgtaagaawktttgtcgctaatcactagccaytkrtakttrtttccttggtctatygtttcgtcaatygttagaaamagtgaygartagtkwccgttggggtctttwatcgyaacratygcttgttcwggtaatttttcaaggtaagycartaacgtttcgactggataaagagcgacctcataattaggataaaaacataaaaactgaacgttttttccgtctttttcaatgtgttcttttctgaaagcgacactgatatagccttgtatgtcgtcaaaaattgtcgttgctagtgttggtttgtattgtttgagtgcgtgtgttaattcatttacagtttgtatattttgaaagtccataacgttccctcgtttcttttaagcttcccctcttacatatgtaagaggggagcaaattttcgcttgtcaaaggtcagtcggtacgttatacttgaactacggttagtaattcaagtaaagtcctattagaaatcttttgtcgttagcaaaaggtttctttttttgtctttttttcgtggaaatactttgataatggttcaaaatctttcatatctccattgcaattcatagtacttactagccactctccagactgacgttgtgcatataaatagccgttgttatcagagccacgataaggtgtaaaggttactttcccttcaacgagttccgtccaaccgtcaattcggtcaaggtcagttagcgtgaggtattgttgttctcttatttcttctaatgattgtgcaagatacatttctgtttctggtcgaacatatagacaaaactcgtgccaaccacaacaagttagttcccgacagccgacattgtcgtattcgtaaagtacgttttctttcacacctaaacaggacaggccttttttctgattgataactttttgaattttttcagggtcttggtaatgttcatataaaacagcacctactccctctatataaccgtcccagtgacaatatatgccttgatacgttccgtctgcttgttctttaaaaattgctgttcgtgttcccataaaagctctcctctttcgttgttttaaatgataaactctgttgcttcgtgattatcttctgtcaagataatttcttggtcgtaatacatgttagaaaccaattcatgtgcctgttcttcgctttcagcaaatacagaaacagctacctctaaggtttcaacaattgttacacagtattttttctttttttctgccatatttatacgtccttccattcaatgtgatttaaaaagaatgctaactgattcaaacgattattggcatttttcagacaaccatagtttagtaacaatgtaggcgtatcattttcaagaatggctttatttaacttctgatattctttacgtgcttgctctagctgattttttagctgtgggtcgttcatttttactacttcctttctggtattctattatttttggtaatctctatcagtgttttttgcgcctctaacgcagttaaaattggtaagcaatctcctaaagtcataccgttaccgacaattacaaaaggttgaagtaactgccctaccgtcattttttcgtctgaatgaaaaagagtaaattctttttctaaaatattttcgccttgtaacaaacattcaatatacactttgctaaagtcgtaaaaactttctattgaaaataatttttgaagataatattctacagtttcaaaatcaatgcaatcaaaatacaaattattttcatcaatcaaaaaacattgagagcgtaatgtgttaaataaatctaaacattcttctaaatctagcgattttaaatcgttatttaaataacgattaatggataagctattaatgaaattttcttttttgttcattggttctctcctttatttttttgtttttgagcaaccatttttgtctggcgtgagggagggaagctgttcgcttctttggctcatgctaggacgtgggacactatcctcctttcgtttttagatttgattgttcattttcgccagtatgtttcggtcggttgctgtgccgagaaagaatcatagacaccaagaaaagacaagggcgaacggagtgagttcatatacccttgtcttttcgactggctatgatactgtaacaaacagcgactgaccgggacatacgacaatgagcggtcataaaacgattgagaggacacacgtccgtaaaagcatgagccaaagaggcgaaattttaatgcacttaaaagaactagacgcaaagcggctagttctttcttttgttttgccttgctttagcaggcatttctttcgagcggcggtggcggttggagcgwgatagwaataaacactaaacaaagtaatnaggtatgaaaaatggaaagacgatttttcagtgaatag

SEQ ID NO: 140 - DNA, 656 bp; double-stranded, linear
tttttgtcatgatttgtcaatactatgcttcagtcgcttcgcaaggttttgggacggagctaagaaatcaattaatgaagaaaattaatcagctttcacacaaagaattgaatagttttggtacagataccctcatcacccggatcacaaacgatatcaaccagcttcaattagctttagcgatgtttattcggttggtcattcggacaccttttttaagtatcggttctgtggtgatggctttttacattgacgtgcagatgggctttcttttcctattacttttaccaatttttagccttattctctttattatcattaaagtgactgtgcctttatatcaaaaagtccaagaatatttggatcggttaaaccgtcaaatcagtcaaaacttaagcggtgtccgtgtgatccgtgcgtttgctagaaaggaaacagagcaacgacatgttgataaagcttcagatgatttaggcgatatttacattcgtgtatcgaatgtstctgctttattaacgcctttaaccactttgattatgaatgttggaattttatttttactttattttagtggcttaaaagtttcttttggttccttacaacaaggggaagttttagcattgatcaattatatgaatcaaatgatgctcgcttaa

SEQ ID NO: 141 - DNA, 2776 bp; double-stranded, linear
cggaagattgacaaaagatcctgacttacgttacaccgctagtggttcagctgttgcgacctttacacttgctgtaaaccgtaactttacgaatcaaaatggtgatcgtgaagcagactttatcaactgtgtgatttggcgtaaacccgcagaaacaatggctaattatgcccgtaaaggtacattattaggtgttgtcggaagaattcaaactcgtaactacgagaaccaacaaggtcaacgtgtctacgtaactgaagtggtttgtgaaaacttccaattgttagaatctcgttctgcttcagaacaaagaggaactggcggcggtagctttaataacaacgaaaatggttatcaatcacaaaatcgtagctttggtaataacaatgccagttctggatttaataacaacaacaatagtttcaatccatcatcttctcagtcgcaaaacaataacggtatgcctgatttcgataaagattctgatccatttggtggctcaggttcatctatcgacatttcagatgatgatttaccattctaaacgaatttgataggagggaacaagaatggcacaacaaagaagaggcggacgtaaacgtcggaaagtcgactatatcgcagcaaaccacatcgaatacatcgactataaagatactgaattgttaaaacgattcatttcagaacgtggcaaaattttaccacgtcgtgttacaggtactggcgctaaaaaccaacgtaaattaacgattgctattaaacgcgcacgtatcatgggattattaccattcgttagtgacgaacaataattttatgacaatttccngaaccaaagagcttgctctttggttcttttttatcttgactagtgtttcacgtgaaacataacaaggttcgcagaatgaagtgttttgtgataaaataagggatgaaataactagtgaatcaccagagcaatatgctcgttggaacaagtcgcctcaaaggtctgcagaaagattggaggcaaaaaaatgcaaaagaagagaattcaaaaaaacggtttcttaattgttgtgggtcttctcttagtagaatttctcctctatttcttactaacaaataaatggctgctattggcggtaattatcgcattagatatctttctcttagtggttattcggctgttgattagagatgtagaaattacgaacgtagaaaagattcaagaagcaagttccattgctgaacaatcgttggattatgttgtaaatgaagtacctgtgggaattattacgtataacggggaaacacgcgcggtagaatggcttaatccttatgctgcttctatttttaataaagacaatcagctaacgttaaccgctagccaagttacgtcttatttagaattagcagaacgaaaccaagatatttttacgattgacgaaaatacctatcgctttagcgtcaataaagaacaacatacaattacttttgaagatatcactaaagaaagtaatttgtatcaagaaaaagtcgaaatgcaaacggctattggcattgtgtctgtcgataattatgatgatgtcaccgatacaatggatgagaaagaaatttcttatttgaatagtttcattacgacgatggtttctgattggatggaccaatacaaagttttttataagcgaatcaacgcagaacgttattttttcattgcccaatgggaagatattcaaaaaatgatggacgaaaaattttctattttggatacgatccgtaaggaatcagctaaccatgaagtagccattacgttaagtatggggattgcttatgggggcccaaccttagatcaaaccgggaccacggctcaaacaaacctagatacagctttagttcgtggtggtgatcaagtggttgtaaaagaagccaaagatgaagcgaagccgttattttttggtggaaaaacggcagtaacgacgaaacgttcccaagtacgttctcgcgcaatgagcatggcaattaagggaattattgcggaatctgctgacatctatattatgggccatcgttatccagatatggatgcgttaggttcagcatttggtgttgctcgtttagcctcgtttaataatcgaaaagcgtggattgttttagatgaaaatgaaatcattcccgatgtcaaaagagtgttagaggcgattaaagagtacccagaattagaagagcgcattattagtcctaaagaggccatgaagcgcaagaaagaaagtagcttattagttatggtagattaccataaaccgtctctatcgatctcacaagagctctatgagcgttttgataaagtagtaatcattgatcaccatcgacgaggagacgaatttccagcaaaacccttgctttcttatattgaatcttctgcctcttctgcttcagaattagtcacagaattgatcgaatatcaaagtaatagcgcaaataaactgcaggcctttgaagcaaccatgatgttggcgggaattgtggttgatacgaaaagtttcaatacacgaacgacggcgcgaacatttgatgtggctagttatttacgaacttgtggagcagactcatctttagtacaatatctattaagttctgatcttacaagctatctggaaatgaacaatttaatctctaaaagcgaatatgtcacaaaagataccgtcgttgttgcagggagtgaagacaaagaatatgatagtgtcacagctgccaaaacagcggacacattactttctatggcagggattaatgcagc

SEQ ID NO: 142 - DNA, 7337 bp; double-stranded, linear
tccattccagctatttctttctacatctgtaatatgtctaatgttatcttgatcatgcgcatcaaactcagatttagttgcctgcttttgatttagtacatttcctwaaccaacctgaktagctgttaccgcatgaggattacttatatttgatttatgggcattaaaatcttcaatatgtgtagcactatcttgcaattcttttaaagctccgtgggttctgctaaagaaccaattaaaataatcagctggtggtttttgtgaagctttccaaccatcgctagttaagctttcgggtggtttaatacctggtgctaaccaaacaggcaattcctttgtaaatttcatttgcattctcctctctttctacagcggcagtttataatcattttctggaataaagactcctcccaaagttcctccgatattaccatcaatatcagcgaatccttctttactaatctctatatcagtcgtacttgaaaatgaaaaagttccctccaaattaacgtaggctactctaatgcctccagcactgatactctcgacaatttgtaaaaattgactaatacttagacccgaactattcaagtagtcaagaggagctttttttatgattacacaagcaggttctttttcatctaccgtctcattagctgatataatatggatatcactaggatgacaatttaaagatgtcgcaattgcatgtaacattttgtcgattgatccatcgcttgtatttctagctacctttccacgaatcaatactctatatatttcatcagtcgtttttcctctcgcttgtccaacattagcacctaattcatctagtcctttccctcgtgcttcatctatcgatcgccagtttgctactttattcagcaaatcagtcaagtctttaatttcaaactcaataatttcaagaagttttgaaatatttgaattttcgcgattgaatagatctggtaaataatctctaagctttttggtcactagtaatcaccacattctctgttttacattcagctgactcatttggattcagattaatgtctttgacttcggtagtttcagtagataatccaatttttacatcagcgacaacaacgcctggnatttgataaattaatggataaatataagaaaatctgactacttcacccatagtcagatkgtwaatgtaattatttactataacttttatttcttcttgtccgkttttttcaaattttgaatctacttgaatagaaatattcacaaaaataggaacagattttgcataatcaaatttaacaatatgactaaatcctcctaagtcttttacttcaacttcctgattaccaacagtgtcaatcccagcggcaacacttttaaaaattgcctgcccaatatcgtctttcactccacctaaaatatgcacatgtaccgacttgggtggattaccatacgaatcagtttccattgttttattttcaacaacactagcggtccgtaccccactaacttctagcaaagcagttagaattccgtttattggcggtccaggattcccacgaacagaaataccaattcggtcgcgataggctttatctgtttcacgttctgccccaccctcagccctagcagggttattaacagatgatatttcttcagtaggttccacttgtactataatagtattagctggtacgtttgaactagcattctcttctaaagaaattgcgcggcctttcccaaatccattatcatcaattttgactatatcaatcatctgaaacataactttattttctgttgaaaaacgtacgccttcattaatgatgtaaccaggttttcctgagaactccagctcaaccattgcaactgtagctggatttctatagataccactattcgcacctaaacgatccaatgaaacccctgtagcttgacttatgaagccactataataaactctttcagttagttcatgagatatagataaaaaccatgcaacgatacgaataatgatacccagaacagaatgtcctgaaacattaacatccgaaccaaacaaggcttttgccttttcagacatatcatagagtatttcatcatatgtttttcttttaaatccattttcatcaagcacgtattaccacctccacttcatcacctaatgttgatagcatctccactgtaatattcaactgtctattgtttcttacaatttctatattttcaatactattaattctaggttcttgatctaaaatcgcttctgtaatatcttgtttcaagtaatcttcattgtaattttttccaaacatattatcactttctaaaccaacggatgtatctaatttaaattcttctagtcgtattgataagatcatgaatacactttgtgcaagttctaaatctccttcaactagtaaaattccatagtcaataaatgataagtctccattgactattttcaaatccctcattaagcaatcacccccataataacagcgtcattttgactatgcattctatcagatgataatgaataatcagcagaacttctataattatctatgtcacgatcacaaaaaactactactacaaccgctccctgtgagatatcagactgacaatgcttagtgatcaacgcgtttagtattaatgctcttttgcctccatctgattttaatgccattggctgaacatcagctcttgcaccttttacagtgacaactcgacatagttgcataacattaatttcttttaaaattctatttttaaatgatcgaaaaaaagctaagtcagtttctttcattaggttaccacctcacacgttgtaacaaatcgactaccatcataggagtgctggccattttttacataaaaatttccytttacattttttgaatcgatatagactgctgtacctgtagtgattttatgttgcaaaagacactcaacagaccaaccagtataatcatgactttcaacttttgttggttggttaataagtcccgtttcaggacttaatctgtatctctctttatttccatctcgaaaatttttaattacaagttgacctcttttaaaatatagtgatgtgtcacaagctttggaaatctcttctaaaaccatcattgcttggccatcagctgtgtagccagacccatatattttattattttttaacttaatttctgacaaaggaatatttgcttccctagcaactcgatttataatagtakgrgcatccgtyccattattaaaagtaatatttacttcttttkgtyccgagtaactttacctyctaaaaaagtaaatgttgttgctctatctacccgtttagaacagagggttttacttctgctatcgttcctgacgtaatcactccatttgaagtacctgcgtatcctgcgtggatatagactggatttcctttcttaataaaatcaatactttttttatttaaattgtatattgtcacactcacttcagatggattaggtgagtcagaaaaaggtgctgtaaagtgaatttctaaccgatccaacctgcctgaatcagctcttagtagaactcgattcttcccattcttgtcgtgtatttcaatttgtaataatcgttgccattgcgtatttcccatttaattatcttccctttccaaacttggaacattataattcggaggtaaatcatctatataaaggaaaacctgaataccaaaattttcaaaagttatttcttttgaagctcccgactcatccatcggcaccaaatctgctgaaggtaaacgagtatctacaatgtcttgccaaagtctttcatcgattaccatacgctcaccaatagctatcggtgtatgatctatgtcatatagatctacagtaaaaaatttttctgtttgattatagtccacctcaaaaatgtaatttgtattacctaaaggtatttcgaatttttcaggtaatgaatatttatcaataggaatatatgctcttaaagacatttagtcacctcatttcacacgcgcacgagcgcctatgggtataaatctatctggccacttgttccaatctcttaattgctgaatagacgtaccatattgttgccaccaaccccaataagtatttcctggctgaactgtcacatataccgcattacttggtttcgaaggttgttttgcaactggcggttgtggaatcttctcccaaatagtcttagctacacgtatgggttgtaacgtaattgttatagtgaaaccattttccactgtgtcataccctttactgatatcttgtataactgcatttttaaaatatgatctgcctcgataaacaatccaacgaacatctttttgccatgcaactaatgtattgtaagcttgctctgcagcgttaccatttttagcgagaatccagccactaattgtgactggaccgcctgtatacatcatattgtcagtgattggtgctcctgattcaacaggatattgagatacattagcagcactggttacagtctcactgacgtttacaatctcaactttagatttaccactctgaatgtatcccattaaacaacctctcctgttcctagaatattaagtaattttgcatactcatcttctaatgcttgtcttacagcctctttaatatcaccaacaacagatttatcagaattattcccaacattgatagtaatattaggactaaaattaacagatggagatccttgattaaagagcgctttagttttttcatgaggatgtacagttccagctgtatctgcttcgaacaattctggtccattctctcctactaaaactgtttcaccttttgaagggcggcctccctttgcataagcccttaatctatgacctgttggtccccatccagaatgtccatacggcaaatctgttctccaattagaattattgaaaaatgccattagttgatggaaaccattcattatattttcatatccacgtactttatatgcatcaaaagtttgaggaatgtactgaagcaatcctcgagctgggtttccactagctgtatttacatcccaaacagcagaactttgaataatactttggttaccactagactccctctgtatttgagctaaaatgccgtttacttctgcatcacttacttgttgattcatttgttttgcagcttttctaacttgaggaccccatcctgcagcacctaccgccacaccaccagcagctccgccataagtatcaggatttacgtgttggccatttggtccgccttttctaagttcataatgaacatgaggaccagttgaccaaccagragracctacatcaccgacgatttgaccagctttaactttatcgcccatcttagctcttatgcggctcatatgtccatacatagcccatagattatcmgcaactttaattcctacgtgctcacctaatccaatggnaagaagattgaacccaatcaaccaaaccaggatattgagctggaataggcgtccagttggagcagcataatcaataccgtgtgaaaatccccatagaggcctggtcgcttaccataatcagaagtacgaacaaatggtgatccaaaatgtggagcaaaagcacctgagccaaaagagacaccatcttccgaatcaaaaaaacctttgaaagcttcaagtttatttttcacccattcggcactggtgtcttttagtttgttcatgacaccatgtcccaaaccttggatatttttaccctttttataagkgttatgcttattaaataagccagtcacttttccaatcgggtctgatagccaatcttttgctgtttcagctatatctttagttttttctatagctttcgttcctacttcttttgctttatctactgcattagatccaaagtcttttaatttatcaacagtatttgcaccgaaatccttagcactatcaacaaaatcagaaagcccatttcctttacctttatggaaacctggtaaaactgttccttgccccataccaccatttaatacagcttttgtatctgaatggtttaaaatccgttcacccgatgttacattagtaacttctggaccatttgatcctaataaacgcattgaagaagtgctcttgttatatgctaattcaacaccttcttcaccaactagagcttgaccactgtatgatgcaccacgagatcctgtgctaaaagagcgaccatgcttgtttttagtagaattaggtgtattcggtttccattctggtattttaggaatactaaagaaatctaatacgacattaataccacctgtaacagcatttactttatcggcgagtcctgttttaaaattatcccaagtttctaatgctccagacacaactttatccatagcttcaccaaaggccttaccaaaacttttagcgccttcaactgtgccgtcccaaatttctttaaatttctttttggaatcctttttaaagacttcccatttagataatgtttgtccagtttcccagtccacttgttcaagatgaccttccgcttgctttttagcctgcgttacaacatcttcatgttgtttttctgcttctttgactacaccgtctctttgttcttgggctttttttaatgcatcatcatattgttgttgagtaatcgtaccattgacatatctttcttcatctaaaatgcgctttgtttcttcatatttttcatttgcagatttaattgtaccttcttttgctttatatgaagctgctacagcatcagcagcctgttgcgcgctaatctcacctgatgcatttttcaaattacccataatgattttttgctctttagctgaatctgataatgcaacaacagcttgatttttcatatcttcatgaatcgacttattagcagcagcatgtttttcttcaacagcacgtactgcagcagctgaggttttttctaacgactcaatttcttttttatcgttttctgatagttctcgattttctaatcttgctttttctttgatttcattgatacgatttgtgtaatactctgtagcagtaatagattcatcatattcttgtttttctaatttcttgaaatcttgaactttttcagagaacatatttgttcgtacttttgctaattcatcagcagctgccttggctccttgtacatccttttcattaagaattcccataccagctaatttatcaagattgccattagatttatctktctktttatkcagctgtttagtaacttgattctgcatgtcttctaaagctttatatcgtttagtaacttcttccattggtaagaactcgtccttcaattttacctgtagtgtant

SEQ ID NO: 143 - DNA, 1160 bp; double-stranded, linear
ataaggaggaaatctgatatatgaaaacaaaacgctttcagcgcacggcggcgatgctgctgtgcatttttatctgcgcgtggacaatgttccccctgatgggtgcggcctttgcckcsgagaatgggctgcatgacaccgctgaaccggaaatcacctgcttctgtgatattcactgcacggcggatgccctcaatgcagactgtccggtttgtacacaggatgtgaacgcctgcaccggcacggaaccggaagcgcccaccgaaacagaaacacccaccgagccggaaatcacctgctcctgcaatatccgctgcacggcagataccctcaacgcagactgcccggtttgtacgcaggatgtagctgcctgcaccggcgcagagccggaaattgcctgtttctgcgatattcgctgcacggcggacaccctcaacgcagactgccccatctgtgtgcaggaggcagccgcctgcattggcgcggaccggaacccgtctgtacttgtgaaacgcggtgtgcggcagacgcacctgacacggattgtcccatctgtacgcaggatgtaaccggctgtaccggcaaagagccggaaccgcctgccaaactggtctgtatctgcgccgcccactgtgaacccggcgcggtcaacgccgactgccccgcctgcctgttgaacctggcagactgtattgtggaagcccccacgcccgtcccggtctgcgtctgcgaaaaccgctgtgaacttggtgcggtcaacgccgactgcccgatctgcagaaccgacctggccggatgcaccggcaaagcccccgcgccaatycctgcatccaatctctccatcaaaattacaccgccctccggctgggcaaccggcagtgctgccgccgagtttcgcattaccgatgaagccgggaacggctttgcgctggtgcaggtgaaaatcgagaaaaacgggcaatggcgggatgtgacggacagcttgaagcagaacgaaaaccgctggtatggggaaatcgacctttcggagaactgcaccgtctatgtctgcgccaacggccatgatgggaagtgtatgagaatcccgctatattgagtgtttcgaccgmacggcctgcttacgcgccggcatkgacggcggttstccgtgcggaacaagc

SEQ ID NO: 144 - DNA, 12860 bp; double-stranded, linear
tttacntgaaccaatttccaatgtggatgggatgattangccaaacgttctggccattnccctggccatttttcaggaccttctaccacatattgtggatattttgccatatattccgctgctccgggtctatttcttacacgcatatttaaaattcctttcttttaaaaacagactggtgaaattcgccagcctgtgtggatgttaaatgaattagtttaaatactaaacattcgttttaattgtaaaatttctgcagtcattgctcttctttcgccctcttggtgatgacgaacaatctcttgtaaaaagctaaataaaccataccaataaattcgttgaaccgtactttcattcgggattaaaccataagatagtaaccattgattccaaccggaacgagggacataatgactcaaaatcattcctaaatctaccgctgggtccgcgaccatcacagaatcccaatctactaaatagagataattattcgagactaaccaattccgatgattcacatcgccgtgaacagctacataactagtttctggatattctggtaaatgattatataaataagtgattacttcttttaaataactgtttcgttttaattctttaggtagttgacgcttatactctttcaacattgttagcggggtacaaacttcgccaccaatttttttcaacatgtctttcagcaaattggaatgatgcaattggtataacacgtcaatcacgtcattgcgtttgccaatttcgtccgcatgtaataaacgtccttccagccattcttgggctgttagtacgtcgccattcgctgtccgctttgtccaaatcatcttcggggctaacccttctttagacaatgctgcaagaagtggagaagtgtttcgtttaatgaacacttyctcggtttcttktattcccatgtatgtttgaccagttgcgccctttatcggctgcagacgccagtctttatccaactgaaattccatggaaattatctcctatctcaacacaattttattgcaatttttacagcaattaccattttagtcgccaaaccttgcttcgtcaagcttctatgtggttcttttgtaaattttgctgggtttctcatctttataacttattcaagcgcattggaacatacattttagtgaaaatcacaacttctacaattaaggcacccagaatgatcaagctattttgcaaactgcctaaacgaaggcagacaatcccaccaaaaataatggccgcaacagataatgcgccgctaattaaccggcgaatcgctgcttgttttttttctattgaaattggatatagctgtgtcatcaccatataatcaaattgcgtgtacatgggaatcaactggaacccgattaaatagacaaacaataaagcaactaccaacgcaatccagaattcttgtaaaaagaagagtagcacgccaccaaccaaaatcaaacgaaacaataagccgctatattcgctacctcgtaaaaagctccgaatgaataagtaagcatacgtgttctcagatgtttttttgactactccgaggagaggatctaagtatttacggcgtttcactgtactactcacttcaggaatatctgtaaacagctgaatgaatttataaattctatgcattctgttttgttctttttggatcattttttcccaatccaagaaactctgtttcatcttattttgccaaatactcgataaacaaacggccagaatgatgccaccaatcacaccaacccaaggcgtccagtaaatagctcccgtcataatcaagagactactgatcaaccaaacaaaccaccaactacggtaagtggttgacgaaagatgatagagcccatagctttgtaaactaagatgtgtataaatcatacaaactagcatgaccaaaaataaaaagaaggtttgaaacgaccaacctgttgtgactacaatcaacggcatcaataggccacttcctagaaagctgactacaatcggtaaaagtaaagagtagcgcagcgctcgtttcagataagcagcgaattgtttttcttttggtaataaaaacaccttgtctggctcttctgtcagagtagccaacttaccaacttgaatgagtagcagccagcccaatagaattaacggtctgccccaaacaaaatcacgaggtaattcttttaacaactgggaatagtacagacctaatccgcctaataaaaacatacagactaaaacaaaatgatcatttaaaatatagcgcaagtacttggacatttttttgaaatgccgtgacaaacgttgactaaaaaattcgcccatgttaccccaccttttcttccttcgtcaaggcaagataaatatcatctaaagaagactctggtaaattaaattctgcacgtaattcagccattgtaccgtttgcccgtaatttcccttcgtgtagcaccacaaaacgatcacaatatttttcagctgttgctaaaatatgcgtggacattaaaatcgctgccccttgcttacgcatcgtatccattaattctaataaagcatgaattgctaaaggatctaagcctagaaaaggttcatcaataatatataaactcggttcaattaagaatgcacaaagtaccatgactttttgtttcatgccttttgaaaaattagcaggaaaccattccaatttattgtctaaacggaacgtttttagtaatggttctgctcgtttgaacgcttcttctaatggaatatcataagccaaggccgttacttcgatatgctctttcaatgttaattcttcatataaagaaggtgtttccggaatatacccgatttttttacgatattcttcaggggcttgttgcaatgtttccccgtcaatcataattttgcctttttgcggcgtaagtaacccaataatatttttgatggtggtacttttccccgcaccattcaagccaattaaaccaaccatttcaccagacttgacgtcaaaattaatatcttttaagacaggaatatggccgtaacctcctgttaaatgttcaattgttaagctcatttcttttgcctccaaccttttctctctaccattattaaaccctaagcgaaccaagaattcaaaaattactcccttaattaaatggatttttttctttctcttattatacacgaaatgaaacgaactttttagcgaactcacgtactttttcatccacagagaaatcaacttgtggtaaagtaaaggaaagaacctagagaaaagaggaatttttcatgaatgattgtattttttgtaaaattatcaacggcgaaatcccaagttataaagtctatgaagacgagaaagtctacgcgtttttagacattacacaagtgaccaaagggcataccttaatgattccaaaacaacatgttgctgatatttttgaatataatgacgttttagcaagcgacgtctttgctcgtattcctaaagtagcacgagcattagaaaaagcttttccagaaatggaaggattaaacattttaaataacaataaggaagtggcttatcaatccgttttccattcccacgttcatttgattccccgttattcaaaagaagatgatttctctattcattttggcaaccatcaagaggactattccgccgaagcgatgcaagaaattgctgagaccattgcaaagcaggtgaactaaatgaaaaaatttattaaaggtctcttttttggcgcagctgctggtaccattggcggcttgttggctgctccaagaagcgggaaagaaacacgccaacatttaatcaatgagctagaggactatcgttcactgaaaaatcaagtcacgaatgactgggatcaggtgcaacgaaatttggcagttgtcgaagaaaacgttccactggcaactgaattttcaaaagacctgcaacaagaaatcactgatttcaaattccaagcggaacctcggattgctcaaattaaagaacaaattgctaaaatcacggctgaattacctgacacacaaaccaacaagcaaaagtaaagtcttttatgttaattatttcttttgttattaaaaaaataaaaagtgtgacgtaaatacgaattttgtttgaaactatgcctgagactctttctttttcaaaatgaggtatggtatagttataacagawataaaactaraaaaaacaggagtgcataagagaatgaagaaaaaactaatcttagctgcagcgggcgcaatggccgtttttagtttagcagcgtgttcaagcggttcaaaagatatcgcaacaatgaaaggttcaacaattactgttgatgatttttataaccaaattaaagaacaaagcactagccaacaagcgtttagccaaatggttatttataaagtctttgaagaaaaatatggcgacaaagtaactgacaaagayattcaaaaaaactttgacgaagccaaagaacaagtagaagcacaaggcggaaagttctctgatgcattaaaacaagctggtttaactgaaaaaacattcaagaaacagttaaaacaaagagcagcctatgatgcaggtctaaaagcccacttaaaaattacagatgaagacttaaaaacagcttgggcaagtttccatccagaagtagaagcacaaattatccaagttgcttcagaagatgatgccaaagctgtcaagaaagaaatcactgacggcggcgatttcacaaaaattgctaaagaaaaatcaacagatactgctacgaaaaaagatggcggtaaaattaaatttgattcacaagcaacaactgttcctgccgaagttaaagaagctgccttcaaattaaaagatggcgaagtgtcagaaccaattgctgcaacaaatatgcaaacctaccaaacaacctactatgtagtgaaaatgacgaaaaacaaagcaaaaggcaatgacatgaaaccttatgaaaaagagatcaagaaaattgctgaagaaacaaaattagccgatcaaacatttgtttcgaaagtcattagtgacgaattaaaagcggccaatgtgaaaattaaagatgatgccttcaagaacgctttagcaggctacatgcaaactgaatcttcaagcgcttcttcagagaaaaaagaatcaaaatcaagtgattctaaaacaagcgataccaaaacaagcgactctgaaaaagcaacagattcttcaagcaaaacaacagaatcttcttctaaataagcataaaaaagagagtggtcgattgaccactccctttttttatttatcttttggaacatagaaactgcggttatctaaaccaaagattcgttccgtatactccccaggctgtgtttgacgaattgcccctagcattcatttgaatggacgcatccatggtatcaatttgatgtaagatttccgcttccataattcttggtcgcacaggtgagccatattctaacaatccatggtgggctaagaccatgtgccgaagaacgacaacatcttcttctcgatcatcaattttcaaagccaaacacgccttggtaatttcctcatccaccaaaactaaatgaccaattaagttccctgccaccgtatattctgtcgtaatagcaccagatagttctaaaacttttcctaagtcatgtaaaataatccccgcgtataatagtgacgtgttaatttcagtatattccttagcaattgctttgcctaggcgcaacattgagacagtgtggtaagctaagccattcgcaaaagcatgatggttccgtttggctgcaggaaattcataaaattcttgttggtatttcgtcatgagatagcgcacaatacgattccaatgagcattggtaatttcaaaaatcacttgattgatttcctcgaccatctcttcttttttcaaaggcgctcgttccatatataaacttggctggcttggttcctctgctgtcgctaaacgcatgtgtaaaatttttacttggggtttattttgataaacttctcgtttcccattcagtaaaacaacgtttcccgcagtaaatcgtgtaatttcatcctcagaggcgtcccaatattttccgtcaatcgtgccagatgtgtcttgaaaggtaaaggcaataaactttttcccatttttagctacacgtacatcggcatttttaattagaacaaatgattcaaaaagttcttctactgttaattcacgtaattttttcacttgacgcttcctccttctaacgcaattactctttgttgtaagtcctgataatagcttaccatttcttggtcagaagaaaaacaaatgacttgctgtttttgaccaaatttagtaaataattcagctaattgggcttttctttgatgatcatagtgtaaccagccatcatcaatgataattggacaaatcagttgctcgccttggactgctaaaaaggcaaaacgaacagccatcatcaattgatctttagtgccagttgataattcatgtaaataaaacatttcttgttctttcgtcaccgcaactagttgaccttcggctacttggattgattgataacgctgatttgttaaaagtgcaaagtagcttgatgcatactgtaataagctgggcaattgttgttccgaaagctctgttaataggtccattagcagttgtcccgctagttgatacccagaccaacgttgagctagttctttgatttccgcttttaaaattgcttgtcgttgatacaactcatctaaggtaccatccgtcattaattgttgtttttcataaatcagcgcttgatactgttcttgtattttatctaactggctttcttccaatgcttgttgctgcgccagttgtaaagaacggtcttttaacgttgcttctgttaccgcttctggaaacagattacctaattgcgtcgctaattcttgcccacgaccaacttgggcttgctgagtggtcagctgttgaatcctacttggaacatcagcgattgatagaatccgataacgaattagtaaaggctgaattcgtgttaatgcttcttgctgtttagttttcaactctcgtaactgctgtttgagatagccatctgcttgatactcttgagcaaagcgaactttctccatttcttcagcaaacccttctaaaaagtgtaacttttcggaaaggctctttccttgcaagggtaaatgcgtcatcaatgggaagatttgttcttcaaatacttggcgtttttgttgattttccttcaattgactcatgagttcttcatttgtttgaacaagcaataaatagcgcgtaatcaattcccgctgattcattaaagtatcaatttgttgcatttttcctaattgatggacttgggcttgctccgctactgcttgttcaagttgttccacttgcagttgtgcctcacgttcttgattcagcgcctgttggaactgttcatttaaataatctagttgcgaaagttttgtctgccactcttctttcacttcatcagaggaagcttcttttctagtggcgtagctaagcacttctttcgcgataaaactaactcccacgagaactaggccccattttaaagggcttggcaaaaagaaaccgagtaatacaaggatacttcctagcaataaccaaagtggttgacttgttttctgtgctttttgggcacgcgtcgcttcaccaaaaaatgcggcatgcgctttttcaaaatctgttaactggtcttccagattttcaatttgagaagccaagaatgctttctgttcttgtcctttttgaagagcttgcgtatacgcaacttgttgttggcgccacttttgaacggtttcgttgtcataaaaaagctgtggtggtcgttcaggcgaccatgaccattcgttctctaaaaggaccatttcttgacgattttgctcaaaggtttgggtcatccattccgattccgtcatcaattgttgcatatcatagcgttgattcaacaattgttgaatcaatgcttcttgttctaggtaaaaagcatatccttctggaacatcgagcgcttctgactgaagagataactctttggtcaaacgttgtcgttctttgtctaggtacatatattcttgaaaggtttcttctaattgaacttggtcttcttttactaaaacaacgttctctgtttcttcaggtagcgactgccattcttcgtacaagggaaagtgacgttgctgttccgcaacctgtaacaagtcctgttgcgtttcttttaattgctgttgcagtgtcactcgctgttgttctgtttcgcgaatcgtttcttctaattgttgaaaagtttgttgctgcgcttctttctcttgaatttgctcttttagttcttgataagccgccaacttctgattgagtaatggctgctgtcctttacctttaaagattttttgtgcttctttaaagtacgcatttcggtaagtcaaaagttgttgactaccagaaacaccaatggctaacaaggatgtttgcagttcctcttctgtcaacttgtcactcgtaattaattgttcttgttggaaagtaaaaacctcttgaaataactttttcgttagcggatgtaacatttgctgtaaggttttttcatcccccatttgttgttgataataaatgattgcttgccctttatttttttctttaaaacgctcgacttgaacttccccaaacacaggatgtgccaaccacaaacgaccaccatacgagccaccatttttaggtgcgtaatcgcgttttcttttgccctttgtgggaaacccaaacagcattgcttgaataaattgatacaatgtggacttgccaacttcatttgcgccgtacagcaattgattaccagattcaaatgtaattttctgttgttgccattttccaaagcccacaatctctactgcgagtaatttcatagtgggtcctcctgaatagtaaagtcttcattaatttgctcatgtgctaggcgcaagctctctaatcgccactgctcatccattgaaaaaattccagcaaattctggataacgtaacaattccttggtggtatcttcaaaaataactggatctaagtatgttttttctaatgccgttaataagttgggactagcggctaaatagatcggttctttcgttggttcctctgcttgcagtattaggcgataaacaaaaaaatcaccttgcgttttttgtaaaagctgctgctgtaagtagcttaatagttcaccattgacaatggcttgcaccacggtcacatccaaatgttgcgtttctttcagtgtcaacgccatcaattgctgttgctgatgcgcctgccacttcgtcagcaaactggtttcaagataagacaaaacgctttgggtgtcacggcattgcgcaagagatacttcttcattcgtccaatctatttctgcgactttttcaaattgaacagtcgcttgattttgggaaagtgtgaccactgcaaccccttgtaaagactgttcttttttcgtgtgtccttgaggtgttccaggataaacaattagcggttgttcactaacaatttgcggctgatgaatgtggcccaatgcccaataattatagccagtggcttttaaatccttccatgtaaacggagcataattttgttgcgctttccgactggtgtctccatgataaatcccaatatgaatatcagattctgcttgtttgataggaaattctagtgctttattttcatcaatccagggatgctcataactaaaccctgaaacagccacttgttcgcccgctttcgtttcaaaatacagtgtctcaaccatttctttttcaaataaaaagacattgtctggaaaagaaaaccaatagcggtcttttttatagtaatcatgattcccaaatgttagaatcacagggatttctgcttgtttcaactgttctaatgcagccatcaattgggcttgcattgaaatagaggtctgactttgatgaaacgtatctcctgcaaaaataaccaagtccaccgcttctcgaatggcaactgttacgatattcattaacaattgttgattagcttctcttaagcgcttcgctaaggctgtcgggatcccagttaacccttcaaaagaccgatccatgtgtaaatcagctgtatgcaatagtttcatcgtttcccctccttttctccttcctttatcatatcattttctgccagcttggtcagtaaaaacatacgaaaatttgttcgtttttttattttcagtaaaagaaaaactctgacaaattgtcttatagacaacttgtcagagttcaattacgtaaattaatcgttatacatatcacgcacaggagtcatgataattcggtttaaatcattgacaactaagctaaacgcttgttctttttgcattaattcgttgataactgctgtttcttgcactttcgttgcaatgctttgtgctttttcagcatcttcatccgtgaattcttcgccgcgcatttgtttttcttgtagtccttgttggaatccttggaattctttaaacaatgtgtaagctgcttcgtctgcttttacttcttcatacgctgcttgtaatgctttaaattcgtctaactcacgtagttcacgttcaatctgattggctgtatcataaatgttactcaatggaatccctcttttctcaatagtttcatctttattgtaccatttctcttaggttttcccaactaatttcctaataagcctccgaaaattccttcaatcttgtctttgacttttttcgcgccgtctttaatttgtcccccaacttcattcaatgtatctccgaaattgctagcgccgtcttgaacagaatttccaaagtctttcaagttatcccgccaattagaattggcaccaccagttaaactatcgttgctatcaacaactttcccacctgtggcataagcatccgcgacaggaaattgtgcttgtttgacttgtggcaagatgccactggcttgactgttgaacacctgtgaggcatacgtagcgctactgccttccaaataatgggttttactggtttcttggaagcctaaccaagtagcaatgacaacttctggtgtataaccaatcacccactgatcgttcgttttactactatcgaagttggtttctgtcgtacctgttttaccagccattacgtagcctgctggttgtgcgttgaccccgctcccagaactaaagacccctagtaacatacttgtaatcccgtctgcaacatctttggtaatgacttgttctttcttgactttagtattatcaactacaattgcgccagttgagtcgacgatttttgtaattaaatgcgtttcagttttatagccttcattggcaaaggcactataagctcccgccatagttagtggcgaaacacccgtttgtaatcctccaagggctaaaccatagtaccgatctttttctgataacggaatgccaaatttctctgttttttcatagcctttatctaaaccaatttgatgtaataaccataccgctggtaaatttaagctttctcctaaggcttgatacataggaacttctccactgtacgtgcggctatagttttgcgctggataataatcttgtggtttatcttctaaaacagagtctggtttatagccagcctctaaagctggtgtatagacagaaattggttttaaggacgagcctggtgaacgttttgtttgcgttgcaaagttaaagcctcgataaacgtgttcccctcgaccgcccaccagtgcttgcacgccgccggttttcggatcaatggctacagagccactttgaaccatggcaccgtcttctgcattgggtggaaatagtgcatcatttttataagttgcatccatcgcatcttgatacccctgatttaaagaagtgtaaatcttgtatcctttatttaaaatatcttcttctttaaatttataacgattgaccgcttcatcaattaccgcatcaaaataatatggatatttgtaactattttcgtcgccaacataggtgtcatttaatagactcgctaagttaacactcgcttcttgattggcttcttcttgagatagttttttattgtcgaccattagttgtaaaacggtattccgtcgcgctgtggcattgtcaatgtaatcaattgggttataaattcctggcccttttaacatgcccgctagcgttgcggcttcccccactgtcacttgggacgcatccacgccaaagtatttacgagctgcatcttgcacgccccagacaccattaccaaaataagaattatttaaatacattgccaagatatcttttttcgaatatttcttttcgatttcaatcgctaagaataattctctggctttcctatctaacgtttgttcttgcgttaagtaagcatttttggctaattgctgcgtaattgtacttccgccaccaccgccaccgattttcccgaaggtcaattttccaacaaccgcacgggcaatccctttgatggaataccctttatgttgataaaacccgcgatcttcagttgaaataaccgcgtcttgaatataaggagaaatattatccagttccacaaaagtccctttttgcccgaataactttccgacttcttttcctgattcatcataaacgcgtgttgattcacttagccctgattttagggtctcaacgtttgcggacttggctaagtaaaataaataaatactggcacctaaagcgactaccaaaccaattaacaagaaaattttattgatttgatactttttccaaatccgctttctggcttgatggaattgtattaaataaggcttt

SEQ ID NO: 145 - DNA, 9086 bp; double-stranded, linear
aacgctaaaacctttaataaataaaggttttagcnttttaataaagagccacctgccgggcttgaaccggcgacccccaccttaccatggtggtgctctaccaactgagctaaggcggcactttcaaaggctaaactaactcgaggattgcaacgaatgaaacccatagagttcattttcaaaggctacactgcgacgagtaatcgtcaaagttccttttgaaaaatcgtacaaatctcgtgcacaagaaatagaataacgtatagacgaaagtttgtcaattgctctttcgtaaaaaaagaaaaatgatttttttctaagaaaaactgttgacaatctcttttttctctagtaaagtgtaaatcaacatcacagataactattcattcgttgaagagaagagtaaattttgatgaccttcaaaagagagtcctgattggtgamaagggacaaggttcagaaaagttgamgatggcctctgagaataaattgctgataagtaagcaatttcggctaagcacccgttaccatgtgcaccaagttaataaagacttggataagagatgagatataaagaatcagttatatttcaaaaaaaggtggtaccgcgaatcattcgccctttactagcaaaacgctagtgaagggctttttgctgtgaatcactacgactggcgcgaagacagagtagatgatgaacagtacaagatgaccgaaggcaagttgtgtcatttgcacgaatcactacgactggcgcgaagacagagtagatgatgaacagtacaaaatgaccgaaggcaggttgtatcatttgcacgaatcactacgactggcgcgaagacagagcagatgatgtctgcgattactcgacgcaggatggcctttgtgagtgatgaacagtacaaggtgaccgaaggcaagttgtgtcatttgcacgaaagtgttcctacgattctcgtcacagtcaaatcctgttgagcactacgactgatgcaaagagagagagtagctattatctgcgattactcgatgcttgaaggggtagtaactctagtctgtttgattttgaaaataaacgaaaatcagtttaaaatgaatagaaataaaaaagcagtgatatagtaagtacaagacttgatttgtctaacagagagcctaggtagctgagaataggtgacaaagacgttttggaaaatggctattgagcaagcgctccgagtgttaaacacaaggcggcgacgggggctcccgttatcgagctagggtatcgaacatattgttccgtacttgaaaagggaatttgtgtgagcaaattctgaacatgaggtggtaacacgcaaaaaagsgtsctcaacgatacaactcgagttgtgtcgttgaggatgcttttttcttttttatgaaaaaatgcaggttggtaagaatgaagggggataaagaatgattgaactaaaaaatatcagtgtgacatttcaacaaaaaaaacaagaaattcaggctgtccaagatgtttctttgacaattgataaaggggatatctacggaatcgttggttattccggtgctggaaaaagtacgctagtacgggtaattaatttattgcaacgaccaacagcgggcaccgttattattaacaaagaaaatattttaactttttctaaaaaggaattacgacaacaacgaaaaaagattggaatgatttttcaacattttaatttgatgaaagagcggactatatttagtaatatcgatttttcattaaaatattctgggctaagtaaaagtgaacggcgtcaaaaaatcagccatttattagagctagttggactaagtgaaaaacgggacgcttaccccagtcaactatcaggagggcaaaaacagcgggttgcgattgcccgcgctttagcaaatgatcctgaaattttactttgtgatgaagcgacgagtgcgttagatccaaaaacaacgggacagattttagccttgttaaaaaagttaaatcaagaactgaacttgacgattgtcttaatcacccatgaaatgcaagtggttaaagaaatttgtaataaagtcgcggtgatggaaaatggctgcgttgtcgaatcaaacgatattgtttcgatttttagtcaaccccaacaacctttaaccaaagattttatccggacagcaactcatattgaccaagcattaacaacaattcttgaacatcctaaattagctgatttagataaaaatcaagaattaattgaattttcttatgtgggagatcaaacgaatgagccattaattgcacaattgtatagccaatatcaggtgtatacgaatatcctttacggcaatgtcgaaattgttcaaaatgttcctattggccatttaattgtggtgctttctggtgatgaggcccagcgtcaacaagcccttacttatttagcgaaacaaggcgtgcgaaccaatgttttgaaaacctatcagcaaacgaagcaaaagcagaatttacaggtgatttaaaaaaggagtgaactgagaatgtatcaattatttgagaaatattttccgaatgttgtccaattaaaacaagagtttcttcaaagtacatgggaaacattatacatggttttttggacagcattgattgctggcgtgttaggagtcttgttgggtgtcgtgcttgttagtactggccccagtggtgttttgaaaaatccacccctgtacagtgtcttagaaaaaattattaatgtttgccgctctattcctttcattattatgctcgcactgattcaaccattaacacgaattttggcaggaacgacaattggtacaaccgcagcgttagtcccattagttattggcgtaatcccgttcttcgcgcgccaaattgaaaatgcgttattagaagtggatcctggcgttattgaagcggcagaagccatggggacgagtcccttagggattatttttagggtttatctaattgaagggttaccaagtattattcgtgtttcagcggtgacaattattaatttgattggattaacagccatggcaggagcgattggagccggtggtctgggcaacttagcgattactcgaggatacaatcggtttcaaaccgatgtgacatttatggccacgttaattattttaattatggtatttatcagtcaagccattagtaatcaattaatcaaaaaaacatcacattagaaaaaaggagaaatgacaaatgaaaaaatttagtaaattaattggacttattggggtattagcttttacgattgcaggttgtgcatcggggtctgtgaaggatactaagacagaaaccgttaaactaggggttgtaggaacaaaaaatgatgaatgggaatcggtcaaagaccgtttgaaaaagaaaaatattgatttacaattggtagaatttacagactatacgcaaccaaacgcagcattagcagaaaaagaaattgatttaaatgcctttcagcatcaaatctttttagacaattacaataaagagcatggaacgaaattagtatcaattggcaatacagtcaatgcaccattgggaatttacgctaataaattgaaagatatcacgaaaattaaagacggcggagaaattgctattcctaatgacccaacgaatggcgggcgggcgttaattttattacaaactgcaggactgataaaagtagatcctgcgaaacagcaactaccgactgtcagtgatattactgaaaataaacgccaattgaaaataactgaattagatgctacgcaaacagcgcgcgctttacaagatgtcgatgcttcagtgattaatagcggcatggctgtcgatgctgggtatacaccagataaagatgctattttcttagaacctgtaaacgaaaaagcgaaaccttatgtgaacattgtcgtggcccgagaagaagatcaagagaataaactttatcaaaaagttgtagaagaatatcaacaagaagaaacgaaaaaggtcattgcagaaacatcaaaaggcgccaatgttccagcctgggaaacatttggtaaaaaataaaggaggcatttataatgagtacaacaacgattcaaacaatccaagaagctattgctacagaaaaggaatggataatccatttaagacgtcattttcatcaatatcctgaagcaagtttaaaagaatatgaaacgattaagcgaattaaagaagaactactagccttagctattccttttgtagaagtaggggaaacgggtgttttagcaaccattgaaggaggtcttggcgctggcaaaacgattttgttacgtgcagatattgatgcgttggaattgccagatgcaacaggtgctgcctatgcttctaaaaatccaggactcaatcatgcttgtggacacgatggtcatgcggcagcattgctaggtgcagctaaagtgctcaaaaaacatcaggataccttttcaggaacgattaaactggccttccagccagctgaagaaattggtgcaggcgctcgacaatttgtggaaggaaattatttagaagcaatcgaccaagtgtttgggattcatttagattccagtgtgccggtcggaaaattagtcgctaccaaaggcgccaccaacgcctcttgtgatatttttaaaattgaagtcagtggtcaaagtagtcacgtcgcccaaccacagaatggccgggatgcysttttagcagcggccagtatcgttgtggaattacaaaaaattgtagctcgcgagattgatcctttagattctgtcgtagtaggaattggcgttttacaagcaggaacacgctataatattgtagcaaaccaggcaaccattgaaggtactgttcgaacatttagtcaggaaacgcgccaatttgttttacaacgagtcgaagaaattgcccatgaaattgcccagtctaatcgcacagaaattgctgatttttctgtttatgcggcagcgaatccattaattaatgaagaacaagcaaccaaccgtgcacagcaggtagccagtgaaattgttggttttgaaaatgttgtgaccgatcatcctaaaagtttaggggcggatgattttgctgattacttagcggtaattcctggtatctatggacgggtcggttcacgaaaccctgaaaatcctgctactcattttggacaccatcatgaacaatttgatattgatgaacgtgccttacttttagcagcagagtaccacgtacgctatgcattaaattatttatcagaataacagggatagggagccgacaaaatgatggtttgtgggctcctttcgttataaaccaacgtggcttgctttcttgtcatactatggtagaatacaagcataagaaaggtgattcacatgttttttgttttaactgataaattaacaagaaaagtagctcccgatagtttaagaacagatgaagcactgttgtggagccgagcaattaatttcttcatcgcttgataggacattttttgactagaaaagctagtcttatttgagtgtacgtacaagcggttgtcgggatttctgtcaggatggacgacgtgcagacgtggttctttttttgttgtcccaaaataatcagttaacaagaaagaagtgacgaaaatgagtattttaactattgaacatttaacgcatcgatttggcgaaaaggtcttgtatgaagaggcttcattgcaagtgaataaaggggatcatttaggcttaactggccaaaatggggtcggcaaatccaccttaattaaaattttaacgggggaagtattgccagacgaaggaacgattcagtggcaaaaaaattgcaagattgggtacttggatcagcacgtttctgtagaacaatcactaacgatggttgattttttgaaacaagcctttcaagaactttttgataaagaagcgaaactgacaaagctttatgaagaatacagtcaaacggcttcggaaaaacttttagaacaagcaggcaagttacaaacagatttagatgaaagtaatttttaccaaatcgacacgattattcaggatttagccaatgggttaggactacaagcaattggtttggataaaaagttaggggagctaagcggtggtcaacgttcaaaagtgattttagcaaaattattgttagaggcccctgatgtgttacttttagatgaacccaccaactatttagatgatacacatattcaatggcttgttcgctatctgaataattttgaaggaagctttctattagtctcccatgattatcaatttttaaatgaagtgacgaattgcatcgcagacattgagtttggcaagttaaccaaatatactggaaatgtagaaaaatcttttgcacaaaaagagcagaataaacaaacctatttgaaacagtatcaggcccaacaagaaaaaattgaaaaaatggaagcctatattcgtaaatacaaagctggaaatcgagcaacgatggctaaaagtcgacaaaaacaattggaccggttggaacgattgactccgcctggttccttgactaagccagcgattgaatttccttatcaagggttagttgcaacgcaagcactaacgacccagaagttagttgtcggctatcgggaacctttgttagaaccgttagatttaatggttcatgtcggtgaaaaagtcgcattgaaaggctttaatgggattggcaaatcaacattaattaaaacgttgacgaaagtgattccttcattagatggagaatttcattatccgctgaatacaaaaattgcttattttacccaagacttagcgtggcctaatgagcagttaacgccactagactatttatcagatcgttttccagatacaacgattaaagagcgaagaagtcatttggctagagcaggtttaccagataagttagcaatgcagtcgctagccctgttaagtggtggtgagcaaacaaaagtaaaactagcggaactaatgatgcaaacaagtaatttgttatttttagatgagccaaccaatcatattgatgaagcggccaaaaaaagtttacaagaagcaattcacgtttacccaggaacggtttttctggtttcccatgaagcagatttttatgaggaaattgtggatcgagtaattgatattgaggaattagttaaataaagaagaaagaaccaagttgagggggagtcaacttggttctttcttctttattatttatttactcattaagccatcatggatttttgttaaattccagttcatcatgctgtagtacgtatcgccttctgttccttctttggcaagagagtctgtgaaaagtgtatcgtaaattggtcgtttcacttcttttgagacccgttccatactacgtttatcgacactggtttcaacaaataacacaggtgcttttgatttcttaatggtatcaataatcgtggtcatttgttcaggtgtyccttgactttctgtgttaatttcccaaatataagcggcatttaaatcataagctttggagaaatatttaaaggcaccttcacttgtaactaataattttttatcatcaggaatatcagcaaatttagctttggcttcctcatgtagtttgctaagtttttcggtataatttttcgcgttttctgtatagaaatctttattttttggatctttttctactaacacgtcacgaatgttttctacatatttaatgccattttcaatgtctaaccaagcatgtggatcttctgtttgttcttgaccggcacttgttaaatattgtggcgtaacatttttgcttgtagaaaagtaatctttattctcaacttttttggccgttttcattaatttgttaaaccagccatttccgcctgtttctaagttcaagccgttaaagaataaaatgtccgcttcagaagctttcgcaatgtcttctggtaacggttcatattcgtgagggtctgtcccaattggcacaatactatgcagctcaattttgtcttgcccaacatttttcactaaatcagataggatcgagttcgttgtcacaattgctaatttttctttcttttcagcggcttgattcccgcaagcagctaacgttaaccctgctaaaagtgttaaaaaaaataaactaaattttttcattcgttgattcctccatttctttctcacggtttacaaatactaggcctttctttggtgagaaaaagaaagccaataaaaagaataaggcggcggttaaaacaatcgtcgcaccagaagctaagttataagaataactgaagaataggccaatcactgaacttaaaatcccaaaagtagaggctaagccaatcattgtcggtaagtgatttgttaatwgatagctgttgctgctggcgtaatcagctggcatgactaaaatagttccgacggtttgtaamgaagaaacagcgactagtgttagtaaaaacatcaatgcatagtggaaaaattgaatatttaaaccgtaggcctgagccattgtgggatcaaaagaagtgagttgcaactctttataaaacaatgccacaaaaatcaaaacaatcacaccgacgacacaagtaattaaaatatcggtatctgcgaccgctaatacatttccaaacagaatatgatataaatcggtggaactttttgcaaaagagataaaaataatccctaaagcaaaaaaagaactaaagacaacaccaatggcagtatcattttttagtggacttttttgggtaataaagccgatcgataatgcagctaataagccaaaaatagaagcgccaaaaatataattgaaaccaaacatmtaagaaacagcgacccctggtaaaacagcatgtgaaatcgcatcacccatcaaagacatcccacgtaaaataatgaatgaaccaattacccctgaaatgagtccgacaattatagacgtcaaaagggcattttgtaaaaattgataacggaataaaccatcaataaatgcagcaatcattttgcaaccccctgtattaataaatcacctaacaaatcaccgtatgcttcttggagcgtttctgcagtaaatg

SEQ ID NO: 146 - DNA, 8546 bp; double-stranded, linear
tgcgcttgcaatagtgcaatgtactaatcgtttattttccatgttcatctgataatcagccccctaacattttggacacgctttcattattacattaaaggggcgttccaaaataaatcttttatttttggaacgtccatctctaaatcattctcttaaaaactgtaatagcttacgacgacaagtcagaattattcatcctcatcatctactgcaacatttagcagcaattcgttgactttcacaatactttctgctgattccttaacatagtcaccttcgatcgctaataaacttgcatttacatagctgataaccatcggtaaattcatcccagtatataagtcaaacgaagcaccttgcataatttttttggataaaatattacaaggtgtcccccctagtagatcagcaaagacaacaaaatcttctagcgattccgtaatcgcttcaaatttttctaaaaagtcagcttcaccttcttctggtaataaagcaacagtggnaattgtttcttgcggtcccataatcatctccgcactttttttcaattcctcgcaaaaacggccatgacttactaaaactaaatgttcactcatcgattttcycctgtcttacttattttgaawtaacacctaacgcagacaatgcgacacagacaattaatacgataaaaatggctttagtagacgtcatattctttttacctagcatccaataaacgccaccgacaattcctgcaggaagtagacgtggtaaaatcatatccaagttattttgcatgttaagtgttacatccccaatacttggtgcccatgatagtttgacattaaccatcgttgccactaaagcgccaaccatgaagacccctagtaaagttgcagcgtctgttaaggcagttaagcggtgttgcatagttgttaccaaagaaattccttcgcgatacgcaaattccaattgtttccaacggaagaccatcacggcaatttgagcaacaatccagataaagataccagttgggttaccattaatcgccatgttggcagctagcgccccaaaaatagttggaattaaagctgcgaaaattgaatccccaattgctgcaaacggtcccattaaaccagttttcaaacctgaaactgtttgttttccagcaatgccttctttttcttcaatggccaaatcgatccctgtaataattgtattaaagaagtttgaagtattgaaaaattgcgtgtgtgttttcattacttcttttaattcaggcgtatcatccccataaattttacgcaattgcggcaaaatcgtatacaagtaacctgatccttgcattctttcgtagttccaacctaattggaaagtaaacaagcttctgcgattaatttgtttaaaatcttctttcgtcaatttataattagatttcgtcatcttcaatctctccttcgtctgaatcattcgctgcatgttcttttttggctgctggcccactcggaatcatttgaccatttttgtagctaattgcggctaaagcgaaaccaattaaagcgactgctaacattggtagtgcgttaaatacaccactgaagtctttcacaacgctcgcaacagatgttcctaaaagttgcatgtttgtaaagattgttcctagtaaagcagttacagtaaaaccaagaattaaataagggaaatgttttttcactggtaagtaacgtagtaaaattgcaaaaccgaccgctggtaagaccgccccagcaacagacaagccatcacctaaccatttcaaatcgccatttaggacagatacaactttttgtactaaaccaccaccaaaagcaagtgctaagaagactggaatcattcgagaaagagaccaaggtaaggcacccattaagaagttacgttcaattcctttgtagttcatatcttcgaccattttatcaatccgatgtgcaaagtaggtattcgcaaaacgagccaaaatgtctaattgaatcattaaactagcaactggtactgcaatagcagcgattgcttgttcagggttcattcctaaagacacagaaaatgctgtggcaagaatcgtgcctgagttagcatcaattttggaggcacccccgaaagtcccaactcctaatacagttaattgcatgcttccaccaataataagtcctgctttaatatcccccatcactaatcctgcaaaaagacctgcaaacactggcgcacttaatgaagaataaatttgtaattcatctaaaatttggtatcctgcgtataatgttaataataagatctgccaccataagatattcattttttgttccctcctattttgttatcaaactcataaagtcttccgctttgtcacttggcaccatttgagcaatcagatggacacctttagcatttaactctttaaaaacctcaatatcttgatcgaccacattgattgacttagtaatcgaccgtgtttcgtttgtttgagacatgttcccaacattgatttctttaatcggcaccccaagttctactagttttaataaacgatctggtttccgtaccacaattaataaacgttgtgagtcgtattttcctgctaaaatattttgagcagctttttcaactggtaacacgcttagtttcacgccagctggtgttgctaatttcaagccacttttttcaatggcattccctgcaacttcatcatcaacgaccataattctggaaatattcaattttgtcgcccataaatttgccacttgtccatgaatcaaacgtccatcaattcttacgccaataatactcattgtaatccctctttcatttctttatatagtggttcttttactaactgaatttctggttggtacgttccttccgtttcaaaaatgacgatctcattttgcccttcttttaataatcctttgggaatatataaggaaagcgtcggaccaacattccagaaacgaccaagattggtttggttaacaaaaacaattcctttgccaaatttagaaacatcaataaatgtatctttcacttctgctaactccacatgatactggtaaaagcttggttgatcaggctgccattctcttgaatagtctacctgttcacagcttgtcataggtaaacaatattgttgccattgcgtcataaaatgtaaatctgccatgacacccgttcgaatcccttttttctgagtatctgcaaatagtttatgcccgtaattgacacgacccatattttccattaaaatatcgatttgattattctcttgcggcagtgtaacgtaaatatcttcgccaatttccgtttgatattgcgttgcttgatgtacctgattgacaaataattgcagacgatcacgaccgtcaatcactcttagcttttcttctgcagcatctttttcaatgcttgttcggtaaagaagatagccggtattttgtcctaattgttccatggtttgcggataaacgctgaccactggctgactaatcgtttctaaagtcgcaaacaaactcactttgttggttaaaggaattgctgtttgcgcaaaagattcttttactaatggttcagcttgtggtaacgcagggtactcttcgtgaagcattttttgtaacgcaaaatacttttcggttggattcccttgttcatcaagtggcgcatcataatcataggaagtgatttgtggtaaatcaatggttcctcgtgcggagcagccattcataaacccaaaattggtgccgccatgaaacatatataagtttatactgcctaatgctaatgcttctctaactgattcagccaattcttgcggatctcgtttaataattggctctttccaacgattaaaccagccatcccaaaattccatacacattagcggccattttttaccatgttcttcaaaaaaggcttgcatcataccgaaattttctttggcttttgagccaaaatttccggttactaaaatatcatcttcaatcatgctgcctgcccgcaatgttgcgcgccatggcccgtcagaagtaaaaaatggtgctgtcacgccgcgtgcaatcatcaaatcgcgaatcgcccgtaaatacgctttttcttcgccaaatgaaccatattcgttttcgatttgaatcattaaaatattgccaccgttagcaagttgatgcggaacaattttttccattaaaacatcataatattccgcaacatgcttcagataggttggattattcgaacgcatccgtcctggttcatttaatagccaggctggaaaaccgccaaactcccattctgcacaaatataaggagacggccgcacaatcgcatatagtccaagttcttgtgctaattttaaaaagcgctccaaatctaatattccctcaaaatgaaatgttcctttttgcggttcatgtaaattccatggtacatatgtctcaactgtattgaagcctaaagctttcaagttataaagggaatgatgccaatctgagggatctacacgaaaataatgaatggcgcctgataaaattttaaatgattgaccatttaaaagaaactcctctttaatttcaaatctgtccacattgtcaccctttctagtaaacgctttcaattgctggataattgctaaataaagaaagctctttatttagcaatttcgactacttggatgttcataagatgtttcttcacgttctctacgtctacatgcccagtcattctttcttgggcattagccattccagccgccatgccccattttagcagttcggcagctggggcatccttggctagtccatatgcaagaccagcaatggttgcatctcctgaaccaacaggatttttwgcttgaatcgttggaatttttaccacgatagaattgatcgtgatgtttggcaattgcaccatcttttcctaaagatatgacaatccattcaattcccgcaaacattggttttgttaaagctgtttgtacagctgctaatggattttctgaaaaatcttgccctagcaatccttctagttcctctaaattaggtttaattaaatacggtttccatggtccttgaagaacttgccttaaactatcaccagaagtatctagtagcactttaacctcttgtgcgtganctttttgaactaattcttgataaaaatctgatggtaatcctttcgctaaactgccagaaattgtgacaatttctgcttgcttaattaattgatcgaaattttcaaggaagttactgatttcttctggggaaacagttggtccagcttctaaaatttcagtttgattcccctcgtgcaaaatcgcaatcgaatcacgtgtttcttctttgattgacgtaaatgcttgggggatgtttgctttctttaactcatttgcaataaacgccccatgaaaaccaccaagaacgccggtagcgataacatctccacctaaatcatgaataacgcgagtgacatttagtcctttgccaccaggggttttggtcacctgactggtccgattaacggtatcaagctttagatgatctaataggtaggagatgtcaattgacggattcattgttactgttactatcacagctatgcctcccaattacccttcgtttacttgaactttcgcatgccaagagctggcggttgctgcgatgacttcatttaaactttcaatgttttctcggccttctgtttttaaccaatcacaagccgcagtttctcctgcttcaacgaaaggtttcacgccatttttccacgtagcacggccacataaaacaccattaaatgttgaaccagcttctttagcgaaacgtagtgtttcttggaatagctctgttgagacaccggcacttaaaaagataaatggtaaatcagtggcttgactttgttctaagaaataattcgccgcttcctcttttgtatacgctgtttcagccggcgcaaaaccttctacaaaattcatattaactggaacttccactttcaatacatctactttatattggggtttagaaaattctttcatcatttcattcactttatgcggtttaacttttgcatattctaaagaagtcgcatctgctatttgtgcatcataagaaactaattctaagtaaaatggtaggtcttcttctgcacattcacttcctaagcgttcaatgaatacatgtttttgatgattgatttctggatcctcatccacatcatagtatagtaaaaatttaatcgcatctgcgccttcttctttcaagcgtaaaacagaccaatctgctagtaaatcaggcaatcgtcccggagttgttgcatcatagcccgttttttcataagcgagtaacaatccagcctcggtatcgcgtgcttttgcagcaggcaatccatattctggatccaataaaatggcagacgcataaggtgtcaattctttcgagactaattctttaaacgtttcaatttgtgcatcagttggctctacatctagcgctttgatcatttttttcaaggcacctcgttgatcaatggctaatgcgctaatgattccttcttgggttgacaaacgatccattgccgctttttttccagctgttaacgtaagcatagttcctcctccaaatgttgtattatttatagtcataaatcgttacgcctttaaccacacgattcactgtacctgtcggtgaaggggtatccggtttatttccaactttaatagatgttaaaagtgcgactgtttgggctaccatgatatctgcnaatgcnaaatagccatcaggtaatagagcagtttctgcggaatattcaatmgytgaacctgagaaattacgtttgccaggttgagcaatcgcaaaaacacccgccgcaatttcgtcaccgtgaacttcttctaagatatccaagtcataatctcttgtgtatggtgtattattaacaaaaccaaacattattgttttttcattaataaatgattttggtccatgacggaagcccatagaagagtcaaaaattgtggcaactttgccggctgttagttctaaaattttcaattgcgcttctcttgtcaaaccagctaaacttccagaaccaacataaacaatgcgttcaaaatcaaggttaacaatttcatttaattcttcttcacgggatagcacttcttcacctaatttaattagagcggttacataatcttgtttttgctcaaaggctgtttgatcaaagagtagtaatgtacccaaagtcatgcaagaaaagctaccagtcatcgcaaaaccaccatcattggaacgtgttggcattaagaataaaaagctgttttcttctttttgacttatttgtgctagttgtccttcttcggcacaagtaatcgctaaatgatgaattgtttcgaccacttgattagctacttcaactgccgctaaactttcaggactatttccacttcttgcaaacgaaactaacaatgttggttcgtctttaatcaaataatcttctggtttggccacaatatccgttgtcccaatactttcgaatgaaaaggcttgtgtgtcgccgtgtgctcggagataaggtacaaccgtatcaccgacatattgcgaagtccctgctcctgtaaaaattactcttgtgcgttttccttgcgctttggcctggacttcttttaaaaagttttccaaagctgtttgattttcatgataaagtgtcacggtttcttgccaaagctcaggttgctgacgaatttcacgtgtagtgatttccgctcctagttgttctagttcttctttttctgctgtaaacatacttaactctcctaactattccgaatatggcgtatctgataatgaaattgatctgctcgcgccacactcaacgtaaattcaataatttcatttttcatgttatatgtctggcgtgctaaatgaaggactggcgctccttccggaatcatcaataatttggcatcttcttttgacgcaatgctagcgtataattcttcatcagctaaacgaacggtttgcttaaaatcttccgaaaatagatcatataatggtttgctacgtagtaattgatccgtgagtgataagaaaaatttcacaggcaagtatgtgtcttcaaccattaatggctcgttatcagcaatccgcaaccgacttaatttaaaaactgcctctcctaacgaaagattcaaatgctgacaaataaatttatccgcttccaatttttcgaaggataatatacgggtatgtggttttcgacccagccctttcatttgttctgtaaaactatatgcgccagctaaatcagcggcctctttttttatatctgaaacaaatgttcctttgccatgacgacgatagatggaacctctattttctagttcttgtagcgctaaccggaccgtcgtccgactcactccatattgtgcagtcaattcacgttcagagggcaacttgtcatgaggaatcatgcatgtttcgattcgttcctgcagcaaatcaacaagttgatgatacaaagctttgtttttaaaggcattttccataact

SEQ ID NO: 147 - DNA, 3493 bp; double-stranded, linear
cgacacattgtgggacattgctgcacgttttggaacgacagttgataatttaatgtcactaaatggattaacattggattctgttttatcggtgggtcaaaccatccaaatcggttaattttgcaattatttagtkgaagaaagacctwacaaaagcagtagtttttgtaagktcttttatcgtgaaaataggtagggctagcagcaattatttgatgagcctaatccgtttttttatttaatttttcacaaactaaaattcgtttttctggtagaaatcgtttttttgagctatgcttagagaaagaattattatattgtttgtaaaattggaggatgtaggattatgactaaaggttatgtaaaatcagtaacagagttaattggtcaaagcccagttgtgaaattaaaacggatggtaccagaaggagctgcagatgtttttgttaaactagagttctttaatcctggtggcagtgtgaaagatcgaattgctttaagcatgatccaacaagccgaagcagatggtcgcctaaaacctggacaaacgattattgagccgactagtggtaatacaggcattgggttagcaatggtaggtgctgcgttgggatatccagttaagattgtgatgccagatactatgagtattgaacgccgcaaattaatgcaagcatatggggctgatctattattaacccctggtgccgaaggaatgaaaggggcaattgcaaaagctacagcattagcagaagaacacgggtacttcatgcctttgcaatttaataatccagctaatccaatggtacatgaacaaaaaacaggaaaagaaattgttgatgtctttggtaaacgtggcttagatgcgtttgtttctggtgttggcactggaggaaccgttacaggagttggccatgaattgaaacggatttttccagatattgaaattgttgcagtagaaccaacagagtcgcctgttttagaaggtggcgaaccaggtccacataaaatccaaggaataggcgctggttttgtcccagaagttttagacaccaccgtttatcaaaaagttgccgctgtttctagtgaagacgcattagaaactgctcgtttaatggggccaaaagaaggtatccttgtggggatttcagcaggggcagcaattaaagctgccattgatttggcagtcgaattaggcgcaggcaaacgtgtcttagcgctggttccggataacggtgaacgttatctttcgacagctctttacgaatttccagaataaaaaacacgccaaaaaacgagcatttctcttagtttagtaaaatgctcgttttttccacgagaatcctacaataattcttgtcaatcgtaataagaaatagtattatttaagaaagatagacaggggagggatacaaagatggacaacgtattggttaaaaatgcacttgctgaattaaaagaagccaatatccgaattactccgcaacgttatgctatcttggaatatttaatcgaaaatcatacacacccaacagctgatgaaatttatcgcgcactagaagatcattttccaaatatgagtgtagcaacggtttacaacaatctacgtttatttactgaaatcggtttcgttcaagaaatgagttatggcgatgcatctagtcgttttgattttagttcgaagaaacattatcacgtgatttgtcaaaaatgtggtaaaatcgttgattttcattatccagggttagaggacgttgaaatggccgctagtaaattaacaggcttcgaaattaatgaacatcgtttagaattatatggattatgtccagattgccaacaagcacaacaggagaatgtgtaaaaaattacatactgttaaaaatttatcaaaagataagtcacttgtctaggcaaatttcacaagcgtaagagttttcactcttatgcttgtttttttgtgtggttattgacttttaaattcttaaaaacaaaaaattaactagctattattaagaattagcaacagtttgtgaatttttttatatgcgattcacaagcatagaactcgaataagcttgattcctctgatatattttaaacagacagagggagacgtcacctctgcaaaacaaagattgtgaaagaagggatttacaacatgaaagtcgtagtcgtaggatgtacccatgctggaacttcagcagttaaaagtattttagcaaatcacccggaggcggaagtcactgtatatgaaagaaatgacaatatttccttcctatcttgcggaattgccttgtacgttggaggcgtagttaaaaatgctgctgatttattttattcaaatccagaagaactggcttctttaggagcaacagtgaagatggaacacaatgttgaagaaatcaacgtggacgacaaaactgttacagcgaaaaacttacaaacgggcgcaactgagaccgtttcttatgataaattagtaatgacaactggttcttggccaattattccaccaattccaggaattgatgctgaaaatattttattatgtaaaaactattcacaagccaacgtgatcatcgaaaaagcgaargatgccaaacgtgtcgttgtcgttggtggcggttatattggtattgaattagtagaagcttttgtagaatcaggtaaacaagttactttagttgacgggttagaccgcattttaaataaatatttagataagccattcacagatgttctagaaaaagaattagttgatcgtggcgttaatttagctttaggtgaaaatgtccaacaattcgtagcagatgagcaaggaaaagtagcaaaagtcattacaccaagtcaagaattcgaagcagatatggtgattatgtgtgttggtttccgtccaaatacagaattattaaaagataaagttgacatgttaccaaatggtgcaatcgaagtcaatgagtatatgcaaacaagcaatcctgatatttttgctgcgggtgatagtgcagttgttcactacaacccaagtcaaacaaaaaattatatcccattagcaacgaatgctgttcgtcaaggtatgctagtaggtcgtaatttgactgaacaaaaattggcttatcgtggcacacagggaacttctggtttatatttattcggttggaaaattggttcaacaggtgtgacaaaagaaagtgccaaattaaacggactagatgtcgaagcgactgttttcgaagataactatcgtccagagtttatgccaacaactgaaaaagttctgatggaattagtctatgaaaaaggaacacaacgcattgttggtggtcaattgatgtctaaatatgatatcacacaatctgccaatactttatcattagcggtccaaaataaaatgacgtcgaagattagcgatttctgatttcttcttccaaccacattttgatcgccctgggactacttaaacttatagcccaagccgctttagaaaatatgt

SEQ ID NO: 148 - DNA, 1299 bp; double-stranded, linear
cttctttggagattaggactttctcaatatctttttctatcatagtgcgctcctttcagcattactcctttgtcttaaaaaggagtctgtagtgtattttatcagtttctaaaggaatactcaaataggaatttgcaaattttggtacccaaatgatttcctcttgctcatccgtaatgacccaagcactctctctcgcttcatttggcactttttgatcaataaaaactctgcttaattttttcgtaaaccctggttttaatgtaatccgatcaccactttggcgatgacgaacggtcaaaggtgtggctgtggtcaacgggatcgctaacaactgacccgtccactgattaatctcttcaggaagaggaaacggtttgtctgtcgcaattaatcctagccactcggtttccgatagataaatccccgcaccaggtactaataaatgtgtaacttcttctcgcagtgcagcctgtttttgttctaagcatagccaatcataacttttagctagttgccattgctgttctaacataaccgagccttgcggttgccgttcatcattcaaaacttttaaaatttgtgtcatctggcgttggtttaacgaaacccctaatggcactaatgttttttggaaaaacgcggttaaaaagaagtgctggtacgcaggcgtttcttttaataatctcttcaaaggaatgcgccagccttgtttggttggttctacggcttcagataattgaggctcaatttgttcttgaataaattcttgggcaaaacgttgttcattactaaaagaagcaatctgatctaagaattgcggattttcctgctttaatagcggcaaaacctgattacggagccgatttctcaaatattcattggtttggttcgtttcgtcctcaaaataaacgaatgcttggcgctgtgcaaattgatacaattcttcttttggataaatgagtaacggacgaatcaattcccctgtcgcaaaaggacgtctctctttaatgcctgcggaatgggaaaaattagttcctcgaatcagcttcattaaaatcgtttccgcttgatcgtctagatgatgtgccgtcattaagaccgccgcaccttcaatttccatgacttctttaaaaaattcataacgaaatgtgcgcgctttgcttctaaatttcgttgctttcagggtctcccaacgtgttcataatacgtagcgctcgctgctgacaataggtagcgagatattggcgcttcctgtgccgacgcttctcgcaattgaaggattgacatgtggcaana

SEQ ID NO: 149 - DNA, 4503 bp; double-stranded, linear
ttactagtctgttggaatacattatgatagtgtaagataaacggactattggaaagtcacagcagaggagtttgaacatgtacacatttaaaatcggtattccggcagaagtacacgatacatttgttaaaaatcacccattatgtaatttactacagtcatcttcatgggcaaaagtcaaggataactggggttctgaaattgttggggtttatgaaaaggatacattagttgcatcaagtttagttttaatcaaaccattaccagccggttttacgatgttatatacaccaagaggtccagtaatggactatacaaatgaacgtttggtcagctactttatggctgaattgaaaaaatttggcaagaaaaaacgagctttatttataaaaatggatccagcggttcattatcaagattttcatttgggagaagaacaccaaccgcatgctgaagcgacatctattattgagaccttgaaagaagcaggtgccaaatatcaaggactgacaatggatatgggggccaccatccagcctcgcttccaagcgaatatttatcgtgaagattttagtgaggaacaattgtcaaaaagtaccaagaaaatgattaaaacagctgaaaaaaaaggggtcgttgtgcagcaagggcatgttgactttgttgatgaatttgaaaaagtcattcaatcaaccatggaacgccaacatatttctttgcggaatagtgattactttaagaagctgttgaacatttacccagaagactcctttattatgctggcgcaagtcaatttaaaggaacgcttagatagcacgcgacaacgctatgacaaaaatcaaaaagacttgagtaatttgaaagaaaatcaagtgaaaaagcgccataatttagaagaattagatgcttccttgactcgggaactaaaagaattagaagaaaatatcgcagaagctggtgaaatcgtcacggttgctggcgctttggctgtgacatttggtccaacaagtgaaatcctttatgctggcttagatgatcgttataaacgctacatgccaacatatgtgacttggcgagatgccattcaagaatgttttaaccgtggctgcgaaactgtaatatgggcggcttagaaggtagtttaaatgatggcytaattaagtttaaagcgaacttcaacccmacgattaatgaatttattggggaattcgatttaccggttaataaattattatttaaagccagtgaatatgcctataaattacgaaaacaaaaaaaataaataaaaaacacagggactaaaaatcaaacttgatttttagtccctgtgtttttttctatagtttttgcgttgcattccgtttcattaagcgaacaaaacgctagcaattgctgaagcagctacaccagcaacaagagcttctggcacaccagaactgaaaatcgtcgcaataatagctaggtaaacagcagttccagctttaccaataatttcagcataagctgaattaaaaagaaaataaatcatgttcatgactaaaatggtattcgttgctgagcctaaaacaccagccacaaataaggagacaggttgcgctttttccttcgttaatttatttagccatttgtaagcgaaataaggaacgaccccaattaaaatccgcggaatgagcacaattaaaagtgccttccaactaccatgatcggtaccgatcacaggaataaatggagaaaaaacaaacgacaaaggtgttggtgctgtcgtatttttaattaagctaatgatcccaaacgtgccgcccaacatactaccgatttttggccctaaaacaatggaaccaataattacaggaatatgcatcgtggtcgaatttaaaggacctaatgtgataaatcctagtggggttaaagccagtaaaagtaagatagctaagaacattgctgttaacgtaaattttttcgtgttattcataaattactccttgttatcagatgctaaaattttcatcactgtttgaagaatatcttcaacagtggcaagtgcgccacgaccataatcgccacaagctaatagagcttcacgtgggattatttcttgatagccgacttcttttaaaatgccaatatttcgttggacaatggggttttggtacatatacgtattcatcgcgggcgcaataatttttggtgtttcaggataaagtgccaaagcaactgttgataataagtcgtcggcaatcccatgggctaatttcccaattgtattggccgaagcaggtgctactaaaaataaatccgcttttttagctaactcaatgtgattaattttactgggatcaatttccatcatgacatccgtatgcactggattcttagaaagtgattgtaaggtcagcggagtgatgaacgctgtgctacttttagtcattaaaatttccacattgtagccaagcttagctagttgacttgtaatatctgctgctttatatgcagaaatgctgccagagacgcctaataaaatagttttcattgttgttctctccatttcttttcaacatttttaacgatcattgaaccaatcccttgttttgaataagcttcttggacaatgcccgtttcgttaattaataatcctttgtgttctgtttcatgaacgttcatcaagtcattggctaagacaaagtcacaccgatttttaaccaaagcggcttgtgcaacttggacaagttcttcttgtgaaacgttgacaagtaatttaaagcccactaaaacagtttggggttgcttgtcacgaatcatttggatgactttaggatttttctttagaaaaattaataatcggtccgtatcagatgaaatttttgttgctgtttgaggaatatcagcaatctgattcaatgtgttttgaacgatagttaccaaggcttctttggtctttggcaatgtttgttcgcttaattgttgagcaaaagaatcaataaattgttcttccgtttgcgcggtttccgtcgtaaaatcactgactgccattgcgtgaacaatcgcatcaaattgcttttcagcaaagagttgttctaacgtagtggctaattcaaccgttgtttctatttctttaattgataagtccaattgttgggttggacgtaatgcatgtttggttgttacgtaggttacggtgtgtccagcagctaaaaaactttcagcaattgcttttcctagtccgccagaagaatgattggtaatcgaacgaacattatcaatcggttctgacgttccgccagcagtaactaaaacatccataatcaaaacgcctccttaagaaattcggacaatggtccgtccaatatgttggcctgcttgtaatgcttcaaaaacagggggaagttcttctaaagtaatctcttgatacacagctttttcagtgatatctaaatcagtggcaagacgttgccagactatttttcgtttgtccataccaacattaaccgaatcaatgcccaatwaatgaacgccccgtaaaataaagggtaaaacggttgtctctaatgtaattccagcagcgcggccacaaatggctgaacggccatcataacgaagttgtggtaaaacagcagaagtaatttccccaccagtggtgtcaattgcaaaagcaaaacgctgtttcatcaatgctttaacaggagttgctaagaaatcttctactaataagcattcactaacacctaactcttttaaaagctcaaaagaatctggctttctagttaatgcagtgattgaagtgtagcctaattgatgcaacatcgcawtagacaatgtcgcaacaccgcctgtcgcaccagttacaataatgggggcttctttgtcgtcgcgtaagccatcgtcttctaaagctgtgacagataatccggccgtaaagccagcagttccgaagatcattgcttctttgagactcattttttcaggaagtggaactacccaatcgccaggaacacgcacatattcagaataaccaccagtatgactaacccctaattgatagcctgttacgatcactttatcgccttctttgaaacgaggatcttccgatgtgacaacagtgccactgacatcaattcctggaatcattggataattgcgaatcacaccgccgtctttttttgaagctaaagagtctttaaagttaactgaggagtaggctgctttgattactacagtgccttctgataaatcgtctaaagtaatggtttctagttgaccaataacagatgtatcttgttctcttaacgtaaatgcttgaaatgaattcatataaaaactctccttccaattatgtaaaaaagcaactcgtcttattttatcatattctgattttttcgtatcatttttcttcttataaacagtaagttatacagaaaagaaagattgtgtgacaattagactagaaaaataaagaaaaatggttgaaatttttcaaaaagttcgtatactaaaaaaggtaaaact

SEQ ID NO: 150 - DNA, 11739 bp; double-stranded, linear
gcgttaggtcaagtaagtcttggmtcgtttttgatgacgtctttttatggtgtttttmagtactmgtttatcgtattttctattacgcaaaaatcaatccaatttatttttattattgatgattggcatgattttaggtacttttttcagtagtattagtacgtttttacaagtgattatggatcctaacgaatacgacttactccaaggaaagttgtttgccagttttggtaacgtcaatagtcagtatctcattttcgttggtgtggcggtactcataatttgtgggatactttggcgggaaagttaccgtttagacgttttacatttagggaaccatcaagcacagaatttggggattgctgtgagtcagtttcaattagtgttgttgtgtttgatcagtagtctggtcggcttatcaacagcattagtgggaccgattacatttttaggttttatcgtggccaatatgagttatcaattcatgaaaacctatcgccaccgagaactgtttgtggcagggagtttaatagcagtctttttactggtgtttggtcaattgatggttgaacaggtctttcatttgaataccccgctcagtgtggtgattcaatttgttgggggcgtttattttatatggaaaattattgcagaaaggaagcaacgcacatgatccagatgagtgatgtatcaaaaaaatatggcgataaatttgtcgtttcagacattgatttacctatttctgaaggcaaattaacggcctttattggaccaaatggcgctgggaaaagcacgctgctagccatgatgagtcgcttaattcccaaagataccggggaaatttatctggacaagcaagaagtaaaaacctggaagcaatcggctttttcacaaaaaattgcccttttaaaacaagccaacggtgtacaacttaaattaactgtgcgagaactggtcaattttggtcgttttccttattccaaaggtcgcttaaaaagcgctgaccacgaaaaagtaacagaagcactggaacaattgggcttaactgaaatggcggaagaatacattgataccctttctgggggccaattacaacgggcgtatattgccatgattttagcccaagataccgattatattttattggatgagcccttaaataacctcgacatgaattatgcggttcaaatgatgcagattcttaaacgcttagtggatgaactaggaaaaacgattctgattgttctacatgatattaattttgccgcaagctatgcagatgaaattgtcgccatgaaaggcggaaagctctatgcgcatggcgcaacagaagaagttattcaaacaagtattttaaatgatctttatgaaatgaatatccggatttgtgaaattgaaggaaaacgcttttgtctttatcactaaatcgggcaatttaaaaataacgtttttggaggaaaagaatgaaaaagaaatttttagcaatgatggcagtttcaatgatgggactgttaatgttaagtgcttgtcaaacaaataaaaaaacagcagattctgcaacaacagaaacaacagctaaaacggaagtcacagtcaaagacaccaatggtcaattaaccgttcccaaaaatcctaagaaagtcgttgtttttgataatggttccttggatacaatggatgcactaggtgtcggtgaccgcgtggtaggtgcgccaactaaaaatatccctgcgtatttgaaaaaataccaaaaagttgaatcagcaggcggcattaaagaaccagatttagaaaaaatcaatcaactaaaaccagacttaattattatttctggtcgtcaacaagattatcaagaacaattaaaagccattgcgccaaccatttacttagctgtagatgccaaaaatccttgggcatcaacgaaacaaaatatcgaaacgttaggcactatttttgataaagaagaggtagctaaagaaaaaataactggcttagaaaaagaaattgctgacgtgaaaaaacaagcagaagctagcgcgaataatgcgcttgttgtgttagttaacgaaggacaactttccgcttacggaaaaggctctcgtttcggtttaattcatgatacatttggcttcaaagcagcagacgataagattgaagcttccactcatgggcaaagtgtttcttacgaatatgttttagaaaaaaatcctgggattctctttgtggtagatcgcaccaaagcaattggtggcgacgattcaaaagataacgtcgctgcaaacgaattgattcaaaaaaccgatgctggtaaaaatgataaagtcattatgcttcaaccagatgtttggtatctaagcggtggtggattagaatcaatgcatttgatgatagaagatgttaaaaaaggattagagtaaaaaaargcctaggacaaaaatcactttggatttttgtcctaggcttaaaagctgataaacggcgggaacaaaagcaactccttcggaaataagctgaaattctccaaaaattaaagaacaattttcggaaatttcttcttatttctcggagctaaacacttctgtcccgaccttcttgatgaaaaacaaaaaagttttaaattaaaaatgtggttgacggcctcgaaaatgtttgctaaactatccgtaaatcagtatgattgatgaaacaaataaaagaacaaaatgtgatgagaaggaaagtactttttaaaatagcttgcagagagcctcgtttggtgagaagaggtagtgacgttaaaggggaaaatggcctttgaacaggttggttgaagccgtttgcttaaaccaattcaggtgcgcctgttatagcgctacagtatgattgtactggaaacgagcggatcttttttagcgaagagatcaacaaaggtggtaccgcgattgcataagcattcgtcctttttaggacgaatgctttttttatttgtttaaaaaatatgagggggcaacaacatgaaattggggaaaaaagtagtaggtttgattgcaacagggtttcttttagccgcatgtggcggaaccaaagaagcggcagagaaagtagattcgggaaatttagcagctgaacaaaaaatcagtattagttcacctgcaccaatctcaacattggatacaacacaaacaacagataaaaatacctttacaatggcacaacatttatttgaaggcctttatcggtttgatgatgatagtgccacggtgccagctctagctaaagatgtcaagattagtgacgatgggcgcaagtaccactttaccttgcgggaggggattaagtggagcaacggcgagccaatcacggcccaagattttgtttattcttggaaaaaactggtgacaccagcgacgattggaccgaatgcctatttactagacagtgttaaaaatagttttgaaatacgcaacggtgaaaagtcagtcgatgaattagggatttcagccccgaatgacaaagaattcattgttgaattaaaacaggcccaaccttccttcttagcagtcgtttcgattgcttggttagcgccacaaaatcaaaaatttgtcgaagcgcaaggcaaagattacgccttggatagtgaacatttactttatagcgggccatttacgctagccaattgggatgcgacttcagatacttggacattgaaaaaaaatccagaatactatgatgcggatcaagtgaaactggaagaagttgcggttagcacaatcaaagaagataatactgggattaacttatatcaagtgaatgaactagacttagttcgcattaacggacaatatgttcaacaatatcaagatgatccaggctatgtcagtcatccagatgtggccaactacttcttagatttcaacaaaaaagaaggaacgccattagcgaatgttcatttacgaaaagcgattggccaagcaattgataaagaagccttaacacaaagtgtcttaaacgatgggtcaaaaccccttaacggattgattccaagtaaactttatgcgaatccagaaacggatgaagatttccgagcttacagtggcgaatatttgaaaaatgacgtcaaaaaagctcaagctgaatggacgaaagcccaagcggatgtcggtaaaaaagtgaaactttcattgctggcggcagacacagatcaaggaaaacgaattgctgaatatgttcaaagtcagttgcaagaaaatctgccaggtttagaaattaccatttcatcgcaaccaagtaataatgtgaaccaatcgcgacgtgaaaaaaattatgagttgtctctttcaggatggattgccggcagtagtgaattagactcttactttaacttatatgcaggagaatcaagttacaattacggcaattatcataatgccaaatacgaccaattggtagaagaggcacgaacgattaatgccaataatccagagaaacagtttgcagaatacaaagaagcggaagacatcttgttgaaccaagatgctgcccaagtaccgctgtatcaaagtgcctcaaattatctaatcaatcctaaattgaaaggcattagttatcacttgtatggggattatttccacttgcgcaatgcctatttaacagaatgattcaggaagaaggagtaaaaaatggaaaaattagtcgaacgatttttaacttacgtgaaagttaacacccgttcagatgccaacagtcaaaccacaccgacgacggtcggtcaagtggttttagccaaaatgattgaaacagaacttcatgaattaggcttggccgatgtgcattataacgaacaaaacggctttttaacggcacggttgcctggtaaccaacctgcagcgaagagtatcggcttgattgcacatctggatacggcggatttttcagcagaaaacatccgtccccaagtcatcactaattatgatggtcaagatgtcctcttgaatcaagaacaaggcatcgttttatcagttgctgaatttcccaatttaaaagagtatcaaggggaaacgttgattactacagacggaaccacacttttaggagcagatgacaaagcgggaattgtcgagatattagctgctgttgagtattttttggcacatccagaagtagcgcggggggatgtttggctcgcttcggtccagatgaagagattggacgcggggccgatcaatttgatgcgccgaacttcccagtcgcttttgcgtatacgattgacagtggccgcgtggggcatttcgagtatgaaacgtttaacgctgcccaagctgtgataacaattgagggaaccagtgtccatccgggaacggcctatggttcgttagtaaatgccattaaattaggcgaacaacttgatcaatcactaccgcaaaaggaagtgccagaacaaacacgtggaaatgaaggattttatttactcaataaatttacaggaagtattgaaaaagcagaacttgtctatatcattcgggatcatgatcaagaaaactttcaagcgagaaagcaatttttggaaaaacaagtccaacgtttaaatgcgctggcggataaacccagactaacaattactttccaagaccaatactataatatgaaggaaatcatcgaaaaagattggactcctgtagaattggccgtccaagcaatggaaagttgtgacattgaaccaatcatcacaccatttcgtggcgggacagatggttctaagatttctttcatgggcattcccacgcctaatctatttacaggtggcgagaattttcatgggcaatatgaattcattaccgttgaatcaatggccaaagctgttcagacgatcattgccatcattcgcttaaacgctaattaaagaaacacgcaagggaaatgccgattttccttgcgtgtttcgctgtttttcggtaaagtatgtagaaaagtagggagttttgctcatgaattatccattgatttttgcagaaaaccaacgaatcgaaaccgaacgcttgattttaaggcccgtcacattagccgatgcagaggatatgtacgaatatgcttcagatgaggaaacggtccgctatgtgtttttgaaaaatcaaacaatcgctgaaacaagacaaaacattgctaaattttttatgggggaacctttaggaaaatatgggattgaagtgaaagaaacgggcaaaatgattggcacgattgatttgcgggtcaatgaaaccaataatattggagaattaggctatgtcttgaaccgtaccttttggggcaatggctacatgcctgaagccgcgacggcgttagttgaactgggttttgcaaaaatgaaactcatgagaatctttgctttacatgatcaagacaatccagcttctggtcgtgtcatggagaaaattggttttacctacgaaggaacactacccaatgctcgaattagtaaagggaaaattgtcacagatgtttatcgtgggatgacactggaaacatggcaaaatcgacaaaaatagaagcggaagacaagttaagagaggaattagagaaatgttgatgtttacagaaaaagaattcgcagcctttgaagttgctggattagatgaacgaatggcggttatccgtgcgcaaattcaacctatttttcaagaattagacacgtattttgccgaacaactagcgcctgaactaggaacggagttgtttgtccatattgcgcaacatcgccgtcgcaccgtgtatccgccagaaaatacttggtcagcacttagtccgaataagcgcgggtataaaatgcagccgcattttcaattaggcatttggggcgactatgtgtttatgtggttgtcattcattgataatcctaaaaatgaaaagcagattgcgcaacctttttagagaatcagcaattattccaagcattaccagaagatacgtatgtytccttggatcatacggttcctcaaattactccgctgccagaaacggatttagagaaagccttaactcgttttagagatgtaaaaaaaggtgagtttgaaattgggcgcatcattcccaaagatagtgacttgtggcaaaaccctgaaaaagcacgagcttatatgttggcaacctatcaacaactcctgccattgtatcaattagctgttgcccaataagagaaacagacagttattttgtgttttagtgttattttatcgaattatccaatcgtcaaaaatgagaaaagctcataatgttagttttaattactaacattgtgagcttttctgtagtttttttgaaaaaaattaagggatgactggctgatttctatggaaaagtacgttttgatagccttttttgcttaaataacaagagtagcaacccttgtttaataagggattttcgcgaatagatgttgtcaaatgaaaaaaaatgatgttttgaacaaagagttctttgctattataaaggtatgaaaaaggttgtttacgcattctttgtatagaagaatgtgaatgagttaaaaggaggtttttaaatgaaaaaaaagcgttatttaataattgcgtgtttactattttcccctagtttttttataaatgttgaagcatctgagggtggttctagttcggtgggaattgaattttaccaaaatccggcaacacccgctcctaaagatgccccaccgaaaacagatgagccagctgcggatcccaaggaaccagctggtcctctgcaaggagatcaacgaagtggtggttcgacacagaccaccacagctggctcgcagctccctcgtacaggaagcaagagtcaggcaaacctgagcattcttggtcttgtcttgattggtcttgtcggaatggtccagagaaagaagggacgacatgaagcaaactaagtggcaacgattagcaaccattggcttgtgtagttctttagtgattaacgccttttctggcgcgaccgcagttgcggaaacaatcacgattgaaagtagtccgacagtagcaagtagcgctaaggaagcaacatcagcaagtagcgcaacgccagaaagtacggaaagcagtcaagaaacgactgaaacgagtcgggaagaagtgacacaggaaacagtggaacaagaagatacaacggaaatagctcaagaagaaaatctgctggaaccatctggtattcaagcgaaaattatgcctagagcatttgtctgggcagctacaggaaccacgaatagaaccacggttcgtcttaacgatgtagttgattatcgaatgaaactggaaaatattacaacagatgatacaaattcagatattgttggtccgattcgaattgaatcaaaattggcagctggaatgactagaccaacgtcagttattatcaaagttggccccgaggaacaaaatgtagttataggagaaggctctcataatgccaatagtggtggcgaatattttgtttggacagagtcgactaggacggtcactgcatttatcaatcgtctacacgggcgaacttctggaaatactgggtatatcaaaacattgtattttcagacaagaattacttcgggtacacacaacgaaaaaaaatatatcgattccacgattcgatttaatggatttggcgcagtgaatagacgaaatgaaatgacgtatgtggatagattttctggtaacttaggtttgaaagggaatttaaaattttacgatgaggatggagtggctagtaaggaacaaatgagtctttccataaacccagtattatttaaatcaaccaattcgagagtagaagggacgctgttaagatatcctttaactatgacaaatgctggtagtgggctttataggtttgatacaggactaaaaaatataggtactagtaacgggggttcgtggtttttctttagtaacgatattgcgattaawtttgctacagctaccaccaatagaattgataaaattgtgttagcaccacctaaagcaacacttccagacagccgaacaggtgtgatgacttccagagcgtacacatcaacaacttatacgagaagtaactatgatatttcacatataactttactaaagcgactggtaagacatggcgtataacgaatcgtagttctaatagcggagtaagcaccaatattatgtttagtaacaatcttgtaggaacaacaggacagttcaataaagggaattctggtgctactattaattattatatttattacaaaaagctttatgagaattttgttaatagtaacggacaaaaaattacaccaccatcaggattcacacaaggaaagcgaacggttattaatagtgaagcgtacacttttaaacaaagtggcaccttgccagatacctatcaagcagacggcaaaacctataagttcaaaggttggtacaaaggcaaaaccaagccaaacaccttgaccaccaccaaagcaccaagctatgcggtgacttataacaatgatgatgatttgacggtggtgtatgaggagattgagttttttgacttcccagcgctgacctatcaattcgggttcgtggacgagtctggcaaacgagtagatgcttcaacaattgggttgacttatgacaaatggcgtggggagttgttaacaaataatgtcaatgactggaaaacagtcagtcttgaaaaaggtcaagttgcaccaaccaaaaacaatttgaaggaaattgcttatcctgcgcaatctcttgaaatactgagtgatcgaagtacacaatatagtgcggctaatttaacctttacactgcccaaatactatgggaaaatcagtgtttataacaagagtggtacttttgatgcaggctacctgtttccaaatatccaaaataataatagttcagaaccatctgttgaaggcttacacaaaaatctttctagctggtttgaactaaagaaaagtgggaaccaatcgtttgtttttaacaaaccgattccagcagcaccaatcgatgttcaggtgcctgcttacttgcgagagattgtctataatcccgatctgatatcaaatacagccgtctattatgtaatagataaacctgtctactactatttaaccaaccgcaaagtcaccgaaaacttcgtagacacaagcggtgccaaaattacaccaccaacaggtttcacccaaggaaaacaaacagcgattaccagtgacccatacaccttcaaacaagcaggtaccttacctgatacctacacaacaggcggtaagacctacaagttcaaaggctggtacaaagggaaaaccaaaaccgagcctttaaccacgacgaaagcaccaagttatggggtaacctataatgataatgatgatttgaatgtggtgtatgaagaagtaacagctatttatccagggttctatgcgcaatttgttgatgaacaaggcaaagcttttactaattcgctaactctttctgaaaattatactgagtttctcagaaagacaggcactactgtttttgaaacgaagggcgccttttacccaatggtaggtaagcgcgatgcaacagtgacaaataagtataagattgaaacaacgagtagtgttgcagtaccaaataattattggacagccatgcctgctgacattgctaatagagggtacgcattaaataacttggatattaccaatcaaatgaaatatgttgacaagatagaaactactgacacgcacactacaatgtacgattatactggagtttcggacattgggggcaaaccaaacaatgcttctcagacagaattaaatcctattgataaaacatttgttaagcaaacagataacacttttgcgataaaatcaatttggggaaatggaacgttttcgcatatagttcccaaaatgttattgttagcagaaagtggcagtttttcaagattattcgggtttgatggtactccagactacaagcaaaccgtaaactacaaagtcacccgtaaacaagtcaccgaaaactttgttgatgccaacggtgccaaaatcaccgcaccaacaggcttcacccaaggcaacaaaatacccatgactagcaacaccttcaagtacacagccgcaaaagccttgccagcaacttataccgcaggtggcaagacctatactttccaaggctggtacaaaggcaaaacgaagcctaatactttaacaaccagcactacgccaacatataacacaacttttgatggcaatgacgacatgacggcgatttataaggaagaagtgcccaaagcaagtgtcgctttaacgcgcactaccgctgaaaccgtgactagcggcggcaatgtcacctggcgcgccacaattaccaatacaagccaagcaccactaaccacggcgaccatcaagaaatcaaccgcttggacaactggcttagcagcaccaaccgccatgattgtcacgccagctggcggaaccgcaaaaacagttcccgtcacagcgactacgtggaccaacggtgttagcttaggcactgacattcccgtaggaaaatctgccacggttcagttcactacgaaagcgacggggacagcggggcaagtcttgcgcgctgggattaccaccagtgggaattacagtggtgtttctacttcggccaccgtacgtgtgaaagacaatgatcaagcaattgtaacaccaacggctgaaggcttcatcagtgttccaaccttcaattttggtcaagttggggtagcgggaagcacgca

SEQ ID NO: 151 - DNA, 4045 bp; double-stranded, linear
gaatttcttcagtatcctaaaacaagaagtgtattatggaaaaatctatcaaagtcaaatgaattgrtagaagcaattgagaactacatttattattacaatcatcaccgaatcaaggaaaaacttaactggaaaagcccagtagaatttcgacaattcaatcaaaaaactgcataaaaatagagtggaaaaatccactctataaaaagtctaactttttggggtcgctacaacaatacgtttgttttttaatccttcagtttataacattataagagaaaagcgagaagaatcatcctccttctcgctttcttgttaccctaaaccaacacgttcaaaaatcgtgtcaacattttttaaatgataatggtaatcaaaggcatcatctagctcttcttttgataagacagatgtaattttttcatccgcatctagcaacggacggaacgccgtttgatgatcccatgcgtaagctgtttttggttggaccagatcatacgcttcttcacgtgtcatgccatgatcaatcaattttaacaagacacgttggctgtaaattagaccataggtcgcatccatgttacgtttcatattttctgggaagaccgttaagtttttgacaatattaccaaaacgattcaacatgtaatttagtaaaatcgtcgtatctggaataataatccgttcagcagacgagtgagaaatatctcgttcatgccataaactcacattttcaaaggcagtaatgacatgaccacgaatcacacgtgccaaaccagtcatattttcagaaccaattggattccgtttatgcggcattgccgaagatcctttttgtccttttgcaaaaaattcttctacttcacgtgtttctgatttttgtagaccacgaatttctgttgcaaatttttcaatacttgtcgcaattaatgccatggcagaaacatattctgcatgtaaatcacgtggtaaaacttgtgtcgaaatctcttgagcacggatccccaaatgttcgcaaacatattcttcaacaaatggtgraatattggcaaaggtacctacggctccactgattttacccgcttcgacacctttggctgcatgttcaaaacgttcaatgttgcgtttcatttcagaataccacaacgctaatttcaaaccaaatgtagtcggttctgcatgaacgccatgcgttcttcccatcatgamcgtatgtttatactctttggctttggctccgacaatctccgtaaatgtttgtaaatctttccgtaaaatatcattcgcctgtttcaatagataaccataggcagtatccacaacatctgtgctggttaacccatagtgtacccattttcgctcttcaccaagcgtttctgaaaccgcacgagtaaaagcgacaacatcatgacgtgtttctgcttcaatttctaaaatacgtgcaacatcaaatgatgcattttctcggattttttgtacatcttctttaggaatttcgccaagttctgcccaagcttcatccgccaaaatttcaacttctagccatgccttgtagcggttcttatctgtccaaattgcgcccatttcgggtcttgtataacgatcaatcattgtgccttatcccctctttactcctcaatttttgaaaaataattacgaccaaatctttgtttctttaatttcttccagtgtttcatcgatttctttggttaatatagtaatatgccccatcgctcgttgcgcttttgcttcwctgtggccataatagtggaaatgccaatctggatgttcattaataatgtccatcgtttcataggcttcatttccaagcacattgaccgtgactgcttcagacaacagttgaatcgttggcattggccaattacataaaccacgaatatgcgtatcatattggctaaaagaacaagcatctattgaaaaattcccagcatcttctggacgaggtaaaattttatttacataaatcccgcctgtttctgtataaaacatttcaattgaaagggtgccgactaaaccaactgctttagcaatcaccttagcaattcgttgcaactcaccactgacttcgtcatcaattcgggctggtgcaatcgtttcatgtagcttacgctcttttttaattgtttccacaactggaaatgtcgcaaattcgccacgaccattaccagaaatcagaacagataattctttttcgtaaggaatccaagcttccaagacacaggttccttctctcagaagattcatggatggcgctaagtctgaagtactatgtagtacataacgaccttcccctcgcgtattcttcaagatacacggataaccaatgccatcaattgcttcttgaatatcagtcggactaacaatcgttgcataaggtgcaatcacaatattattatcttccaagaaacttttttccattaagcgatcttgcgtaatcgctaaaatgtctgttccttgcggtatattcgccaaatgttgaatcgctgttaacgcatcaacatctgcatgttcaaattcatacgtaatcacttgggcacgttttgccaatttctctaacgcttcaggatcattatatgctcctaataattgccaatcggcaacttgtgcagcaggacaatcaatttgtggatctagcacacccactcgaaaccccatttctcttgcactaagggccatcatttttgctaaatgtccgccaccaatgataccaatcacttgaccaggtaatagtggtttatccaagttcatcacaactttccatcacagttttatccttaaaatccttctgcggtttctcgtcgcagtctagcctttaagagtggccctntttacatgatacmaggraaaaggctcaacttcaagtgccagcagtgtttccattaggttttctcatcagaatttattaacatactttaggataaaacagcggtaacttactactcgtctctttgtaaccaagcttttttctctttttctcttcaaattgatgaaaacattaaatttttctaaacgatgatgaggtcaaaaaagtatgaaagaaaagccacctgaccttatctatcatacttttttgaaactattcgttactttctgaggtttcttttaaaccattgaataaaagatttaaaataattgcggtaatgctgctcatgacaattccattaccagtaaacatgctaacagtttctggtactttattaaagagcgtcggcataatattaaagcctaaaccaaagccaatcgagatggcaataattaataaatttttgtcatttgagtagtcaacttttgacaacatgcgcattccttggacagccaccattccaaacataaccagcattccgccgcctaaaaccggctctgggataatttgggccatcgcaccaatttttggtaataagcctaaaataattaagaaaaaagcagaaaaataaattggtcgacgtgttttgatcccagataattgaactaacccgacattttgagagaaacctgtataaggaaacgtattaaaaatcccccctaaaatgacggctaaaccttctgcatgatacccacgacgtaaatcatcttcgccaattttcttccctgtaatatctcctaaggcaaaataaacacctgttgattcaaccatactaacaattgaaataataatcatcaacacaatagaagaaagatcaaacgttggtttgccaaaataaaatggctgtggaaaatgaaaccacgtagcttgaccaacaggagacaaatccactaatcccagaaacgcagctaaaattgtgccaccgactaggccgattaacacggcaattgacttgataaagccacgtccccaaacttgcacaacaatgattaaggcaattgttacaaatgcgaggagcaagtttttaggatcaccaaaacttttgtccgttgctaagccgccacccattttttcaacagcaacaggaattaaggtcaaaccaataactgtaatgactgtgccggtgactaaaggcggaaatagacgtttaatttttgagaa

SEQ ID NO: 152 - DNA, 7574 bp; double-stranded, linear
nannaatatactataaagtccaaagaaagcgctttaattcgatggagaaggtggtttagtgaaaagattttcattttttttactaattttacttgctttaacaggttgtaaatccggtgaaaaagaatttgatgaagaatctcttcaaaatctaaaggaaacgkcacagtcttaytcagaaacagaattacaaaatggtgacgttcgtttaaatgaatatatttctttgaaaggggagattgttgagagtgacagtcgttccagtttaataaaaaaaggtgatcgttttattttgaaaagtggttctagtaaatatcaagtttytaatgagcaaaagaaaaaattgaagattggtgacgaagtgacagtttacggagaatattacggctttttgaaagggacattaattgaaagtgaggagaatcatgattcagccacgaattagacagaatccttttgaaacatacgaagaagttgcagaaggatttgaagatttattagcgccactggaattgttttttgatcgagagtatcaaggtcatctggatttagggacacacggaacggtttattctaaagggacacgtgatgcggaggcatttttacgaccattatggggactaggtccttatgtaacgcaaaatgaaagtgagtatttgaatgactttctaacgggaattatcgaaggaaccgatcctgagagttcatcttattggggaaaaacaaaagattatgatcaattgattgttgagatggcagcattaagtacatttcttttgttaaacaaagaaaaaacgtgggaccaattaacaaaagaacagcaaaacaatttacacagttggctgatacaagccaatgaaaacattattccgccaaataattggcatttctttagagtgttgctgattacgtgaacatgtgaagccgtatcnaaagaacagatcgctgttgatttggctgtaatngatcgtttttatgtcggtaatggttggtattatgacggagtcgagacacaagttgattattatgtttctttcgctattcattattatagtttattgtattgtcgttttgccccggaagataccgcaagagtggctattatgaaggaacgagcaactttgttcgcgcaagagtttaaatattggtttactcagccaggagaagcgattccctttggacgtagcttaacgtatcgttttgctcaagtgtcattttttagtgctttagtttttgcagatgttgaagcattgccgtggggtgagattaaaggtctaatcagccgacatcttcatcaatggatgaacaaagatatttttacaacagatggattattgtcggtaggttatgattatcaaaatatggtctttgccgaagntataatggtcctggttcaccttattgggcctttaaaacattcattttgttagcggttccaaaagatcatccttattggcagcagaaacacagcctattagctttccagaaaaacacttacctcaccgaaagtcggaactactatcaagtaaatgatgcagggacacatggtttaatgtttccagcgggacaatttattaattatcaagctcatgcgcatgataaatatagtaaatttgtttattcttcccattttggtttcagtactataaagagtgattattggtattacgaaggtgcttatgataattgcttggctttagctgaagacgaccactatttccgcacgaaaggattagatgatcagtacgaaattcttgatgatcgtatcattcatcaatggcatccttggtccgatgtagcaatcaaaacgacaattgtaccattagaaggccaacatttacggatccacgaaattgagacacaacgtgcattagtggcttatgaaggtggcttctcaatcccgctcttcgatgaaaaggtcacttgtgtttctgatcaaatggctgaggtaaaaaatgcaaaaggtgtgtcaaaagtagaaaatatcaacggcttttctgaagcygcgattattcgaacagaaccgaatacaaatttactttatccgttaacggagttgccatatttgaaagcaaacttgtcgaaagggaaacatcttttaatttcattggtgacaggcgtactaccgaatgaacaaattgagccagttaaagttaggttaaaagaaaatcagcttttagttgaagaaaaagttgtaattttggggaattagggggagaaatacacaatgacagaaaatggacagattgagtggttgccgaagcaaatcagttttgctttaaacaaagttagaggaaatttagagacatttaaagaattagttccacccgcggcaagtttaaatcaaatttattatcctgaagaaaatattgactggacggccagcttttggccaggaatgttatttttagcaaaggaattaacaaattcaacagagttcgatgaggtgattgccacacagatggcttcttttcaacatcgcttggatgaacaaattgagctggaaacacatgatataggctttttgtatattttaacagccattgctgattatcaagtcaatggtcatgaggcctcaaaagaaatggccttgcaagctgcggacttattaatgaaacgttattcaccaaaagccaagattattcaagcttgggggaatttagacgatccagagcaacgaggtagaatgattattgattgtttaatgaacttaccattattatactttgcagcaaaaatgactggcaagcaagagtattatgaagctgcctacaatcatgcgaaacaaacacaaaaatatattgtgcgagaaaatcacactacgttccatacgtattattttgatacggaaacaggcgaacttgtacggaaagacacagcaaggatactcagatgattcttgttgggctcgcggccaagcctggggaatttacggctttacgttaagttatttatatacaggagatagtagttttctggaaacagcaaaaaatgttgctgattactttattcmagaattaccagaggrcaaaatctgttactgggatttaattttcaatgaagggagtgaagaagaacgtgatagctcatctgctgcaattgccgcatgtggcttactagaattatctcgtcagcttccattaaatgatgaaaaacatggctattatgaaaaggttgcgctagaactattacaagcattagcggaaaagtatacaacggttttacaaccagagtcgaacggcctattgcttcatggtgtctatgataaaaaaacaaatacaggagtcgatgaatgcatgatttggggcgactacttttatttggaagcgttaactcgtttagcgaaaagctggtattctttttggtaattcatggaggaaaactcctaaaaaataataaatagcggaggtagtacaaatgaaattttggaaaaaaggcttaacagcggcagcgctgttagcagtggcggcagtaactttaacagcatgtggtggttcaagtgaaaagaaagcaactgaaaagagtgaagatggcaaaacaaaattaacagtaactacttggaattatgacacgaccccagaatttgagaaattattcagagcttttgaagcggaaaatcctgatatcactattgaaccggtggacattgcttcagatgattatgacacaaaagtaacaacgatgctttcatcaggagatacgacggatattttaaccatgaaaaacttactttcatattctaattacgcgctacgcaatcaattggtggatttaaccgatcacgttaaagatttagatatcgaacctgccaaagcaagttacgagatgtatgaaatcgatggtaaaacctatgctcagccttaccgtacagatttctgggtattgtattacaataaaaaaatgtttgatgaagccggaattgcctatcccgataacttaacttgggatgaatatgaagcgttagcgaaaaaattatctaaaccagaagaacaagtatatggtgcctatcaacatacttggcgctcaaccgttcaagcgattgctgctgctcaaaacaatgccaatttgattgaaccaaaatacaattatatggaaacttattatgatcgcgcattgagaatgcaaaaagatcaatcacaaatggattttggaacagcaaaatcaacaaaagtaacgtatcaatcacaatttgaaaattcaaaagcggcgatgatgtacatgggtagctggtacatggggactttattaacaaacattgatgatggcaaaacaaatgtcgaatgggggattgccgaaataccacaacaagaaaaaggcaaagcaactacctttggctcaccgacaagttttgcaattaataaaaacagtaaaaaacaaaaagctgctcaaaaattcttagactttgcttcaggtaaagaaggtgcaaaacttttagcagaagtaggggtggttccttcttataaaacagatgaaattgataaaatctactttgcaagaaaaggaatgccttcagacgagtctcacaaaaagcctttaacccagatacaattaatttagaattcccatctgataaaaacggtgccgcaattgataaagtattacaagamgmacatgatttaattatggtcggcgmcgaaaaaccaaaagatggtattgctaacatggaaaaacgtgtcaaagcagagatagactaattattattttctgcaaaaacacaaaagattgatgaaaaaaataagctgaaatgagtaacctacaatgaatttcagcttatttttttaaataaagaatgtagcttgagtttggaaggagggcctgttaagttcacttaacagaatacaattatggaaattacttcaaaaacaaaaacagcaaataaattgagacgaaaaaatacgtggactgcgttatcttttatcgcaccaaactttattggctttttcctcttcactttaatcccggttatctgttcactgattttagcttttatgagttgggattctttttcaacccctgaatttgtcggaatgaaaaatttcaccaaaatgattcatgatgatacgttttggatttcgttaaaacaaacgtttatctatacgattggtgttgttccgttaacattgatttgctcattaggactagcgattttgttgaatcgtaaaattagagggatgaaattttttagaacggcttttttctttccttatgtaacgtcattagttgcgattgcggtcgtttggaatatgctatttcatccaacgatgggaccaattaatcaatttttgaaattatttattgaaaatcctcctggctggacatctagttctacttgggctttaccagcaattatcatcgttagtgtgtggcgctttatggggtattatatgattttgtatttagctggtttacaaagtgtgccaagagaattatatgaagcagcgtcaatggatggcgcgggtaaatggaatcaatttttaaatgttaccttaccttcactacgaccaacgacctttttcgtgactatcatgcttgtaattaactgtttcaaagtgtttgacttagttcaagttatgactggtggtggaccaggacgtgcaacgaatgtgttagtttacgaaatttacaatgaagcctttgtcaaatttaattttggttatgcatcagccattgcgatggtcttattcatcatcgttctagcgattactgtggcccaatttaaatggaatcaacatcaagagaaagtttaggaggagaaaagatggaagcaactttttcaaaaaaagaaaatactcgaaaagcaaaaacgaaaaaagcagaaaaagtcacacctggtgggatccttgtaatcattctcttaactttacttgcgttaattactttggtgcctttcatttggatggtttcagcatcatttaaancnaacaatgaagttttcaccattccaattcaatggattcctaaaagttggcatccagaaaactattccgttatttgggaacgcattccgttgttaactttctttaaaaatacattatttttaagtattgtgattacgattattcaactatttacttcaagttttgcagcatatggcttttcaaaaatgaattttagaggaagagatacactttttattacgtacatcgcaacaattgctattccttggcaatcgtatatgattccacaatttattatgatgcgtcaattaggtttgactgacacgttatggtcacttgttttattacaagcatttaatgcatttggggtttttttactgaaacaatattacagcagtattccagattcactatgtgaaagcgcgcggattgatgggttaagtgagtggggaatttattggaaaattattttaccattaactaaaccagctttagctagtctcacgattattactttkgtgaatacatggaatgactatatgggacctttcatttatttatcttctactgagaataaaacgattcagttaggtttgaaaatgttcgtcggtttatttgatgctgaatatgccttaatcatggccgcatcagtggtttctattttaccagtagggattgtctttttagcaatgcaaaaatactttgttgaaggtattgctacatctggaatgaagaattaggaggaagtttgaatgtttactaagcaaacctttgataataatatctatatgaaaatttttcgctggctttacattttatttatcggtaatctagggcttctcttagtgaacattccttttttcatagcggtgattagcttagacattgatccacgaaacctcccactttttgtagtaacgttgttgccgatggggacagggatgattgcacttttaggtttaatcgatacttttaaagaagaaaaggagctggatccatttaaaacttttttccaaaagtttcgtcagtttgggttaagaggctttcttatcagcttgcttggattaggaagtagcatcatcagtgtgacagatatattcttttttgccaaaacaacgattggtaaatggtttattccattgatggtccttctgctaatttttgggttagctattatgctgaatgcttggtattttcaagtacgaaacccgcaagcttcttttaaagatgtgtttcggatttctgtttactatggactgcggaaatggtatgtcagctgtctaaatgtttttttactattctcaatgtttgcaatgatgtttttgaagccacagtttgggtttgttgtaacccctgtcctgttcctagggattatttatttaaatactgggaaattgcatgaaaagcaaaaaaagaataaataatttttacataataagtaatctcgattttcaggaaaatgaatgaaggtggggttgcttattttgttcttgccttgtttattaaagtggagggagcgaacgaatgaagaaaaaaataattattttaagtagctttttgataggtgctatttttgtgctcgttatttttactaccagccagcaaagtatgattaataacgaagcmatccaagtcgargaattaattgttwatggcgataaaaatatgaatcgtata

SEQ ID NO: 153 - DNA, 1229 bp; double-stranded, linear
tgtntaatgttcgtgttttatnttttaataacctttttcgaaaaaatatacgaacgttcgggtttaaaaacgaacaaaaagatgaaaatgtgttgaaatatacgttttccttgcgtatactgatgaagtgaaaaaacgaacgaggagtgtacgaatgaacaagaaagttccttatttaattgtggcaccggggctagtactattattatttttcttaatgattccattaattactagcattttgccaaccatttttactgatcatggcttgacactaaatcagtatgttactttttttaaagatgactataatgtttcaattttctggcgaacgataagagtttcgttaattgtgacgggtatttcaatcgtgttgggcattccaacggcatactttattgctggagtttccaaaaaatggcgtggctttttaatggctatgaccttgtttccattattaaccaattcagttattcgaagttttgcttggattaacattttaggaaaaaacggtgtagtgaatacgttgttattaaaaacaggcttaattgagcaaccgctgaatttattgtatacagaatttgcaattattatcggttcagtgtatttatttttaccaacaatgattatgaccttagttggggttatggaaaacattgaaggagaaatgctagaagcggctgagacgctaggcgccaatccaatgacggcttttcggaaaattgttttacctttatcaattccaggcaccattgtaggaagtatattagtgtttacaggaactttaacggcttatacgacgccacagctgttaggtggtaaccaaaaaatgatgatgtcgaccttcttatatcaaaaggctaatactttaggtgattggcaatcggcgagtgttcttgcatttattatgattttaacgacattaattgtgatgaaaggcctagacatggtcgctaagaaagtagatcggagagaagcaaatsatgcgtaasaaaaaggactatctgttattgcaattctagtttttstgtttttatttttaccgttatgtttgattgtggtgcntcttttggaacagccgcagcgattcaatttccgattaaaggattactttagattggtacgccaaagcattacaatcggaaacgtttatggacagtttaagttaagcttgttgaatggggtatagcgactgttttagccattaatagtagggatccggcctccna

SEQ ID NO: 154 - DNA, 9749 bp; double-stranded, linear
cttggttatctggtatggccatcctctgtgtgagcaaaaattatggagatctattngtaatattatttgtgtgactccgtaccctctccttgctgtggctgataagggcatctatgtggttgaagcacgaaagragggttmcgtgtattgrtaatcctgtagcgtattaacaatwacccacatttgattaccaattatttaatttaaacaattatcgtgtactttcaactagaactccaaaaaataatttttcagatcaaatagagttagatatttatagtagaggaatgggtggtattgggttgccaggagatttatcatcagtatctagatttgtaaaagcaacttttactaagttaaattctgtatcaagaagttcagaatatgaaagtattagccaattttttcatattttaagttctgtcgaacaacaaaaaggattgtgtgatgttggtgatgaaaaatatgagtatacgatttattcttcatgttgtaacctggaaaagggaatttattactatcgtacgtatgacaatagtcaaattactgctgtggatatgaataaggaaaatttagagaaggatagcttaattgtttatccaatggtggaaacacaacaaattaactatgctaattaatttgttgtaattcttgtttttataagtattttcgaaatgagtttaaataaacgggaataatagaagagtagatttaagttattgataactactaggtaattgatgataaattaamcaaattagatgctttaaggaaagatgacaaaaaagtacagtattacatgaaaaagtggatttttgagaaaaaaagggtttaacaattaatatcaaaaacaactattcttataaaacgaatagttgtttttttgtattcatattttctataaaaaaatgaatagtaaacacttgtaattttttaataagaagaatagcttgttataagagtaactacgattgtccgcataatttttttgaaggtggtaaaaaaaatatagrgktataaatgtgataggkgtattagtatttatttaaaagrctaaaaaatgtgaaggagkttgaatcgaaatgaaaaaagtatgtgctattttaatgatttctgcgtcagttttaggaatggtgcccagtaatgtaccaatttttacagcagaaataaattatgcgcatgaaaatgaattacaaatgaatccgtttgttatagcgtttgtcgataaagtgaagggttctgttgcaaagtttgaaaatcaaacgcgccctctctgaactccaaatatcttaggctggtattcccattaaccttgatttcagtagacaccgaaaatccgaagagcgttccatttcttcggttctttttatatattcctcgaatggtctccatgcccttaatcgtggaagaggctgtacggagactttgataaaatttattccgtcgtttaataggtcgatggtcttgttctattaaattgttaagatacttcacagttcggtgctctgtcttagtatataaacccacactctgtaactttctaaaggcggagcaagagaaggtgctttatcggtcacaattgcttgcgtatcccgtttctttcgtaaccagatatctaaggttaagccgtccgcatcaattgcacgataaagataatgccaacgtcccttaattttgatataggtttcgtccattttccatgaatagaaggattgtctatttttcttcttccaaagatcatagaggactttgctgtactcttgcacccaacgataaatcgtagtatgacaaacatttattccacgatcatataacaattcctgaacttcacgatagcttagattgtaacgcaggtagtaaccaacagcgacaataatgacgtcttttttgaattgtttgcctttaaaatgattcattactctgtcctctctgtcttttttctcaattttacactaaaatagattttttggaaaactttgcaacagaacctttttttgcaatagaattactaatgggaaaacaaattaatgcgataaccagaccgatagcaatttcgtgaaaaataattgttattaagaataaaactatactagatatgaataaacttaaaacatgtattttatcttctttcataggatcctcccgttattgtcatacaatagttgtttgatttatattttaaattatcaataaaagaaaagctaggaaaaaagcattcaaacgaaaacccagttaatacagatacaggcgttgtgattgtcgcagttgaagatagtaaaccgattattcaattagcagacggaacaacaaagaaagttgaagctaaagaaattggagcagacgttcaaaaagacggaacagtaacggttaaaggttcagacggaagaatgaaagttttaccaaaaacaggagaaacagaaaatattgcattgtctgtcctaggttcattaatggtattaggatcagcattcatttttaaaaagaraatctaattaagtatttataaaagcatggtcgcaagttttacactctcctacttgaagtttccgaatgaaaactctataatgagaaatgtgaaaatgttcacttattataaattaagtttggaggcttttatttatgaaaattgcaattgcaggggccggcgcgatgggttcccggttcggactgatgttgaaacaaggtggtaacgatgttttgctaatcgacggctggcaggagcatatcaatgccatcaaagaaaacggattgaaggctaattataatggcgaagaaattactgttaaagtctcaattgttaatcagaatgaggtgcccactggtgagcaatttgatttgattatcttattcacgaaggcaatgcagttggaaaaaatgctgcaggatgttaaaccattaattgctgatcacacagaagttttgtgtcttttaaacggtatcggtcatgaagacgtaatcgaaaaattcgtaccgatggaaaaaatctttatcggcaacaccatgtggactgctggtctagaaggtcccggcaaggctaaattatttggcagcgggtctgttgaattgcaaaatctaggtattggccaagaagaatcagcgaaaaaattggcggaaactttgtccgcgtctggtttaaatgccaaatattccgacaacattcattattcaatttatcgtaaagcttgtgtcaatggtacgatgaatggcttatgcacgattttagacgtcaatatggcggggcttggtgcaaccaaacctgctcatgacatggtagtgactattgttaacgaatttgcagctgttgctgccaaagaaaacgtcaacttagacattcccgaagtaatcgaacatgtagaaacttgttttgacccgactacgattggtatgcatttcccatcgatgcaccaagacttgataaaaaataaccgtttgaccgagattgactacatcaacggagccatttctcgtaaaggtaaaaaatatggagtagtaactccttactgtgatttcttaacgcaactggttcatagtaaagaagaaattctaggagcgaaatagtaatcattagaaagaggatgagaaaatggaagaaaaattaactccaaaaatatttttaaataaagtattagcgggtaccgcaacggggatcatcgtagggttgattcctaacgcggtattggcagcaattttgaaattatttggtgaaaataccttagcagtaacgatcacacaaatggcagttattttccaactagctactccactattgattggcgctttgattgcggtgcagtttggcttcaaaccaatgcaaatgttagtagttgccggtgcagctttcgttggctccggtgttgtgaaattcaatcctgacacagctacttatatcggtgctggtaccggagacatcatcaataccatgattactgcatcaatcgctgtcggcatgatcttgttgatcggcgaaaaatttgggtccgtggcaattgttgcaacaccaatcgttgttggtatcggcgctggtctaatcggctattatttatatccttacgtaaccaagattactgccgctatcggtgacttaattaatacctttactactttgcaaccaattttgatgtcaatcttgattgcatgttcctttgctttcttgattatctcgccgatctctacagttgccattggtatggcaattcaattgaacggtgtttctgctggtgcagccgctatgggtgttgccgcaacaacagttgtcttggtagttaactcttggaaagtcaacaaaccaggggttactttggccatcgcattgggtgctatgaaaatgatgatgccaaacttgtttaggaaaccaattatcttggtgccatgtctattcaccgctatcatctcagcaattccagtagcgttattctcagtctcagggactcctgcttctgctggtttcggtttggtagggttggtaggtccgttggcttcattggacgccggtttgagtattattctactattaatcagctggtttgttgtaccaatcgtagctgctttcgtaggtcaaatcttatttgaaaaaatcttgaaattgtatgatcgtaaagatgttttcgaatttttaggatagtcaactagaaaaagtgtgagccttgtgctcacgcttttttgtgcaattgaagttggtgaatctcagcgaaaagagaaaggtaccttaaatagtgtgtttctggtcaatagcacaatgaaatatctaaatacattatgaactgcttttcgttttatgaagagcagtttgtgctatttgagaaattgctcaatttaatcattaagtagtttcatcaatggtgactatgctactgcaattcttgttgtaccaaccgggagcgtcaataattttgtgtaaataactcgtccttctgcaaaataatgggttactcagtaaacattgaagctaatgtatccgtcacttgttggaagcctttatggcttctatttaagaatttttgattgtatgtatcaaagatggatactaggaaacgctctagtgattcttcattttgaaactgctcttttctgcggctgtatttcttgatttgtttattgaaagattcgattaaattagttgagtaaatgcttcggcggataccaggcggaaactcataaaaagtcaataaatcttgattttttatycankgctgcgtcactttaggataagttttctgccacttctcaatcatactccctaaaaaggtatttgcctcttcctttgagctagcttgataaacagccttaaaatcatcacagatttcttttcgatctttgacacgtactttatgagcaatattacggtaaacgtgaacacagcaatgttggtatttagctttaggataaatctggtgaatcgtatctttcatgccttttaagccatcggtaataaacagtaagacatcatgaacccctctggagtaaatgtcctgtaacaactcattccaaacgtaggtcgattcagtcggagcaatcgcataacttagtacttctttagtgccgtcttctcgtataccaatggcaatatagattgcttctttggagacggtttgccgttttaaagaaatataagtagcatccatgaaaatagcgacatacttatcatttagagttctaactttaaatgcatttacttcttcagtctgcgatttccgacatggtaataccttttcggaagaggtgaatgacggtctcctctaaggtatcattcgtccgtctataagcaggaacagtctgttgcttgaactcgccgttgcggtcgcgcggaattctgtgaatgtgttgtggtaacggttctgttgcaaagttttaaatctactatcaaataaggtagaataatagaaaaagatagcaggaggaatgacggtgaatcattttaaaggaaagcaatttcagtaggatgtgattattgtagccgtgggctactatcttcgttataaccttagctatcgtgaagttcaagaaatcttatatgatcgtggcattaacgtttctcatacgacgatttatcgttgggtgcaagaatatggcaaactactctatcaaatttggaaaaagaaaaataaamaatccttttattcatggaaaatggatgaaacgtacatcaaaattaaaggaaaatggcattatttgtatcgagccatcgatgcagatggtttaaccttggatatttggttacgtaaaaaacgggacacacaagcagcctatgcttttcttaagcggttagtgaagcagtttgatgaaccgaagttgtagtcacagataaagccccctctattacaagtgcctttaagaaactaaaagaatacggcttttatcaagggacagaacatcgtaccattaaatacctgaataatttgattgaacaagaccatcgtccagtaaagagacgcaataaattctatcgaagtttacgcactgcctctaccacgattaaaggcatggaagccattcgaggattatataagaaaacccgaaaagaaggcactctcttcgggttttcggtctgtactgaaatcaaggtattattgggaatcccagcttaaatcatagataccgtaagggattttattctttatttaaaactttgcaacagaaccaataatttgatctactcatttctaattcttgggagaatttttcttttgatttggtacctctcatcttttttaagctttctctaaatgctagttccaagtttctccctcctgtttatgtaaatattttgcacgttttccatttaattatatcgttacaccttgtaaatcacaagtgattaatcacaaatcacttgtgattagtgattgttattggtgttgcctagaacgattctaagcacatgtttaattttaaagtgggcaattatctttaaaatgtcctacaatgattcaataaaagcatggctgctagtgaaacttgcgaccatgcttttaaaaatacttaatggggtcccgagcgctttagctccttggaagctgtcagtagtataccyaataatttatctacattcccyttagtaacgtgkaactttccaaatttacaaaagcgactcatagmmttatttcctcccgttaaataatagataactattaaaaatagacaatacttgctcataagtaacggtacttaaattgtyyactttggcgtgtttcattgcttgatgaaactgatttttagtaaacagttgacgatattctcgattgacccattttgaaacaaagtacgtatatagcttccaatatttatctggaacatctgtggtatggcgggtaagttttattaagacactgtttacttttggtttaggatgaaagcattccgctggcagcttaagcaattgctgaatcgagacttgagtgtgcaagagcaaccctagtgttcggtgaatatccaaggtacgcttgtagaatccttcttcaacaatcagatagatgtcagacgcatggctttcaaaaaccacttttttaataatttgtgtgcttaaatggtaaggaatattcccaacaattttatacctctgtttgttagggaattgaaactgtagaatatcttggtgaattaaagtgacacgaatgttcagttttaatttttctgacgataagttgaatagatgactgtctaattcaatagacgttacctgtttacttattttagccagtttcgtcgttaaatgccctttacctgttccaatttcgtaaacggtawcggtttcttttaaattcaattgttttattatttggttgagtactttttcactcgttaaaaagttttgagaatattttatatttttgttccatgtaatcactcctgaagtgattacatctataaataaatacagaagttaaacgatttgtttgtaattttagttatctgtttaaaaagtcataagattagtcactggtaggaattaatctaacgtatttatttatctgcgtaatcactgtttttagggttctgttgcaaagttttaaataaagaataaaatcccttacggtatctatgatttaagctgggattcccaataataccttgatttcagtacagaccgaaaacccgaagagagtgccttcttttcgggttttcttatataatcctcgaatggcttccatgcctttaatcgtggtagaggcagtgcgtaaacttcgatagaatttattgcgtctctttactggacgatggtcttgttcaatcaaattattcaggtatttaatggtacgatgttctgtcccttgataaaagccgtattcttttagtttcttaaaggcacttgtaatagagggggctttatctgtgactacaacnttcggttcatcaaactgcttcactaaccgcttaagaaaagcataggctgcttgtgtgtcccgttttttacgtaaccaaatatccaaggttaaaccatctgcatcgatggctcgatacaaataatgccattttcctttaattttgatgtacgtttcatccattttccatgaataaaaggattktttatttttctttttccaaatttgatagagtagtttgccatattcttgcacccaacgataaatcgtcgtatgagaaacgttaatgccacgatcatataagatttcttgaacttcacgatagctaaggttataacgaagatagtagcccacggctacaataatcacatcctgctgaaattgctttcctttaaaatgattcatcgtcattcctcctgctatctttttctattattctaccttatttgatagtagatttaaaactttgcaacagaaccgttcatgggtatagcatgaattgtttaactgtcctctaggattcccgtcctatggcagtcggttcttattttgttaattgtcttgtaagttgcctttatatcgcactaagtttaaaaaagtaaaaagatttatctctcagataattgctatatcaaggtaactacgagattctaaactaattatcctacaagtgtgacaacaaataaagttatcaatggaataatttttttcatagctcgtttgctcattctaatagctctcctcttatttaaacttaacttacaaattaataatagcatagattaaaataaaaataaacaaaaatgcaaaaatttgcgctttttcatcaaaaaaatttattacataataaaaaaaccaaaaaatcattccacgaatgcacttttttgcgcctcggaaggagtatttcaaaatgtttctttacgaactattcaaagaacagcgaaaactctataattttactcaagaagaattttatgaaggaatattcaaaaaaagagctgcctcttcttttgaggtacacaacacgcatgatctcaaagttaaagatttacctgttttatcagatagaagcatgatgagtatcttagaaataattcattatgctaaagaagaatttatttctccttacgacgaagacttaaattcattgtttgatatattccagaataataccgaaaaagaaaataaagactacatttacaaattatacaaaaagtctatagagctaaaagaacattctataatatattggaatctttacttaataataaaaatccaatgttctgaatacgattcaagaattgtccctacagactcacaagatttatctgagttaaaaaaaatgattttatcaaaacaaaagtttactctttacgactataaaattgttactaatctatctcttgtattttcttacaaagaattgcaacc

SEQ ID NO: 155 - DNA, 9021 bp; double-stranded, linear
aaaatcagatatcttataanngnaatcaagcacgtattcgcgataagggtaaaaaattacgtaagaatcggcacagcgcttctttaaaaagtaaattaaactttgacaactttttcgaataatggtactgttaagaagtaaatttgtgaatagaggaggtcgaagaacatggcaacaaagaaagcagctcttgcttgttccgtttgtggctctcgcaactattctaaatccgttagtgaaggtaaacgtggcgaacgcttagaaatcaataaattctgtaaatattgtaatcaatacacgttacataaagaaacgaaatagatttagaggagggtatcaacatgaaatttttccgcagcgttgctgatgagatgaagcaagtaacttggccaacaaaaaaacaattgcgtaaagatacattagttgtaattgaaacatctattttatttgcagcattgttctttatcatggatactgttatccaaacggcatttggctggattttaaaataattaattctagtatttcccgacgaggggtgctataatagtattcgagaaaaagcttcgggaaactgagctttttttatttgctcgaaaaaaataaactaaaacatttaaaggagccgaatcagtaatggaaacttttgaaagaaattggtacgtattgcacacctattcaggctatgaaaataaagtaaawgcaaacattgaatyacgtgcacaaagcatggggatgggcgattatatttttcgtgtcgttgtaccagaagaaacagaaaaagaagtcaaaaatggtaaagaaaaagaaatcgttcataaaactttccctggttatgtgttagtggaaatgattatgaccgatgattcttggtatattgttcgtaacacgccaggcgtaactggttttgtaggctcacatggtgctggtagtaaacccgctcctttattacaagaagaaattaaccacattttacgttcaattggcatgagcacccgtcaatcagacttagaagtagcgctaggcgatacagtgaaaattatcgaaggtgccttttctggtcttgaaggtgttgtgacagaaatcgatgaagaaaaacaaaaattaaaagtaaacatcgatatgtttggtcgtgaaacaagtacagaattagactttgaacaagtcgataacattgattaataaacaagctgacaaactattgttcagctgattgatacagattgtagggtctggaaaagcagtcaactgacttcttttccaagcccttttttagttcatcgcagaaaggatgraaaaaaatgaacatgcccaaaaatatcngttatttttctttgctaatgggtcttgttctattattaagtgcttgccaaattggggcaactacgaaggatgacaaccaagccgccacaaaagaagcaactgttgagttaaaccgcacaacaacaccaacgcttttttttcatggttacgcaggaactaaaaattcgtttggctcgttactgcatcgcttggagaaacaaggtgccacaactcaagaattagtgctactcgttaaacctgatgggaccgtggttaaagagcgaggagctttaagtggcaaagcgacgaatcccagtgttcaagttctatttgaagataataaaaacaatgaatggaatcaaacagaatggataaaaaacacattactctatttacaaaaaaattatcaagtgaacaaagccaatattgtcgggcactctatgggtggtgttagtggtttacgttatttaggaacctatgggcaagatacatcgttacctaaaattgaaaaattcgtcagcattggagcacctttcaatgattttattgatacgagtcaacagcaaaccatcgaaacggaactagaaaacggccccacagaaaaaagtagccgctatttggattatcaagagatgattaatgttgttccagaaaaactgcccattttattaattggtggtcaattaagtccaacagatttaagtgatggaacggtgccgttatctagtgccttagcagtcaacgccttgctaagacagcgaggaactcaagtcactagccagattattaaaggagaaaatgcacaacatagtcaattacatgaaaatcctgaagtagatcaattgctaatcgaatttctatggccgagtaaaaaatagcaaaaaggcacatgttccataaaaaatggaacatgtgccyttttctatactttggctagcgaaatagcttttttcagctataataaataaaattatttatttttatgagatattggaatggaatcctcatgatttaaataagcacaaatcaaggcttcaaaggtgattaatgtttggccaaaaaacatttgtggctgagcgacacttgttgaaaacgggctgtaagagtcagttgaaaaaacgagatctgccagtcgaccaagagttgaatttttggcgccaacaaaagaaatgataggatgttttttctctttcgcaagcagagctgtttcttttaagtatttttcttcaccagaatgtgaaaggatgataaaaagaaaattctgattattttgactatttatcgaatgagtataggctgttgtgatgctggggatgccatgaaaattgaaaacttcactaatgtaagccgccaaatgtcgtgaaaagtcatgacctaaaataacaaataaatgactcttgtgtttggcaagcagtcgacaaaactcgttggttgtttcaaatgaaggtgctgtttcaaaagggattggctgagaaaaatgggcttcttttaatttgtaaataagttcattataacctgataaatttaattttttggctaaacgaatgatggaactaggcgaagaaaagcagtgttttgcaacttcccgaatactcaaatcggccgcattcgtactttgttgatccaaataatacaaaatctgactttctgttttcgttaaatgatacgtttcttttaagtaatctaagttcatgagcaaacctcctttatcagattataaataattttgtgggaaaaaggtatcaaaaaataaaaaaatgaggtgtttttatgaaaagggcaacaaagcaaaggctgtctttggcagcaatcatggttctacttctctcgggctgtggaagtgttgggaaagaaaccaaaaagcaagaacaacaggtattacgggtcgggattgattcggaattatcaacggcagacgtgtcgttggcaatggataataccgcagcagatgtaatgagccaagtaggggagggacttttctcctttgacgaaaaaggagaagcgaaaccagcattggcaactgaaaaagtacagccctccaatgatggtttaagctatacttttacgattcgaaaagatgcaaaatggagtaacggcgagccaatcacagcaaatgattttgaatactcttggaagcgcacagtggacccaaaaacagcttccccgcaagcgtattactttgaagggttaaaaaattatcgtgctattgttgacggtagcaaatctaaagaagagttaggggtaacagccattgatgaccataccttggaagtagagctaagctatcctatgagttattttcaacaattattggcggtaccagctttttatcctttaaatgaagcatttgtcgaaaaaacgggcaaaaactatggtacatcagctgagtcaacactttacaatggcgccttcacattagaaggttgggatggcacgaataatacttggtcctatgtgaagaataaaaattattgggatcaagcgaatgtttcgctagataaggtggatgtccaagtagttaaagaagtcaatactgggaaaaatcttttcgaagggaaagaattagatgttgtaaaaatttctggagaaattgttgcacaagaacaaggcaatgcagctttgaaaattcgtgaaattcctggaacgtattatatccaattaaatacgcaaaaagatcttttggcaaataagaatgcacgtcgagcaatagcattatcattgaattctgagcgtttagctaaaaatgttttaaatgatggctcaaaaaaagcacttggcttcgtgccaacaggtttcactaatcaagaaacgcaaaaagattttgcagaggaattaggagatttaaatcctagtgaaccagaaaaagcgaaagagttatggcaaacggctaaaaaagaattaggaattgaaaaagcggagctaacgattttaagttcggatacagaaaatgctaaaaaaatcagtgagtatgttcaaggagctttagcagataatttagaaaatttaacagtcaatgtttcaccagttccttttaataatcgtttagaaaaaagtcgcagcggagatttcgacattgtggttggtggctggacgccagtatatgctgatccaatcgatttcttaaacttactgcaatcaaaaaattccaataattttggtaaatggtctaataagacctttgatcagttgcttcaagaagcaaacgtaacttatgcaaataaatatgaagaacgttggaaaacattacaaaaagcggatcaattggttgcggaagaagcccccctagttcctctttatcaattaacagaagcacgcttagtggccgattctgtccaaaatttagtctatggtccattaggttcaggctattacaaatcagtctctatcggcgacaagtaaaggttgggaaaaaatgaaaaaaagtcaagctgttcaattaattcaggaactttcaaatgctaatggtgtttcaggctttgaaacagaagtcgttagaatccttcaacacgcaactgcggattttactattcaacggctagattccattaaaaatttatatcttgagaagaaaaataatctaagtgaaggtccagtagtgctttttgatgctcatagtgacgaagtgggttttatgattcaagcaattaaagaaaacggcttgttgcgtttttttccgttaggtggctgggtccctaatacgatttctgcacaaaaagttcggattcgtaaccgggaaggtacctatctgccaggcgtagttactagtcggccccctcattttatgacaccagaggaacgtcagcgaccgttaaccattgctgatttgacgatcgacattggtgctacctcaaaagaagaagtaattgaaacttacaaaatcgatcttggtgcaccggtcattccagatgtgacgtgctgttacaacgaacagacagatctttttttaggaaaagcttttgattgtcgcattggctgtgcttgcttagtggatgtcatggaggagttgaaagaagagacgcttccattcaagttagttgcgacagtaactgcacaagaagaagttggcgaaagaggagcacttattgccgcaaaacaagtcaatcctgatttagctattgttttcgaaggctgcccggctgatgatacggcagaaacgccagagatgattcaatcagcaatgggaaaaggaccgatgttacgttattttgatgtttctatgattacgaatccggaatttcaagagtatgcactagagattgctaaaatacacaaaattcctgttcaagtttctgttcgaagtggtggtggaaccaatggcatggcgattacacaagttcaaggagccccgacgattgttgtaggaattcctgtccgttacgctcacacaccccattgctatgtagattttcaagattaccaagcggcgaaagaattagtcattcaattaatcaaaaatttagatgctgacaaaattcaagcactggttcagccattgtcaaaggagtggaacaaatgaagatttatgtatcatgcgatattgaaggattagcaggtattgcgacatttgatatggaaaaagaagacaccgttttattccgagaattatatcaccaacatgtggcttggttaattgaagggattcaaaagagtgccaaaaatgaacaaattacagaaattactattgccgattcgcatagccgtggattgaatttagcttatgcgcgcttggcagaaatggatgaacgaatttccttagtgagcggctttcctcgcatggattatatgatgagtggcttggatagtagctatgatgtggtctttttcttaggttatcatgccggtattggtaaacaaaaagggaatatggatcatgggtatagcgctagtgttgcttatgatttaaaaataaacgacttagcgatgaatgaaacgacaattaatgcagcttacgctagcgaattaggtgtccctgttggtttaattatcggtgaatcaggcttagaggaacaactttttcaagaaaaaatgatgcccgaagttccctttgtttccaccaaagaatctctgggacgttatgcaatcaaaaatagacccatgcaacaagttcgggaagctatagtagcaactacaagtcaggtgttaacttcctttgcgttgtctgaattaccccgatatgccttgcaaacacctgcaactgtaaaattgcaatgtgtgacgacagcacaagcagatcgtattgaaatgttaccaatgattaaacgcattgatggtagaactgtttcatttgtaggtgaaacgatgaaagatgtcatgaatggaattgtcgctgtggttggtttaggcggaacaagttattaaagtaagaagcttacggaaaaaacgaatggacatttttttctgtaagcttcttgctatagttatttctatttttgtttctctagaatttctttgcttaaacgttgtgcagttggtgtcaccgcaagaccgccttcagcggtttccttgaaaatttgtggcatttggcgtcccacttggtacattgcgtggatgacttcatctggcggaatgacacttcgaatccccgctaaagccatgtcagctgagatgaaggcttgagaagaacctaatgcgtttcgcttcacgcaagggacttcaacaagtcccgcaacaggatcacaaatgaggcccatcatattttttatcgtaatggccacagcttgagcagattgatcaggcgtaccgccagaagccgcaactaaagcggcacttgccattgcactagcagaaccgacttcagcttgacaaccacttcggcaccactgattgaggcattattggcaatcactaagccaaaagccccagctgtaaatagaaaatccaattgttgttgatgcgttaactttaagcgatcaataactgccaacaagacgccagaaactactccggcactgcctgcggttggtgtagcacaaatcaagcccatttttgcattaacctcattaacagcaatcgcatttcgcacggcttgtaaaatggtctcaccgcttaaaaagttgcctgaatgtatgtaatcatttaagcgggttgcatcgccaccagttagccctgttactgaggtaacaccagcgattccttcagcgacggattgtttcataacggctagatttttttccattgtttcaataattcgttcacgagaatacccgccatgagccatttctgttgcaatcattaattcgctcacagaagggtaatctttcgcttgagctaccaaatcttcaattgaataaaacatcgtattactcctttacgttcatttagtcaaaatagttaacgctatatatatgagggatttcagctaattgcatgacaatgtcaccgacttcggcttgatcaacttcaataatcataatcgctttttcccctttagattctcgggtaacggtcattgtactaatattgatatcgctagctgaaaggatgttggtcaccttagcaatcatgccaggaacatcttgatgaacaacgataaatgttggcgtgcccatacttaaagacaatttgaagccatttaattcagaaatttgaatgtttccaccaccaattgaaattcctgtcacagatagttttcggtcgccagaagaaaccacaattttaacggaattagggtggtctgctttttcacttttaggaataaaacaaacttccattccttgttcataggcaatttccaaagaattggatagttgctcatcatctggttccatgcctaaaaggccgccaactaaggcgatatctgttccgtgaccacgataagttttggcaaaagactcatataaataaatgtcaacgctatcaggttgctgtccaaaaatactgcgaaccacttttccaattcttgccgctccagctgtatgagaactgcttggaccaatcataacaggtccgataatatcaaaaacactattaaagcgtaactcttccatttcagcaccttcttcattagaatatgttttcattggaagtctaacacaaaaaatggcggggaactaggcaatcgcttgtgttttagcgaataatttaaatttttatcagaatgaaagcaaggggccttcgttgacaaatcagtgaagagatgctaaattctagataataaaagacgaaaagagggattcgtgcgttgaaaatttaagttaattttttagagaaactgtataactttgcctgaatataacgggtggagtgtgcggattttcggaaattagcttaaagaattcaaccacgggtctttttgtataccttggattgatgccgctgatttccgtaaagctgcatcaattttgctttatggaggtatatttatgtcgaaaattgaactaaaacaactatcttttgcctatgataatcaagaagcgttgctttttgatcaggcaaatatcacgatggataccaattggaaattaggatkgattggccgcaatggccgtgggaaaacaaccttattaagatgttacaaaagcagttggattaccaaggagagattcytcatcaagtcgatttcgtctattttccacaaacagttgcagaagaacaacagctcacttattatgtcttacaagaggtgacttcttttgaacagtggnaattagaacgagaattaacgcttttaaacgttgatcctgangtttatggcgtccctttcttcttnatcaggcggcg

SEQ ID NO: 156 - DNA, 6491 bp; double-stranded, linear
acaataaacgggagggatcgtttatgaatattgaaaaaatgacaaccacgctacaasaggcgattgctgaagctcaaaaagttgcggtgacacgtcaacatcaagaaattgatatcgcacatttatggaaaatttttcttcaaccaaaccattttggacgtaatttttacacagatgctggtttagatgttgacgcatttgaacgagaagtagataacgcgttagatgaatatccaagtgtggcaggcggtaatgtgcaatatggtcaaaatttaagtcaaaatttgttccatttattgcaagaagctgattcacttcgagaagattccaagatgaatttttatcaaccgraattgtacttttagctttaatgraattgaaaaattatcgtttaacmaaatatttaatgcmacmaggcattacggaaaaagagttwagraaaaatattgaagagatgagaggaggagatcgtgtgacttctcaaaaccaggaagaacaatataaagcactagaaaaatacggtgttgacttagtacaacaagtaaaagcaggaaaacaagatccaatcattggtcgtgacgaagaaattcgtgacgttattcggattttatcaagaaaaactaaaaataatccagtcttaattggtgaaccaggtgttggtaaaacagcgattgttgaaggattagcacaacgaatcgttcgtaaagatgttcccgaaaacttaaaagataaaaccattttttctttagatatgggcgccttaattgcgggagcaaaattccgtggcgaatttgaagaacggttaaaagctgttttaaaagaagtgaaaaaaagtgatggcaaaatcattttattcattgatgaaattcataatatcgtcggagctggtaaaacagaaggcagtatggacgccggaaatttattaaaaccgatgctagcacgtggtgaattgcatttaatcggtgccacaacgcttgatgaatatcgccaatatatggaaaaagataaagccttagaacgtcgtttccaaaaagtattagtcaaagaaccaacagtagaagatacaatttctattttgcgtggcttaaaagaacgatttgaaattcaccacggcgtgaatattcatgacaatgctttagttgctgccgctactttatccgatcgctatattactgatcgtttcttaccagataaagcgattgacttagtcgatgaagcaagcgcaacgattcgagtggaaatgaattcgatgccaacagagctcgatcaagtaacacgtcggttaatgcmacyagaaattgaagaagcggccttgaaaaaagaatcagatgatgcaagtaaaaaacggttagccaacttgcaagaagaattagcagatttgcgtgaagaagccaactcaatgaaaatgcaatgggaaacggaaaaagaagaagttaatgcggtttccaataaacgtgcagagattgataaagcaaaacacgaattagaagatgctgaaaataattatgatttagaacgagctgctgttttgcgtcatggaacaattccgcaattagaacatgaattgaaagaattggaagaaaagaacgctaaagataacgtcaaaatggtacaagaatcggttactgaaaacgaaattgcgcaagtggtcggtcgtttaactggcattcctgtgacaaaattagttgaaggcgaacgagaaaaattaatgaaactgaatgaaacattacacaaacgtgtgattggtcaagatgaagccgtcgatgctgttagtgatgcggtgattcgttcaagagcaggcttacaagatccaaatcgcccactcggttcgttccttttcctaggaccaactggtgttggtaaaacagaacttgctaaagctttagctgaagatttgtttgattctgaagatcatatggtacggattgacatgagtgaatacatggaaaaacatgccgtgtctcgtttggttggtgcccctccaggctatgktggttwtgaagaaggtggccagttaacggaagctgttcgtcgraacccttatacaattgtcttattagacgaaattgaaaaagcgcacccagatgtctttaatatcttattacaagttttagatgatggtcgtttgacagattctaaaggtcgggtcgttgattttaaaaatacagttttaattatgacaagtaacatcggctctcagcttttattggaaggtgtgacacctgaaggaacaattccagaagaagttgaaaatcaagtcatgaatattctaaaaggacactttaaaccagagttcttaaacagaattgatgataccattttatttacaccattaagcttggataatgtgaaaggaatcattggtaaaatgaccgcacaacttgctcatcgtttagagcaacaagaaattgtgttggaaatcactgatgaagctaaaacatggattgctgaaaatgggtatgagccagcttatggagctcgtccgttaaaacgtttcattactcgcgaagtcgaaacaccattagcaaaagaaattgtttctggacgagtaatgccaaaaacaaaagtcacgattagtctattagacaatcaattagtttttgaaaatgaaccgatagaagaagtgtaaaaaagaacgagcgaattcgctcgttctttttttattatgacaatcgttgcttaatttcttccaacaaatcctcttctgaagaaacaacccgaccattcaatttaatcaaaccaactgtgtaaaggtttaaataatggaattgattttcagcgatttcgttcaaagcatcaagcttttggtgattatcagcaccttgttggcggctgtctgtgtaaagggcaaccaccgggattcctttggcataagcaacaccaatttctgaagctacgcccgcatcaatggttggtccgtctaataaagcaaccaataagtcgctagcaaggacgttttctgtatctgctaaggcaatcattttgctatcggcataagcagatttgtcgttaatcgccgcattttcttgtggtaaataaagatcgattgttttatccaattgtcgaatttgttcgactaaataggcattataacgtaagtcagcttgcgaaaataaaggtcctgcaaaataaatttttgtcatttgtctgtctccaatccaagggtttagaaataatcactgaaataagcttcttggtcaggaaaaatccgttccaaagaatttaaagtttctttatctgtatcaatacgttcaattcgatgtaagtacgaagggcgtcggtaattcatgactaaacaagttagtgtttgaatatctaagtgaacggcggtgcctagaggttcatccgtaatggtcacttgatcattttcatcccaaattaagccaaaaataccattattccactcagcgacaggatctttaacgacaaaatggaagggcttagctgtactttcaaaaggaaagttttctaaaaaggctttgacatcaacaattcgcgccatataatagggctcaatgctttctttaatttggctgtcttctaaaagaaaggctaatggttcgtttttatagatatcgcccttgacccaataaaccatcgaaaaatgcgcagtaataaaattccacaagccatttcgggcttcttggttcaagtaaaacatttccttaatatgaaatacctcatcggccacccaatagaaaagtactcctaaaggttcttgattggcaccataatagacagcagcagtccgttcttcctcgttttcgaaacgccaatattcttcccagttgaaggcactacgaatgagtgcgccgtgattttgacgagcgaatcgcgcatagacatcaaagacatctgggtgatcgacagctaaccgttcaatcattcctggaacaggaacggtttttggtaattgcgtatcccgaattttaaaagataacttgtcggacataatttcccaacctttacgtcggtaataagggatgttgtaagggaaaagataagaaatccactgtttatcttggcgcatttcttctaatgccgtttgaatcaagtctttcattaaaccgtggttggcatattcaggataggtaccgacaccagtaacgccgcccattttatataaagcgccatggatattgacttcgcatggatagatagcaatttgtgaaattaattgattttcgtgaaaccagccaaatacttttgaaagttctaaaatcggttgttttgatttgataaatgcgcgtttgttttcaaaaccactttcttcaatatctgcttcagtcacttgaaaaacataggaaagaagttcattaaattgatcaatgtgttcytccycaacaggctttaanggtcagttgctttccraaattcytggttccatcccatttttccatctccaataaatttactgtttttagtataccaaatttttcgaaactctgttagcctttcgaaaccaaaagaataaaagggaagtgctttaaatcttcttcaaaaattggtataatgaaaagtgctgattatcctagacctttaaacatgataatttgataaaaaaggcaactaaaatataacaattgattaatgaagctagcagggagctagcttttcttaaaagaaatgaggcaaaaaatgaacaataaagaaatgaaagcaagacaagagaaaattcgtaatttctcgatcattgcccacattgaccatgggaagtcaactttagccgaccggattttggaaaaaacaaatacagttagcagtcgagaaatgcaagatcaattacttgattcaatggatttagagagagaacgcggcattactatcaaattaaacgcaattgaattaaactatacagccaaagatggtgaaatctatactttccatttgattgacacaccagggcacgtcgatttcacctacgaagtttctcgtagcttggcagcttgtgaaggggctgttctagttgttgatgcggcgcaaggaattgaagcgcaaacgctagcaaatgtctatttggcattggataatgacttagaaattttacctgttattaataaaattgatttacccgccgctgatccagagcgtgttcggacagagattgaagacgtaattggaattgatgcatcggaagctgttttagcaagtgcaaaagcagggattgggattgaagatattttagaacaagtggtggagtatgtaccagctccatcaggcgatattgaggctcctttaaaggctttgatttttgactctatttacgatagttatcggggggtcgttttaaacatccgtgtaattgacggtgtcgttcgtcctggggataaaatccaaatgatgagtaacggtaaaacgtttgatgtaacagaagtcggcgttttttcaccgaaaccgattgctcgtgattatttaatggttggtgatgtgggctatatcaccgctagcattaaaacggttcaagatacacgggtcggggatacagtgactttggccgacaatccagcagcagaagcactaccaggctaccgcaaaatgaatccaatggtttattgtggtttatatccaattgatacgtcgcgctacaacgatttacgggaagcattagaaaaattacaattaaatgatgcggcgttacaatttgaaccggaaacatcgcaagctttagggtttggtttccgttgtggtttcttaggtttgctgcacatggatgttgttcaggaacgtttggaacgagaatttaatttagagttaattacaacagcaccgtctgtaatctatcacgttaataaaactgacggaacaaccgttgttgttgacaacccagctgaatttccagaaccagtaacgattgaatctgtggaagaaccttatgttaaagcgcaaatcatggtgccaaacgattatgtaggagcagtaatggaattatcacaacgtaaacgtggcgaattcattacaatggattacttagacgattatcgtgtaaacgtagtttatgaaattccgttatctgaaatcgtgtttgactttttcgataaattgaaatcaagtacaaaaggctatgcatccttagattacgaaatggctggctatcgtaccagccgcctagtgaaaatggatattctattaaatgctgaaaaagtggatgctttaagctttattgttcaccgagatttcgcatttgagcgtggtaaagcgattgttgagaaactgaaaaaactaattccacgtcaacagtttgaagtcccagttcaagcggcgattggtcaaaaaattgtggctcgttcagatattaaagccttacgcaaaaacgtactggctaaatgctatggtggcgatgtttctcgtaaacgtaaattgttagagaaacaaaaagaagggaagaaacggatgaaacaaattggatccgtggaagttcctcaagaagcctttatggcggttctgaaaatggacgaccaagataacgcgaaatagcttgtttccaacggaaa

SEQ ID NO: 157 - DNA, 1014 bp; double-stranded, linear
cctacgaaaaatatggcacaaagaaagttggaaaaatgacaaacttgtcgattttccaactttcttcatctattcgtggttggcttgctgaactgcatccatcacggcataacggaagccatttttttctagagctacgacaccgcgaatcgtacttcctcctggagaagtcacttcatctttcaatgctcctgggtgttttttcgtgtctaaggctaaggtcgccgttccttttatcatttgagcgacaatttcataagataagtctcttggtaacccttctaagactgctgcatctcccaatgcttccataaagatatcaacaaaagctggactgcaaccagccacagtaccaaaagtttccagttgcgcttcacgaatttctttgactaaccctaaagtagcaagaagttccattgccaggtccttcgtttggccttcaattgttggtgccaaggctacgccaatcacgccttgattcacgctaactggtgtattaggaatggcatgaacaactttggcttctttattgccaagagccatttgtgcttcttgtatggtatgacctgttgcaacagaaatcaatagactttcgttggaaaaatgaggggctaattcctgaagaacaggtaacacgacctttgctcctgtcgcaataaaaataaccttacattcttggaaaagtgcataatctgtgacaagttgaaagccccactctttttgaagtgcttctgcggttccacttgatccgcctttcacatataaatgttccttcttgactgcctcagctttcagtaaccctttaatcatggcaccgcccatactgccagcaccgataaagccaattttcatagcattccctccttagttaaataargtgtttgtgkcaaaagtcaattagcttttgacacnaacactaacagtcgkactttttccgtacagctgkttcgttaattaattggtaatccatwacgackgctcaaacgcgcaatttttcagaagtcygaaccaact

SEQ ID NO: 158 - DNA, 16484 bp; double-stranded, linear
ttataaaagacccttccttaaaaagcaatgtttcttccaatcaaaaaaacgaattatctaaaaaatgcaacttatttgctcaaaaaagcaagcgatgattgacaaacggtcgtttttaactgataatgagaatcgttatcaactaaaaataaaggagttacacaatgaaacttttaaaaaagacggtcctaattggtacaacccttcttcttggttcattcttactcgcagcttgtggtaatacgaataaagaagccaacaacgctgacaaaacacatgaagtaacagataccttaggcaataaagtaaccgtccccgcgaaacccaaacggattattgcgagttatttagaagattatctagttgcattaggagaaaaaccagtggcacaatggacagttggacaaggcagcattcaagattatttagcgaaagaattgaaagatgtccccactatttcctatgacttgccatatgaagcggttctaaaatttgaacctgacttattattaatcagttcatctgctctagttgaaggcggtaaatacaaagaatacagtaaaattgcgccaacttatgtagtcaaaaacggcgaaaatgtcacctggcgtgatcaattggaagatattgccactgttttagataaaaaagaacaagcgaaaaaagtgttagaagattatgataccttaaccaaaggcgtccaagaatatcttggcaaaaaagatgctggcaaatctgcggcagtcttatgggtaaccaacaaccaagtctttatggttagcgataatcgctcaagcggaaccgtgctctatcaggacttaggcctccaagttccaaaattagtggaagaaatttctaaaaacgctactgcggattggaatcaagtttctttagaaaaattagctgagcttgacgcagaccacattttccttgtaaacagcgatgaatcagcacctcttttccaagaagcaatttggaagaacttacctgctgtgaaaaataaccaagttcatacctatgataaaaaaagtagttggttatacaacggacctattgcgaatactcaaattgttgaagatgtaaaaaaagcgctcttaaattaaaaaaatgcttggatgaaaataatcatccaagcattttttttaattagcaattgccgtttctaaaccaacttcaatcatttcattaaacgtcgtttggcgttcttctgccgttgtttcttcgcctgtcaccaagctatcactcaccgtcataatcgccaatgcttctacatcaaattttgctgctaaataatataacattgccgcttccatttcaatcgctaataccccgtatcgacctaaacgaaagacatcatctaaactatctttgtaaaaaacatcatctgacaatacgttaccaacatgggtagtaaagccttttgctttagcaatttcgtaagatttgagtaaaagatcaaagctcgcaatttgtggaaaatcatatttaggaaaatcattgcgaatcgcggaagaaggcgtcgctgctgcttgtgcgataactaattcacgaacgttgactttttctgaaatagaaccacacgtaccaacacgaattaacttcttcacatcgtaagagttaattaactcatgggcataaatacctgctgaaggcatccccatccctgttccttggactgaaacacgctgtcccttatacgttcctgtgtaacctaacatcccacgaacttgattatagcagacaggattctctaaaaaagtttccgcaatatattttgctcggaggggatcccctggtagtaaaattttatcggcaatttcacctggttttgcttcgatatgcacactcattctggtttactccttttttataaagctgctagtgttgctttcactaactctttgaattgtcctttaacgcgttcagttgtttcaactacttctgcatgatttaagctactttgcataccagctgctaaattcgtaatacaagagatgcctagtactttcatgccactatgcacagctacaatgacctccgaaacagttgacatgccaactgcatccgcacccatcgtccgtgacattcgaatttctgcaggcgtttcatatgtcgggccagaaaagcccatatacacgccttcttttaaatcaatattttgttccgcagccactttttttgccacttcccgatattcttgcgtgtaagcatgactcatatctggaaaacgcggcccgatttcttcatcattttcaccaattaacggattatcgcctgtaaaattaatgtggtcattgattaacatcaaatttcccggtgtatatgtttcatttacgccaccagctgcgttggttacaatcattgaatgaatgcctaaagcagccatcacacgaacgggataagtgaccgtttgcatcgaatgtccttcataataatgaaaacgcccttgcatcgccaaaactttttttccagaaagcgttccgtaaactaattgtccagcatgtccaacgactgttgaaacagaaaaatggggaatttcagagaaaggaatagcaatcgcatcggttatttcattagctaattcacctaacccagaacctaagattagaccgaagtctgcttgttgcacccctttttctttcaagaactcagttgtttcgtttaaatgattcgttaacgttgtcatgtgttgcctcctcgaattattgtaattgatttaaaaagctttgaccgttttccgttgcaggaacttcaaagttttcagcaatcgttgctgaaatatctgaataaaatccttgtggcaagctgccttgttttgtcatttttttactataagccaataaaggcacatattcacgtgtgtggtctgttcctgggaaagttggatcattcccgtgatctgctgtaattaaaagcaaatcatcttcggccatagctgccataatctctggcaaacgaccatcaaaatcttcgatggcttttgcatagccctttacatcacgacggtgaccatacagcgcatcgaaatccactaagttagtaaaacttaaacctgtgaactctttgttcatgaccgttaataattgatccaccccatccatattgctcttcgtgcggatagcttcagtaattccttgtccattaaagatgtcgttaattttcccaacagcgatcacatcattgccgttttctttcaacgaatctaaaacagtatggccaaaaggatctagagcatagtcatgacggttactggttcgagtgaaattacctggttcaccaacatacgggcgagcgataatccgaccaatcatataaggttcgtctttcgtaatgtcacgaacatattgacaaattttatacaattcttctaatggaataatgtcttcatgcgccgcaatttgtaaaacagggtctgctgaagtataaacgattagatccccagttttcatttgatgttcgccataatcatcaatgactgctgtcccgctatatggtttgttacaaacaacttttcgcccagaaaaatcttcaatttgtttcagtaattcttcaggaaagccgtttgggaatacccgaaaaggttttttgatgttcaagcccataatttcccagtgaccggtcatagtatcttttccaacagaaatttcttctaatttggtagcatagccatcgtggtctgccactgctttgacacctgttaaaggagcaatagttcccaatccaagtttttctaaatgaggaatggttagtcccgcttctttggcaatatgacccagtgtatcactgccgacatctccaaatttttcagcatctggtgcttcaccaataccgactgaatctagtacgattaaatgaacacgtttaaacacacttgcttcctcctctaaggtcgtaaatacgtcaagaatgacaattattttacgctagccttttaaatagtctcgagaatcaaacagaataatctatttattctcagctcttcaattataccatgaatccgctattattgcctgaaagagcattaaaattttcactgattcctttgattttagcagggcttaaaaattgaaagaaaaaaagtctcccaccgtaattaggaaacttttttattgtttttttcgaatagcctgctccttaaaaagaacacgactctttatccaatcgaaacttttaacactccaagcggtctccctcttttggcacatttaaataccagataaccgcttctgataaaatcacaccaatgccaatgggcggataaaaataaataccgatatatccgattgcgaaaagacaaagatgaatgatttttgttgccttactataagatttcgattttcttaacttagctgcaccttgtggatctttcactacattgtcttcataaatgatccttgttagcaagaagtaggcaaaatcccaaaccgtatacacaacaagataaaaataaacaggtgcccgcatccaccaaaattcactcacccaagcagttgctaccggaatgaaggccatggagaataaccaaaaattatttgcccaaaacgcttttttagaaaaccaatgagttacggacattatgtaatgatgattgtaccatgcgatacagataaaaataaaactgacaataaacgataaaaaatatgggatattttctatcaaacctgccaaaacacccacttgaggagttttaatttctaaaatcatgatggtcatgatgatggcaatgactgcatcactaaatgcttctacgcgtgttttattcattgaacgtcctccacttttcctatgcttactacaaacaaaagtatagcagaaaaaccaacgatttttgaaaaaaagctgctagacctgtttggtttttttcaaaatttcaacacttccttcgaattgtaaagaacagctaaaagaaaamagaaaagttacctttatcaactcgcttttttacagtgaggcagtgcctaatgccgcttgtgttcaactgattatcctaagaaaagaaatggccccccgtcgctttgacggagggcctatttcttttcttatttcgttttgacgtaatttttcccgttcgcttttggtcccgatgattttccgaagaacacaactaggactaaaatggttaatacgtatggtgctgcttgtagataaacttttggaatttctgaaataattggtaggttttccccagcaatacttaagttttgtgcaaagccaaagaataaggctgcgcccattgccccaagtggattccatttaccaaagatcattgcggccattgaaataaacccttgtcctgcaattgtggtaatcccaaaacgacccgcaatactttgagcaaagacagctccgcccataccgcctaagaagccggatagtaagacaccagaataacgcattaagtagacattaattcccaatgtatctgccgcttgtggatgttcccccacagaacgtaaccgtaagccaaaacgtgttttataaatgacaaaccaagctaaaatcgcaatcaaaattgctacgaaagctggcaaagaggtttttgcaaagaatagttcaccaatcactggaatttttgacaatcctgggaaagaaaaataaccaaatgattgtgtaatcatatctgtttgtcctttttgataaataacttttactaggaaaacccctagcgccggtgccatcaagttaatgacagtaccactgataatatgatctgctcgtaagttaatagttgcaacggcatgtaagagagaaaagacaatcccgacaacgcctcctactaaacaagcaatccatggtgtcgccgcgccaaatgtatcagcaaacgtcaagttaaaaacgaccgaactgaaagcacccattaccataataccttccaaaccaacgttaaccacaccacttcgttctgagaacgttccgcctaatgctgtcaagatgagcggagttgcatacactaatgtttgcgtgatgattgaggaaattgttgctaaatccattagatgtctcccccctcttgattgtttttgtctggcgccgcttcaattgtttctacaatcgctacttcttttttactaccagacgcttttgctaacaagaaacgaattaaataactaattcccacaaagaaaataatcgctgcaataacaacatcaactaattcggttggtacaccagctatcaacggcatcccttgtccaccaagttttaacatcccgaacagtaatgcggaaagtaaaatcccgattgagctacctgctcctaatagagacacggccataccatcgaacccaatgctcaacgatgtgttttgaataaagaagttttggaaagttcccaatccttggaccgcaccacctaagccagctagcgttcctgaaatcatcatggataaaataatcgttcgcttgctgctcattccagcatattcagaagcaaatgggtttaaccccaccgaccgaatttcaaaaccaagcgttgtttttttcatcaagaaccacacaagaataaggaaaatgaaggccaagaaaatgccgatgttcaaacgagagccatcactgatacttgttaaaaacggtgagcgtaatgatgcattcgcaccaatcattttggtgatccctttgttcgccataatacttggtttcatgacattattagcaatatgatttcctgtgtataataaaatataattcaacataatcgtaacaataacttcactcgtcccaaaataggcacgcaagaaacctggaatggctgctgctaaagctcctgcaactgccccaacaataatcgccaccggcaacgcaatcatccggggtgcatcaggcatggataaagcgacccaaatactagccacccaaccacataaggcttgtccagaaagcccgatattaaagaatccagccgaattagccaccgagaatcctaaagcggtaaaaatcaacggtgctgcggtgacaaaaatctcaccaatacttttctttccttggaaagctgtttcaaacatcgcttgatacccagccactgggtcatagccaaagataaccataataattgcccctaagaggaaacccataataacagataacacagggactaaaatatttcttattttttcagaacgattattcaacagtttcacctgcctctacttttgataactcagcacgggcttcttccaatgagtagccagccattaacaagcccaattcattttctgtcgtttctttcggatcaacaattccgacaatttcccccgcatgaataacagcgatacgatcagaaacgtttaaaatttcatctaattcaaaacttactaataaaacagctttatttttatctctttgttcaattagtcgacgatgaatgtattcaatagctccgacatctaaaccgcgtgttggttgagaaacaatcaacaaatctggatcgcggtccacttctcgggcaataatcgctttttgctgattcccacctgaaagcgcccgagctggtactaattcattaggagtccgtacatcatattcttcaattaattcacgggcatgtttgttaatcattcgatagtttaaaatacctgttgaactgtatggtttttggtaatacgtttgtaggccaatattttcagccaatgtcatctctaataccaagccatatttatgtcggtcttcaggaacgtgggcgacacccatttccgtaatttcccgaggtttgcgattagtaatctctttttcattcaaatgaatggacccgttttcgactttggttaatcctgctaaggcttggattaattctgtttgtccattgccatcaatccccgcaattccaacaacttcccctgctcggacatctaagctaagatttttcactgcatctaagccgcggctttctttcactactaaatctttaattgataaaattgtttctttcggttgcgctggttttttctctgttttgaaggaaacagaacgacccaccatcatatcggctaactgttgcgaagaaacgtctttcacattgacggtgccaatactttgcccccggcgaataaccgtacaacggtccgccacttttttaatttcatctaacttatgtgtaattaaaatgatcgatttgccttcatcggttagttctttcaaaataatcattaattcatcaatttcttgtggcgttaatactgcggttggttcgtcaaaaattaaaacgttcgcaccacgatataaggtctttaaaatttcaacccgttgttgcatacccacagaaatatcgcgaatataggcattgggatttacatccaacccgtattgcttagacacttcttcaatctcttttttcgcttttttccggtctaaaataccgccatgggtaggttcactacctaagataatattttcagtcacagtaaaggcttcaactaacataaaatgctgatggaccattccgattcctaaacgattggctgcagtaggacttgtaatgttgactttttcgccattcatataaatctcacctgaggtcggttccaatagccctgataagatattcatcaaggtcgacttgcctgcaccattttcacctagcagtgcgtggatttcaccaggttttacttgtaaatcaatttggtcgttggctttgaacgtcccaaattctttggtgattttacgcatctcaattacgttttcttcttgagacaaggtctattcacttcctaacaaaattatattggcaatactttagagggtaattttgacccttaactaagtagttgaagaacttcaactatttagttaaaaatccaaacatcataaagggttcccttggcagccgtcgctgccaaggaccactttatttttagaaggaacaataatgagcccttcttttttcatttaggagcttaaattattctggtttttctgggacttttacgtcacctgagattactttatcttttgctgttttaacagcttcttttgttttgtcgtttaaatagccgtctgttaagtcaacgccaccatcttttaatccataaactaaatgttcgccaccagggaatttgtcttctaacgcacggttggcaatatcttgaaccgctgtgccgacacctttaagcgttgaagttaacgtgaagttgtcttctttgccgtcttttgttttgtacttgccatcagcatcttgatcgcggtcaacgccgattacccaaactttgtcgccagaacctgattcattcaagtcttttgcttcttggaagaccccttgtccagtcgcaccagaagcatggaagatgatatcaacgccgttttggtacattgcagcagctaaagctttccctttggcaggatcagcaaatgaagccgcatatttcgtatcaacagtaatttctttacctaattctttcgcagcatcagccacacctttttcaaaaccagcttggaaacggtcaattacgaccccttcttcaccaccaacaaaaccgactttgttcgtttttgtttcatttgcagcagcaacaccggctaagtaagctgcttcattatctctaaatgttgcagaaacgacattctttttgccatcgatttgatcatcgattaaaacaaagtttgtatcagggttggcatctgctgcagaagaaattgcatcttttagcaagtagccaataccaaagattgtgttgaatttacttgataccgcttggtcaatattggttgtatagtcagctgcatcattcgattgaatatatgcatacccttttgaaccttctggtaaatcatgttctttaccccaagcttgcaatccttcccaagaagattggttgaacgacttgtcatccacgccgcctgtatctgtaatgattacagcactatgcgctgcatcccctttgccaccgccgctttcagcggttttgcctttgccaccaccacatgctgcaagtgaaactgataaacctaatgcaatcaaactaaaaccgaataattttgcttttttcatttctgtaaagcctcctaaaaatagtttaatgtatttaaacaactaagttgtttctaaggttggtctgggacttttacgtcaccagagatgatttgttctttggcttctttaactgccgttttggcttgatcgcttagggcttctgttgttaaatcaacaccgccatctttcaatccataagttaaatgttcgccgccagggaatttatcttctaatgcaagatcagagatttttttcacagcaatatttacacctttaatggttgaagctaacgttaagttatcatccttgccatctttggttgtatatttaccgtcttcgttttggtcacggtcaacaccaatcacccaaactttatcttttgaacctgtttcatttagcgctttggcttcttggaagattccttgtcctgtagtcgccgctgcgtgataaataatgtcggcacctgcttgatacatagaagaagctaaggcccgtccttttgaagcgtctgcaaatgtccctgcataagtagacgtaatttgaatatctttgcctaattttttgccagcgtctgctacacctttttcaaaaccagcttggaaacggccaataacaggtccttcaaccccgccgataaatcctactttgttggttttcgtagtgttagctgctgccacacctgctaaatacgcagattcattatctctaaatgttgcagaagcgacgttgtttttcccattaactgtatcgtcgattagaacgaaattcgtttctgggttggcgtccgctgcatctactactgcattttttagtaaatagccaatgccaaaaatcgttttaaattgacttgaaatggcttggtcaatgtttgatgtataatcagatgcttcatttgattgaatatacgcgtacccttgaggtccttctggaagtttgtgctctttgccccactcttgcattccttcccacgcagattggttaaaagatttgtcatcaatgccggctgtatctgtgaccattacgacactatgttgtggatcaccttttgtgttggcgttctttttgctattgccgccacatgcagctaacccaatggttaaggcaactgctgccaatcctagacctaaaaattttgcttgtttcactttccgaaaagccccctactattttatctattatttcattcgcatttatgctattgaaatctactttgagcccaacgaaaccttatgtcctttttttaaaaatctttatctgtaaatgaatagggcaataatgcctcaactgtcattgttttagtcgcgccatctttaccaactagcgtgaccggcatttgtggatcaaagaattcagccattacttgacgacaagcgccacatggagaaatgggtgcctctgtattacctgctacaactaaatgttggaaggtccgttcatcttctgaaatggctttaaaaatcgccgttctttctgcacaatttgttaaaccaaaggaggcattttcaatgttgactccttgatacattttcccgtctgcagtcactaagcaagcgcccacaggaaaattagaatacggtacataggcgtgtgccaatgcttctacggcacaatcaagccattcttgttttactgtcatctttttcgccacaccttcgtttaatttgaaatacgaattaatacccttcgccagttgcgccagaaacaattgctacacccgtacttgcaccgatgcgtgttgcccccgcttcaatcattgctaacgcttcttctgcattatgcacgccaccagaagccttaacgcccatgtcaggaccaactgtctcacgcattaaacgaatgtctgctactttagcgccgcctgttgagaagccagtagatgttttaacgaaatcggcacctgcttctttggctaattcacaagctttaactttttcttcgtctgttaataatgctgtttcaataatcactttgactaacgcttttcctttggctgcatctactacgccttgaatgtcttgacgtacgtaatcgtattgttgtgattttaatgcaccaatattaatcaccatatccacttcattcgcaccatttttaatcgcatcagctgcttcgtatgctttaacttctggtgtatttgcccccaaaggaaagccaataacggtacacacagcgacgtcggtatctgctaattgctcgctagcaaaagcgacccaacaaggattgatacatacagagaaaaagttgtactccttagcttcgtcaataattttttggacagcggcttctgtcgcttctggtttcaaaatagtgtggtcaatcatgcggtttaattccatgatgagaattcctcttttctttttgttttattccgtaataatatcgtgaatcaaaataggctcttcgccggttggtccaatttcaatgtttttataaagcaattgttcgacttctgtcacgtcttcacgattggcataaatggttagtaatgattcgcctttttcaactgggctccctacttttttgtgaagtttcaagccaactgcaaaatcaatcgtatcttctttcgtagcacgaccagcgcccagcaacattgcggcaacgccaatttcattggcaacgattttttgtaccacgcctgtttctttggcaggtaaatcaaattgataagttgcggttaataatttttctggctggtcaacaacggaactgtcgccgccttgattttcaatcatttctttaaattttgcgagcgctcgaccgcttgttaatgcttcttctaataaagcccgtgcttcgtctaacgtctcggcttttttagctaaaacgaccatctgacttcctaagacataacacatctccactaaatcttctggcccatttccttgcaaggtctcgattgcttcaacgatttctaaactatttccgatggcctcccctaaaggttgtgacatgtctgaaattactgccatcgtttggcgatttgccagttttccaatgcgaaccattgtttccgctaatcgacgagcacttgctaggtctttcataaaggccccttcaccagtagtcacatctaagacaatcgcatctgcccntgcggcaatttttttactcataatggaacttgcaattaatggaattgagtcaacagtggcggtcacatcgcgtaacgcataaagttttttgtctgctggtgctagatcacctgactgaccaattactgccacttttgtatcgttcaccaattgaataaaacgttcttctgtcaattcaactttaaaaccaggaatcgcttctaatttatccaacgtaccgcccgtgtagcctaagccacgaccagacatttttgctacattgaccccgacactagcaactaacggcgctaaaataagcgtcgtagtgtcgcctacgccacctgtagaatgcttgtcgactttgattccttctatagaagaaagatccacaatttcgcctgaatggaccattgctaacgtcatttgtgtaatttcttcgtctgtcatatcttggtaaaaaacagccattaaaaaggcacttacctgataatctggaattgaaccmtctgtgtatccgttgataataaattgaatttcttcgcttgttagttgatgcccgtcacgtttcttttcaataatgtctaccattctcatgaattctttccctccgatttcccgataatgtattatacaacaaaatcgttcagctttaaaccatttagtaaaccagtttactattatttttttcttgtgaaaacgcaaacaacacgaacattctatttctaagctgttttttaaatcggttttgtgctttttctagcaataaacgtcgcatcgaaaactttatttggaactttccctgttggatctgcaatagcttccaccaaaaattttgctgcataatagccaatatcaaaactcggctgatagacagttgttaaactcggcaccaaatattcggaaatttccaagccatcaaaaccaaccaccgaaatatcgtcaggaattttcttgcccgcttcttcaatggcttgataggcccccatcgccatttcatcattgccacaaaaaattgctgtgatttcttcatttttcaaaacttctttcgccgcagcatagccgccatgcaagttcaattccccagcacaaacataatgcggacgaaaaggtaaattattgtcctgtaacgcatgctgatacgccgtcactcgttccgtcaaacgataatagccggcactttcacgcaacatgccaatatgctgatgcccttgttgaatcaaatgatggaccgcttgataagcaccttcgtactctttaacgattaatcgtccactatctcgtggattaatcccacgatcgacaagaatgacaggaatcggatgttctcgtcggtcttttaaaatatgattttctggcaaaacattcggcgtggcaaaaataatgccatccaccgaccgatgaatcaactcgctaacatattgcatcgcttgctcggaatcatgctttgaattgcataacaaaatcatgtagcctaacgaatttaaatatgtttctacaccttcaatcacttttgagaaaaagaaatccgtcacatctggcacaatcataccaatggttttggaatgacggttgattacattcgaagcaaagtaatctggtttgtaatgattttcagcgactaccgccaacaccttgttgcgggttttttcactgaaacgactccctttattattcagaatttgtgagacggttgtgacagaaacaccagccatatcagcaatttctttaatcgttagtttcatcgcgcccctcccaacgtctccttttgcattgacagacatttgtagacgtgttacagtcttcaaaatacttatcgaatcttttacattttaacaaaaaaaagacaaaagaaatagactaaaaagattaaaaaacaaaagaaaatggaggctatttttttcatggaagaatcccgtgtccgtcaattaccaaaaatcgagctgcactgtcacttagatgggtcgattcgaccaaccactttacgcaccattgctgaaaaacaaaacattccattaccccaagacgaacaagccttgaaagagttagtggttgcccctgaaaaatgcaccgatttgaatgattatttaactcggttcgacttcgtgctcacctgtctacaaacagctgaggctttgcaagcagcggcgtatgacgtgattagccaagctgccgaagatggcgtggcttacatagaggtgcgttttgcgccttcccaacatacagaaaaaggcttacggttacctgaaatcgtgactgctgttttaactggcttaaaacaaggcgaagaagattttggtgtaaaaagcaatgcactgttatgcggcatgcggcatgaccaacaacaagccatagaaaaaatcgttcacttagcgcatgatttcagagagacaggcgttgtcggctttgatttagctggcaatgaagtcgatttccctccatacacatttgaagacgtattagctttagccaaccaattgtcaattccattaacactccacgctggggaatgcggctgtggcaaaaatgtcgctgatgctgtcactttaggtgctactcggattggtcacggtattgctttgaaagatacacccgaatatttggcgctcttaaaagaaaaaaaggttcttttagaaatgtgtccaactagcaacttccaaacaggaaccgtcaaaacattggctgaatacccttttcaacaatttatagaggctggcttagccgtctgcatcaataccgataatcgaactgtttcagatactacgttaacgaaagaattcatgaaattggccacttggtatcaattaagttatgacgaaatgaagcaactcactaaaaatgcgcttgcaggtgcttttttatcgccagacgaaaaaaaactgttgaaccaaaaaattgatcaagcgtatctattctaaaaaagaacgccactaaagtggcggttcttttttactctgcttctttaacattcgtaaaatataatagcctttgtcttttgtcacaatttcaacattgccaaatacttcagccattttcttttctgcactaggtgcaccttgtttcttttgaataaccaccgttagtgtgccaccaactttcaacaacggaagagcccctgttaaaatgccatggacaacttttttgcctgcacgaatgggcgggttgctaacaatcgccgcgtaggtcgtttcgtttaaggtttcatacacattggaagaatggatatccacagtagtaatttggttacgttgggcgttcatttgagctagcccaactgcccgttggttgacatccaccatttccaccagtcgaccagtcgccgctgctaaggacaacccaattggtccatagccacaaccaacatctaacaaacggcctgctggtaaattttcccattcaaaggcatcaatcaacacacgagaaccataatccactgttcctcttgagaagacccng

SEQ ID NO: 159 - DNA, 8160 bp; double-stranded, linear
ccgagtagtaccagagaggmantccatgttwaaaacattacttctttmcaatctagttacagtaatatgaaattttgttgaagtgtttttaattcgccagaaaaaaaggtatacttgttataatracaaaactaaaaaattacatttacatataagttaaaaaaggaaagttggggacgtatcaatgaagaaagaatcaatgtcacgtatcgaaagaaggaaagcacaacaaagaaagaaaacgccagtacaatggaagaagagcactactttattcagctcggcgttaattgtttcatctgtaggaacgcccgttgcgttactaccagtgactgctgaggcaacagaagagcagccaacaaatgcggaagttgcccaagcacctactacggaaactggcttagtagagacaccaacaacagaaactacgccaggaactacggaacaaccgacaacggattcgtcaacaacgactgaatcgacaactgaatcatcaaaagaaacaccaacaacaccaagtaccgagcaaccaacagctgattcaactacacctgtggaatcaggaacgactgattcttcagtagcagaaattacgccagtagctccttcagcaaccgagtctgaagcagcgcctgcggttacacccgatgatgaagtaaaagtaccagaagctagagtagcttctgcgcaaactttttcagcgttatcaccgacgcaaagtccttcagaatttattgccgagttagctcgttgtgcacaacctattgcgcaagccaatgatttatatgcatcagtgatgatggctcaagcaatcgttgaaagtggttggggagcaagtacgctatctaaggcaccaaactataacttatttgggattaaaggcagctacaatggacaatctgtctatatggatacatgggaatatttaaacggcaaatggttagtgaaaaaagaacctttccgtaaatatccttcttacatggaatcattccaagataatgcgcacgtgctaaaaacaacttctttccaagcgggcgtttactattatgctggggcttggaaaagcaatacaagctcgtaccgcgatgcaactgcttggttaacaggtcgttatgcgacagatcctagctacaatgctaaattaaataatgtcattaccgcatataacttaactcaatatgatacaccatcttctggtggaaatactgggggcggaacagttaatccaggaacaggcggctcgaacaatcaatcaggaacgaacacgtactatactgtaaaatcaggagataccttgaataaaattgccgcscaatatggygtgagcgttgctaatttacgctcatggaayggcatctctggcgatttaattttcgttggtcaaaaactyatcgtgaaaaaaggtgcttcaggtaacactggtggctcaggcagcggtggttctaacaataatcaatcaggaacgaayacgtactayacttaaatcaggsgataccttgaayaaaattgccgcccaatatggcgtgagygttgctaatttacgctcatggaatggcatytctggcgatttaatyttcgytggtcaaaaaattatygtgaaaaaaggtacttcaggtaacaccggtggctcaagcaatggtggttctaacaataatcaatcaggaacgaatacgtactacacgattaaatcgggcgataccttgaacaaaatttctgcacaattcggtgttagtgtggctaacttacaagcctggaataacatcagcggtagtttgatttttgctggtcaaaagattatcgtgaaaaaaggcgccaactcaggttcaacgaatacgaacaagcctacgaataatggtggcggtgcgacaacatcctacacgattaaatcaggtgatacgctgaataaaatttctgcacagtttggcgtgagtgttgctaatctacgttcatggaacgggatcaaaggcgatttaatttttgctggtcaaacaatcatcgtgaaaaaaggcgcttctgcaggtggcaatgcttcttcaacaaatagtgcatcaggcaaacgccatacagttaaaagcggtgattcactttggggcttatcaatgcaatacggaatcagcatccaaaaaatcaaacaattaaatggcttaagcggggatacaatttatattggtcaaactttaaaagttggttaatttaagattgaaaaaaatagctatctttggtaacatgagttttataatagaaaaaaacaatgagaaggaatagtagaaagaaccatgtgatagagagcgtatggctggtggaaatacgtacagaagcttttgaactcgcctttaagttacttttttgaacaaaccaagtaggaaaagtcggtgacgatcgttaagacgtttgaggttaaggtgacggtgactgaccgtttctttgacgaatttaggtggtaccacgttgcatttgtatgttcacgtcctataggaatttttcctataggacttttttttatcactaagtggctagtttaagtcagaatagtgacaatggctgcaggtggcaaattttaagaatgaaaaattttatattactaggaggaataacatgagctacaatcacaaagagattgagaaaaaatggcaaaaatattgggctaagaacaattgtttcaatacattggacgacccaaataaagaaaaattttatgcactagatatgtttccctatccatctggacaaggcttacacgtaggtcacccggaaggctatacagcaaccgatattctttcacgtatgaaacgtgcgcaaggctataatgtgttgcatccaatgggctgggatgcgtttggtttgccagcagagcaatatgcgttagatacaggaaatgacccagctgaatttactaagaaaaatatcgaaacattccgtcgccaaattaattcactaggattcagctatgattggaatcgtgaaattaataccactgatcctgaatattacaaatggacacaatggatatttacaaaattatatgaaaaagggttagcttatgaagcagaagttgcggttaactgggtccctgaattaggaactgttatttcaaatgaagaagtcattgatggaaaaagtgaacgtggcggttatgatgtggttcgccgaccaatgcgtcaatggatgctgaaaattactgcttatgcagatcgcttattagaagatttagagcttgttgattggccagagagtattaaagatatgcaacgaaattggattggacgttctgaaggagccaatgtgacctttaaagtcgctggcacagaagaaagtttcacggtgtttacaacccgtcctgataccttgtttggtgcaacctatactgttctagctcctgaactagaactagtgaaaaaaattacgacacctgaacaaacagcagctgtagaagcatatattgaagaaacctcaaaaaaatctgatttaaatagaacggatttagcaaaagaaaaaacaggtgttttcacaggtgcgtatgctataaatccagtcaatggccaagaaattccaatttggattggcgattatgttttagcaagctatggcacaggcgcaatcatggcggtcccagcacatgatgaacgggattacgaatttgcgaaaacatttggcattgatatcctaccagtaatcgcaggtggcgacattacaacagaagcctatacaggggatggaccgcatatcaattctgatttcttaaatggattaaacaaagcagaagccatcgctaaaatgaatgagtggctagaagaaaatcacgtagggaaaaaagaagtatcttatcgtttacgtgactggttattctctcgtcaacgctactggggtgaaccaattcctgtgatccattgggaagatggaacaaccacaacggttcctgaatctgagttacctctacgtttaccagtaacatcggatattcgcccaagtggaactggggaatcgccattagcaaacattgatgaatgggtcaatgtcgtcgaccctgaaactggcatgaagggaaaacgtgaaacgaatactatgccacaatgggctggaagctcttggtattacttacgattcattgatcctcataataaaaatgaaattgctgattttgaaaaattaaaacgttggttaccagttgatatctatattggtggtgccgaacatgcggtgctgcatttactttatgctcgtttttggcataaattcttatatgatattggtgtggttcctaccaaagaacctttccaaaaattatacaaccaaggtatgattttaggagaaaacaacgaaaaaatgtctaaatcacgtggcaatgttgtaaatcccgatgatgtggtggctaaatatggtgcggatacgttacgtctttatgaaatgttcatgggcccattagatgcttccattgcttggaatgaaaatggattagaaggaagtcgtaaattcttagatcgcgtttggcgtctgattgttgatgaagaaggcaaaatgcgtgaccgaattaccacaattaatgatggccgtttaacgaaagtttatcatcaaacggttaaaaaagtgacagaagatatggcaaacttgcactttaatacagcgatttctcaattaatggtttttgtgaatgaagccaataaagtggatgccttaccttatgaatatgtggaaggatttgtccaattacttgcgccaatcgcgccacatattggtgaagaactatggcaaattttaggtaacgaggaaagtttaacttatgtcccttggccaacctatgatgaaacggccttagtagaagatgaagtggaagtagttttccaagtgaacggaaaattacgtggcaaacaaaatgtcgctcgtgggttaagcaaagaagaattagaacaaattgcaatgaaccatgaagctgttaaagaatttattgaaggaaaaacagtgcgcaaagtgattgctgttccagataaattagtaaatattgttgcaaattaagtttacatgtttttattaaaaaaagagccggacgtatcaaaacgtcaggctctttttaaggttgttttgttttacctttttgattcatatgttctttacatgtgattgttatgactgaaagcaaggcgatgaagagaaaaaagtaaccaagcggcgtacagaaaaaggcgggttcttttaaaagtccatcgctagataatgttgatccaactaaaatagagatcataaataataaaagactaatcaagccaagaaataagctaatacgatattttttcaacttcagttcctcctttaatgaactatcactaagataaatcaaaaaggttaacttttttttaggcaactgttaaaacttagataagaaatctattttctaagtttgtcgttgttggtaattggttaagatcatacgtgaaaagggaccgacaatcagcaattgataaggaagggcaacaataaagttcaggccccaagcttggaaatacgcacttagtgacaacgtctggccttccattaataagccaaataaagacatacaagtcaccatgctgataatcatgagactcgaaatggtcagaataagtaatagccgtttttctttattaaagggtaaagaaaaagcgattttcttagctaagacaccaacgatgaaaacatctaaaataaaagcaacgataaatccaggaagcaaaccttttgataaggcgtacaatgaaaattctccatgcaataataaattataggtgctcattccgaaaaccatcagaaagcacattaacgtagtaaaaagcattccttcttttttattagtaggcatttttttctcctttcatttattgagagtaatgattgttctaggcagaaaaggacaaattctctcgacttttactagtgtagcaaaaataaaagttcttcataagttagaatttgctaagaatttgattcaaataaaaaggtgtactaagtcagcagtacacctttttattcgttatttagtttatttttgtgttatttgtaacgtcctctccaaaccatttttgagaaattttactaagggtgccatcttttcgtaacgtttcaaaggcagtattgattttttggactaattgattgtctgatttgcggacgcccacagcaaaatcttcattgtcatagcctacatgagaaatagtatagttttttaaattatcttcgtgggaaagatagtagttggcgtaaacgcgatcgattaggagtccgtcaattcgaccagattttaaatctaagaaagcttcattaaagccgtcatataaaataggtgtttggtctttaacaaattttttcaaaacgtcaggctgactttcgaagccatcatagccagaagagccgttttgaacccctaaaattttgccttgcatgtcgctcgctgttgcaatgtttttttcttttaaagaaacaagtacttggtcgttcgtcatgtaaggttgtgtgaattgaactttttcggcccgctcgctcgttttagtgtagccgttccaaataagatcaatggtttgattttgtaattctgtttctttcatagaccaatcaatcggttggaagtcaacggaaatgccataaagtttaaaaaccgctttggctaagtcgacatcaaagccgacaattttgcctgatttatcttgaaaacccatgggcacaaaggagtcatctaagccaataataatccgtttttcttcgttaatccgtgtccattgatcttcgttgctttttcttttaccacaacctgcaaataggagtaaactacaacagataaccagcaaggctaaagaatatttctttttcatcataaactcctttctattggacgggggcaaccgtcaaaagattgtctgcaattttttcagcgaaagccatatcgtgggtcacgacaatctgtgtcatgccttgtttccgtaaatctaaaataacttcttccacttgttggcgtaaagctggatctagcgcgctcgttggttcatcgtacccaagaacttttggcttcattgctaaggcacgagcaagtgcaactcgttgtttttgtccaccggaaagttggtacggatagagtttttctttaccagccaagcccaatttttccagtaattctaaagcttcttgctgactttttgctttttcttcttttagtactaatgtaggtgctaaggtaatgttttctaaaactgataagtgagggaaaagttggaaatcctggaaaacgaccccaaccacttgatcggcattgtccatttcagcaggattgaaaggaacaccatccaacaaaagctcaccagaatcaatggtttctaaaccagccaaacaacgaagtaaagtggtttttccgccgcctgaaggaccaacaatcgttaaaattttaccatctggaatttctaaatttaagtgatcaataatggtccggttgtcaaaatgtttggttaaatttttaatagttaacatggtagagtcctcctatttataatattgatagaatttttcaattttcttagaagcaacagtcaaaattgccgtaaagagtaaataaatcactcccactaaagctaatggcactaatgtaacatcgcggctcatcgcaattttaccagcacgtaaaagatcgcctaagccaagaacataaataagagaagtatccttgaccaaattgataatttcatttcntacggaaggcagcacgattttaacaacttgtggcaaaataatccgcgtgactgtttgaaaacgtgttaaacgtaaaaccttagcagcttcatattgaccttggggaattgcttgaatccccccgcggaaaatttcagcaaagtacgcagcataatttaaaataaatgcgaataaggccgcatcgtaacgttcaaagacaataccaattaatggtaagccgtaaaaaacaaaaattaattgtaacaatagcggagtgccgcgcattaaccaaatgtagaggttaattaagtaacgtaaaggtttaaacgaactttgtaaaataaaggcaatgatgatccccagtggaatcgagccaaggagcgtaaagaaaaagamtttcagtgtcatgccagtccgctaactaaagcaggtaaaatttctaaaatataatccatcattttttcctccaacaatttt

SEQ ID NO: 160 - DNA, 6253 bp; double-stranded, linear
cancccaaatttntagcttgattctgcagcttttgataacatttggtcaatttttggtaatccattaaatcaactaactgaccttgttttaacatgkkrstaaagtctaaatcccaaagcatttctttagtcggctgttgcaataaataatacatagaatgactactaataatttcagtggtcggttcttcaattgtttcataaaaagtcacaaaatattctcgctcaatcacagtaataatttcttcttctgaaagctcacaatcttctaaattttgatagaatatcaataatttaatccgttcatctattttattcagcgaancgactaattcaggaaaaagaaccgactgacaattttctactaattctcttgccttattttgttcatttttataaaagttgtataactttttccgctgttttaacgagtttagtaagttatcgggtatattccagtaatattgtttcttcatagcattcccactcttcttttttatgtacaattttacaaaattggtcttagccaatttcgtctctagttattctatcaaaaaagtgatgcttttttactgacaataattactcgttttacgcccaaaaagtgaaaatctagctgttaagtaattattggggcttgttyccctagggccgaaaaaactttttccttttaaaagtccagaaaaagacctacactagagatagacaaacgttggagggatttaaatggatttacacttaacgaataaattagcattaattactggttcaaccaaaggaattggcaaagcaattgcgattgaaatggctcgtgaagggaccgatgtcattatcaatgggcgcaatgaagccgaagtaactaaagttgttaaagaaatacaaacaatgtttccagacactcatcctcaagcagggactgccgatatttccattgaaagtcaacgagctactttgcttgaaaaattccctaaagtcgacattttagtgaacaatatggggatttttgagccaatggaatactgggacatcgatgacgccacttgggaaaaattttttactgtgaacgtgttgtcaggcaatgcattagcaaaagcttatctacctaaaatgcttgcacaagattttggtcgcattattttcatcgctagcgaagaagcggtgatgccttctggcgaaatgccccaatatagcatgacaaaaacgatgaatctttccttagctaaaagtttatccaacttaactgttggcacacatgtcaccgttaacacggttatgcctggctcaacccttaccgaagtgtagaaaaaatgttggaagatatgtacgctgattcagacattcccaaagaggattgggaaaaagatttcatgaaaaatcatcgttctcgttcacaaatccaacggctcattcgaccagaagaaattggtcgttttgttacctttgtggccagcccagattcttcttctttctcaggagaagccttaagaatcgatggcggcttagttccaacaatcttctaaaataaacaaaaaagacagccagcaaaaattcacatttttngctggctgtcntnttargcatattaattgattacttmccaaaagtaagttatatttatctcgaattcgaawtaaaaagaggtgaamcaatgaaccaacagcaagaagctttaaaagcctatatcggtttattaagaaccagccatcgactagagcaacttgccaagcaagatgtcacttgttatgacttaaacattacagaattttcagtattagagctgttactccataaaggtcctcagaccatccaaaaaattaaggagaaaattttaatcgctagcagtagcaccacttatgttattgaccaattacataaaaaaggctatgtaacgcgcacccccagtgaaaaagaccgacgcattacttacgttgaattaacagaagctggaaaaacattaattgaagaaattttcccgacgcatgcaaagcgaattgcagaagcatttgaacaactctcttccgaagaattaacacttcttcaaaaaactttacgaaaaataacaaatgaaacgaaatgaggaaataatgatgaaaaaagaagatcaattattaggaatccaccacgttacagctatgacaagtgatgcagaaaaaaactatcacttctttacagatgttttagggatgcgtttagtcaaaaaaacagttaatcaagatgatatctatacttaccatacctattttgctgatgatttgggtacaccaggtacaaccatgacctttttcgattttcccaataaccctaaaggattaaaaggaaccaatacaatttcaagaacagggttccgggttccttcagatgcagctttgacttattatgaaaatcgcttcaatgaatttgctgtcaaacacacaggcatttctgaagaattcgggaaaaaagtccttcgcttttgggattttgatgatcaagcgtatcaattaatctctgatgaattaaatcagggcgttgcagcgggcaccccttggaaaaaaggacctgttccaacagaatttgcgatttatggcttaggacctgtcgaaatagctatttcctattttcatgaattcaaagaagtctttgaagaaattctaggctttcacgtagtggcacaagaaggcaatcgctatttactagaagttggacaaggtggcaatggtgcccaagtcgttttggtagacgatgatactagctcacaagcgcaacaaggatatggtgaagtacatcacgttgcattccgcctagcggatcgtaaatcacttgggacttggcaagcgctctttgatcatttaggcttacaaaactctggctatgtcgatcgttattattttgaatcattgtatgttcgcattgggcatattttagtcgaattagccaccgatgaaccaggatttatgggggatgaaccttacgaaacattaggagaaaagttatctcttgcgccatttttagaaaaccgtcgtgaatatattgagagtgtgatcaagcctttcaatacaaaacgagcctaaggaggaaaaaacatgcattcaatttttaaaaaaggacatcctgaagcacctgtctttgtgctacttcacggtacaggtggtgatgaaacatctctcctaccaattgcccaagaactaaataaacaagctactgtgctaagtattcgtggtgatgtttcagaaaatggaatgaatcgttattttaagcgcctagcggaaggtcattatgacttagaagatctagaaaaacgcggcgaggcgcttcataagtttattcaacaagccgctaacgagcatcaattttcattggataaaattatttttattggctattcaaatggggccaatatcgctattcaattattgcttactcatcccgacagctaccatcaagctgtcctctatcatcccatgtttcctgttgaattgaccaatcaaccagacttgaccgacacttctgttttattatctctaggagagcatgacccgattgtcccacttcctgagagtatgcgtgtgattcaactatttcagaatcatggagcaaccgtacaagaggtttggacacaaagtcatcaattaacttatcaagaaattaaggaaacacaaacttggttggcacatctgtcctcttaacaaaaaagtgggtcctaagtcatttcgacttaggacccactttttctattttaagataattcactgtctgagcttctttttattctgccatttgaacaactattttaccaactgcatggtgcgtttcactgagtgcatgtgcatcataaatcccttgtctagaaaaagggaaaacttcaccaataattgatttaacttttccagctgccatcaaatcagcaattttttgtaattgttctccatttggttgaagccaaatactttcagcagaaatatttttttcggctgccaattgtttatcttcaattcccacaattgaaacaagacgaccggtgtttggttttaagacggcaaaactatttttttgaacctcaccacccattgtatcaaagactaaatcaacatcagttaatacctctgcaaaattcgttgtatgataatcaatcacttcatctgcaccaatttttttcagtaaggtatgattttttgcgctacggtcgtgatgacatgtgcgcccgcttcttttgctagttgaatcgcataagtaccgaccccacctgcacccgcatgaattaaaacaatttctccttctttaaggtgaccatgatcaaacaatgcttgccaagcggttaaaccagccaacggaacggcagccgcttcttcaaagctaattgtttcagggatttttgctaataaatgatcatccacaatcgttacttctgcataggtaccaaaacgagtagtttcaggacgagaaaaaactttatcgccaacttgccaatccgttacttgactccccacctctgtaatcacaccagcgacatcccaaccaagaataatcggaaaggaccaatcaaacatctgttttaaatatccttcacgcaatttccaatcaatcggattaattgatgtcgcgtattcttttaccaacacttgatgttccgataattctggcagtgttacttctgcttcttcaagtacctctttacttccgtactgattaatcacaacagctttcataaaccaacttcctctcatttgtttcatttttcacacttttagtatacgncctattgccttctttttatataagaatatgctttagttaaattgagagaaagtagctgtttttagtctattattcataacgtaaagattcaattggatctaattttggctgtcttcgagctggtaaagttcctgctaaaaaagcaataaacataataactaagataatcgttagtgaagatggcaatgaaaattgaattaatttaaatcctgttaaagcctttaaaaaagaatccgttgccaaacgattaactaaatttccaaccccaacagctcctaaaatgcctaatattgagccaaaaaagccaattaaagccgcctcaacactaaaaattgtaaagactttcccattgctaagacccatggctttcattaaaccaatttctcgcgttctttcttggacagacatatacagcgtgttaataatgccaaagcttgcagctaacaaggcaattgcaccaaacatggttaagacaccagtgattgcattgattatattacgaatcatgccaatttcatcttcgacagtagtcgctaaatagccagctttgtctaaatcttttttgatgtccttaatctgctctggcgtgctgtcttttttaacttcagcaataatcatcgcgtattgattttttaaatgttctggaagatctgcttgattgattgagacaactttatcaatcaatgctttattcatcagcgagagcccattttgaatgacactggcatttctaacgccaacaatttttgcttcaataacttgctcttgtcctttcaaggaacttgagatacctaattgaactgtttcccccacggcagctttactagatgtatagccgagcgcttttacatattctggtgacaaattaatttcgaagtcctggctcgtttgcgaaactttacggccagccgctaaatcaatggtcatctcatctagcgcagaagttgctgaaaatacatatttatgcttatctgctccttttatataatcgatagcaacggatttcattggttccactgatgtaacatccgagatttttttaatcttctcaatatctttttcagcaagcatactttgttgttgaatcgtactggtttttttctctggattatatttacttggttctgttccgttaccaacattcatctccatttttggctgaataaataactgatttgcaccaccgacactgccgacttgtttgtcaatataatcatttacaccaatattgactcctgtagttaaagctatggtaaatgctccaataaagattgcaataatggtcaatacggttcgacctttattacgcattaaattggtactagctgattttaaaatatctctaaatttcatttactcatctcctcctacaatcaagccgtctcgaacatgaacttgccgatcacaacgtgctgctaagtctggatcatgtgtcacaataattaaggtaatcctttatttttatttaaaycaaataacaattcttcaattttcttcccagtggcagaatctaaattcc

SEQ ID NO: 161 - DNA, 3312 bp; double-stranded, linear
tgtggcaacttaaaaaagaacaaaatgttcccatttatcgcagtattatggagatgattgttcaaaagattcaaacaggcgaattattaccaggcgaaaaaatcccttcggaacgtaaactggcagagtacttgtctgncaatcgttcaaccgttgttcatgcattagacgaactggtggacttaggctggattgtgcgaaaaagagggagtggangtntgtcaacgaaggaaaatggggggtaatgatgacgccacgaacggattggcatcgttatttagaacaaaatgtgttcaaacaagttcatcccttggtgacagagattgagttacgtgctaaacaaaatttgccgactgacttagatatgtatacaggcgagttgccgttagacttaattcccagtttcgattttccagcattaaattggaaacaatttttaaaagaggaagcacaagatgaattaggttatttgccgttaagaaaagaaatccaagccattacagcaacggaatatcagcttcatttaccaagtgaaagtttattgcttacttcaggtgcgcaacaagcactttttttagttttacaagttttattgagacaaggagatagtgttgccgtagaagatccatctttcttctatgccttaccaattttccaagctgctggtgtgcgcttatttggtgtgcccatgacagaggaagggattgatcttgaagcgctagaacaaacaattcgacaacatcgcatcaaaatggttatggttaatccttcctttcaaaatccgactgggacagtgatgcctttgagaaaaagagaacagcttgtgaaagtctgtcaaacgtatcaagttcctattttagaagatgatgtttttgggcagttaagttttatcccgaaaacagaaattcctcctttaaaaaaattagatccagataatgtcttgtatatcggttcgttgtcaaaaattttaggttcgaccacgaaaattggttggttaagtgcgcccgcctccgtgacgaaacaaattgcagaagccagaaaaatgatggatgtttcgttgagtatttttccacagatgctcgctaaaatggcgattgaagatccttctttctctgaaaaaattacgttattaaataaacaagtggaacaacgagcaacagctgtatatcaagtatttaaatcgttgtcagaatgggaagtttcgccagtaaaaggcggcttttatttatgggcacattggcgtcaaggggcacttaagccagaagattggcaagtgtttttacgagaaggtgttttggtagcaccaagtgtagcttttagtgaaaaacgtggaagtattcgcttgaactgttcccgaatttcaccagaagaaatgcctcttttttgtgagcgaatggtacggattacacgacagctttctgaaaatagacaaacaaaaatagaacagtaagtaagatttttcttataaaaatcatttgctgagagaaaacgctacaacttcccttttctaaacgaatatccaatgctatacttaaaaagtaaaaacaaaaaaacaaatgaggtgttttccatgtcttgggaacaagtttaccaacaatggttagatgaagaaaatattccagaaaatttaaaaaatgaattaaaggacttaaatacagaccctgaaaaatgtgaagatgcattttacgcaccattagaatttgggactgccgggatgcgtgggattttaggcgccggtattaatcggatgaatatctttacggttcgtcaagcaacagaaggacttgcacgttttatggatacgcaagatcctgaaacaaaacgtcgcggtgtagctattgcctatgattcacgtcatatgtctccagaatttgcaatggaagcagctaaaacattagctaaacatgatattccttcttttgtgtttgaaagcttacgaccaacaccagaattatcttttgcggtccgctactttaaagcttttgcgggaatcatgattacggcttctcacaatccagctgcctataatggctacaaagtctatggtgaagacggtggtcaaatgccgccagctgatgcagatgcattaactaaatatgttcgtagtatcgaaaatcctttgaaaattgatgtcttatcagatgaagaagttgcccacagcggtttaattaacattgttggtgaagaagtcgataacgcgtatttgaaagaaattaaaacagttacgattaatcaagaattaattaacgaaatgggtaaagaattaaaattagtttacactcccttacatggaactgggaaaatgttaggagaaaaggcattaaaacaagccggttttgaaaaatttgttttagtacctgagcaagccgttgctgatcctgactttactacagttaagtcaccaaaccctgaagaacattcagcttttgaatacgcgattcgtttaggggaaaaagaaggcgctgatttattgattgcaacagatccagatgctgatcgtttaggtgctgctgtgcggatgccaaacggagactaccaagtattaacaggaaatcaattaggttcaattatgattcattatattttagaagcccatcaacaagcaggcacgttacctcaaaatgctgcggttctaaaatcaatcgtttctagtgaacttgctacagcgattgctgagaaatgtaatacgaagatgtttaatgttttaacaggtttcaaatttattgctgaaaaaattcaacaatacgaagaagaccacagtcaaacgtttatgtttggttttgaagaaagttatggttacttagtgaaaccttttgttcgtgataaagatgcaattcaagcgttagttttattagcagaagtagcggctttctataaaaaacaaggaaaaacattatacgatggtttacaagatatctttgaagaatttggttactttgaagaaaaaactatttccgtaacaatgagcggaattgaaggcagcggtaaaatcaaagctttaatggcaaaatgtcgtgaacaagcgccaactgagtttgccgggattcaagttgctcaaacggaagattttaaagaattaacacgcacttttgcagatggtcaaacagracaattacaaacgcctccttctgatgtgttgaaatatcatttagaagatggcagttggattgctatccgaccatcaggaacagaaccaaaaattaaattctatctagcgacaaaagcaacaagtagttcagaagcttctgaaaaaattgctgcgtttgaagcngtcgttaatgaattaacaaaataaaataaacgaaacaagct

SEQ ID NO: 162 - DNA, 14286 bp; double-stranded, linear
tatcttcgtgaaattcaagaagacttagcaacccttcctgaaaataccttagagattcagatccatcacggaaaaatttcattacatacgacttccaatgattttctttcccactattttktattatttaattattactgkgtccatyctactgacttcatyctttttcmagcaattatcaaaaaagraaacmattctgtctggaaagtgagtcmagraactaattttagctcatcttacatttacaacggttaaataacattaataaactatttggtttgtatggaatttccgtccatttttccccctccgcgagtaaagtgattacaggttctgaatttcaagtcctatatgcttttcttgatgtctactggaccatctttttaaataccttagccttaccacgttatacctctacttattttgaagatatactgacgcagcatattaaaccagaaattcttgaacgcttggaacacgcttctctactaaaattaaatttacttttacacatcgcaaaatatcgctttccatatacttgtgaagatgatctccaaaaagaatttgaagaacatccttatttaaggcttttctcagactcaaaacaaactattttttgttcccaatcaaatttttcagaagatcaacagcgggttgtagatatcattgcacccattgccattgataattttgattcagcaaaacgagccaaagatttactggctgctctaaatgaaatttcttgcccagaatatttctacgttgattctttattaaccaatttttgcgaagtttttcaaattccaaaaatgcgtgaatttgatcgtcattacttcttacttattttatttaaaaatattatctataaccaattatttatttcacagcaaccaaataccgcaattctagattttttagtcaataaaaatagtacttatcaaaaagatttacagaaaaaaatctatgctttttatcaaaacttttcagcgcattccccttatcagttaagatttaaggatcaggagaacccaatttggacatgtgaattgttgttacgaatttataagcactatagtccccccaaaaaaattaaaattggtgttgcatattctcgcgatttttacattgctagctttattatgatgaaaatcaagcaagcatttagtgaggatattatttttgaacgaaccgatttttctggttgtgatattgtgattactgactatcccttatttgatttaccaaaagaaatagaccgaatttacattttagaagaagaattaacccgagaagattgggaactaattttcagtaaaataagtatcgccatttttgatttgcaatattaaaacaaacatcaagcgccaacctgtctcaccagccataatgaaaacaagcgacctacaaaccacttctgccagttttagtctgacagaaaatagtttgtaggtcgcttgtatattactgttcttttctatgttaccttcaaagacaatctagtaacgtacttcagtccttaaagtgctactgttccaccgctgatcagtttttaagcctgagacgargatccaaagtgttttttgtctcaggctcttacattttttccaacaaaggtattgctaggcgctacttgaagctgaaaactagtttctctatcgagattcctcatcagtagactcaaatttaaaacttttttctataaaagtgacttcttttgcgtatgtttttacaaaagaagaatagtctttgggatctttgaccttttccaattggtcaacagagacttctaattcaaatcctgtcccatctttaaagagataatattttgagatgtctgtatatccttgattccgttttaaaatatagccggtttgtacatcagcaattttatcaattgggtatgctttgataaactctttacttgtatccaaataatcagaaagactgttgacaagattgccagaaaggtacatacctgccgatgtataatagtctcttttttcataaaaactgatattgcctagatattttgtatctggatactcctctgtagaaggtaaaattaaaaagttctttccgccactggtttcaatatcggcatcgccgataatttctatttggtagccttgattaaataaaagtttattttcttctattgtgacttttagtggtttttctaaatcaacaggtccagttgtggtaagtccagcttcttttaaaggataaacatcttctgatgaagcggagtaatcccaataatcatctttctccgcaagatcaatatatactataaagccaattgctacagcaatgcctatccaaataatttttttgttctttttttgttttttcttttttttcgtctgtggttttaccacttttttattggggttaggaagttgctttgctgtatctgttcttgtgacaggaaaaaacgaccattttggcttttgaaaaagcgcatcatatgkatcataaaaattcttttgtttagccattttttctctccactaatttttttgataaggcaatttcctcagatgcttcggagactaatctttcataatcatctgtgatactttccgacaacactcgtatggtacttaagataccattggttgcaagtgttatttcwtctgttgacaatttatcttctttaatgcttaaaaaccgttctgatgctcgtaaaatctctggtaccttatgatataaaaaatcactaaaatgagtaattgcttcaggatacttcactaagtgtttaaagatgcctttagcggaagcaacacccagttttacttgttcaattttttttaaatttcgtgacttattcgttagttcgtttaaataaataatttgtttttttaattcgtccataattctttggtacatctctaggtcactgtccgttagatggtgcgtcgtttgatatttttttagattttttttataacggaaatacgtacgaccatttctataagtaacccaaccaatgtacccagtccccactaacaaaaccattatcccattcaaatcatgtactcctttttaaattagtatatattactgaataacacactgtccagcttaaaattgacaaataagtatgaaatgttactcccccaattacttgtgcacttttattgtatcatataggaaaattgttctgttccgcatttggacaaattgtctaaatgtctaagggaatctttttttgtttaatatgtagcaaaaaacacttgcaagaattgattacttctcacaagcgttttttattgtctaaaacaactatttacatttcattttattaaatagtgaataaataaattactgcagctaatgaagcacctaagataggtcccacaattggcacccaagaataagcccaatcggaatcaccttttgttttcacaggaataatttggtgcgctaaacgaggtcctaaatcacgtgcagggttaattgcataacctgtaggtccgcctaatgatagacctagtcctaagaccaaaatcccaacaagcattgggttaatgccagccgctaagtcgttttgagaaaaggctagtaaaccaaaaaccaagacaaatgtgccgataatttctgttaaaacattggctggatagttacggacagctggaccagtggcgaaggttcctaaaatagcacctttgtcttctgtaatgttccaatggggtaaataagctaaccagacaactaaaccaccaataaaaccgcctaggacttgagctacgatataaggtaaaaccatgccccattcaaagtttccagtaattgccatcgcaactgttacagcaggatttaaatgcgctggactcatatacccagacatgtaaacagctaatgtaacagcagcgccccaacctaaagcaataacgacccaaccagaagcaaaggctttgcttttcttcaagttaactgcggcacagacgccatcccctagtaaaactaaaatcatcgttccgaaaaattcaccgaataattgtgtcatcatcgaagttcccattttttcttcaccctactttcaaattttttaaatctgattcttcaattactttttctaatgtttcaatgtgtcgtgctctttcttccgctgtccactgataatgctgtgccatttcttcaatgactcccgctttcacttggtccaaacgatcacgcataaataataagtggttggtccgtcgcaataaaaagtcgacgggtgttaaagccatttcttcttccatcgcatagtttaaagagacagtttctgttaaggttaaaccaggaattactttggcatcatcaatcatttcaaaaacagttggtacgttggagccatataaatgagctaagtatagtgcatccttttcacttaaccctttagacacgccatgttttgccaacgcttctaattcttcgtctaccgttgcagggttcaattttccgcctgaaactggatagtttttagaatcaattaaggtgaattctttctggtattcttctgctaagatggtttgaatcattttcatcgcaccttctgccattttacgataatctgttaatttcccaccagccaaagtgagcaagccatccgctgatctttccaatgagctgcctcgagagacagctgaaggattgactttattttccaccaaactgtcttccagatggtttaggacttcttcaatttctcgtttatctgtttgatttttttggtatctgtcaacgacatcaatgacttcatcaatacttttatctgaaagtttgccattgtttcccccattataatctgagccaccgttagcagaaattaaaggtcgtaagccagcccagctggcttcaatatcatcaattgtcaattgtacctctggataacgattattgactacttccaataggtaatccacatcactttgttctactgttggatgttgaaagtctccatggtaatctgtatccgtcgtcccaaaatatgttttttcttctcttggaacaacgaagaccatgcggccatcttgtttacctgtatcaaaatacgttggttgaggaacatttaaacggcttttgtcgacaactaaatgaacccctttggttggacgcatttgtggtgtaaatgaatcgtttttgtctaagcctcttaatttatctgaccaaggaccagtagtattaatcacaacatctgcgtgaatctcaaactgttcgtcagttagtaggtcctttgcttgaatgccagtaattttcccttcatcattgtataaaaagcccaccgcttgaacccgactcacagcatgcgccccgtcagctactgcttgtttaatattttcaataactaaacgagcatcattatttcggtaatctaaataaacaccgccaccttgtaaaccttcactttttagttgtggctcacgtgccaaaacctcgtcttttgttaacagatagttggcgtacttggtacctgttacatcagctaactgatcatataaatccattgctattttgacagaaaatagattaaatgttgcatttggctcatcataaatcggcaataacatgggatccgctttagggatgtgtggcgcaatggattgaacgacggctcgttctttcactgtatctgctaccacctccacgtcaaacgttttcaaatagcggataccaccatgaactaatttggttgatcgtgaagaggtgccctctgcgaaatcctgcatttcaattaaccctgtcttcattttagcggcactggcttgcagggcaacccctgcgccagtaatgccaccaccaataattaagacatctaagtgttgtgtttttaaagcgtcgattgattgtcggcgtgtttctattgagaaagtcatagaaaattccccttttccatttacttatttttacgtttgaattgttgggtagctgctactgcttgttgccaaccttcatataaatcttctcgttcttcttccgccataattggttcaaattgttgtccttcttcttggaatgctttgatttcttctaagtctttccagaagccaaccgctaagcccgccaagaaagctgcgcctaaggccgttgtttctaagttatgggctctttgaacagcagtgtttaaaatatctgcttggaattgcatcaagaaatcattgtttgctgctccaccgtctacttttaagacgggaatatctatgcctgtatcttctttcatcgtgtcaataatgtcacgaacttgatacgcaactgcttgaagtgtcgctttgacaaaatcttctctcgtggtaccgcgtgttaatccaaagacagccccacgcgcttgtgaatcccaatatggtgcgcccaaaccagtgaatgccggaaccacataaacttcattgtgccctgttgacgctttggctactgcttcagattcagcagccgtttgcaacatttttaagccatctcgtaaccattgaatcgctgaaccagccacgaagatacttccttccaaggcataatatactttgccgttaatgccatagccaatagtggtaagcagattatttttagaaagttgaggttcttcgccagtgttcatgacaataaatgagcctgttccataggtatttttaaccatcccaggttcaaaggccatttgaccaaataaggcggcttgttggtcaccagccatcccagcgataggaacttcacttccgtaaaaatggtaattttttgttaatccatacacttcagagttcgaaacgactttcggtaacatcactcgtgggatatttaaaagatccaaaatttcttgatcccaatctaaatcatggatattaaacaacatcgtccgacttgcatttgaataatcagtgacatgagtatctcccgttaatttccaaacgagccaagtgtcaattgtcccaaacatcaattctccattttctgcacgttcttgcgcaccttctacgtgatctaagatccaacgaaccttcgttgctgagaaataagcatcaatgattaacccagttttttcatgaatcatttcgctgtagccatcttcttttagttgatcagcaataggtgtcgtttggcgtgattgccaaacaattgcgttataaatgggtaacccagttgctttgtcccaaacaacggttgtttcccgttggtttgtaatcccaattccggcaatatctgtaggtttcactcctgactcaattaaagaacctgcaataacggattgaacagaattccaaatttcattggcattatgttccacccagcctgcattaggaaaatattgagtaaattccttttgtgaactaccaattttgtttccttttttatcaaaaataattgcacgagaactagtcgttccttgatcaatcgccataatgtatttttcttctgccatgataattcctcctaaacgtttttgaaatcgttttctttatgtccctatcttacaaataaaagaataactaaacatgtcaaaaactttttttattttaaaaaaattgaaaggatttctactaaaaccaacaaagacaacgctttcaataatacttttattatctctaatttttcaataaaaagaaacatttttgtttaaaaaagcctaattttcgacttttaattgtaaaaaggctggtgcgaggatcagacaatttccgtcacaccaaccttttgtttatttctcccgcaaggtgcgtattttcttttttaattgttgcacatcataggtcgaacttaattctgacaaaacatagacttccggtgttccttgatagctcgtttgctgataattggtcacaattaaatcatatgtttgttcaggctgatacctctccaccagcgtgccattcatatttttaagactaagcattaatacttgtgttaacgccgcttgataaagagcatccattgctaaatgaattccaatttttatttcaccaatcattttaaattcaattaatgccaacacgcttaaatatttgaccagagaaagttcatgcaaactatctcctggttgatacgtttcatcaaaacaagctaaagctttttctaataacgttgttgaaaaagaagctaattcccgactagataattgctgttctttttcccagatatgggcccgatcaaagacttccaattctcctttaaaaaaatacagttttccatgaatttgtgaaaaatagtaagccatggttttctcaagagtaggttcaaatttatggggccgataatacaagaccacattttccaagataaacgtatcagctaaagaaacagcggaacgacgtccccgaattaaggaatattcatcaaaagctgattctggtaagaccgacattgtgattagaaaaacaaaatgaatcatgctttctccttcgtctaattctaatgaatagcgactagaaaaacggaaaaacaattgtcggacttgcttaaataacggatcttctttaaaatcaatcattttctttctcaattgttgatatttttttgaagtgaccgctaggcgctttttcgtaatactcaaccaaaggctaacttttaacgcattatgttcattaaaagtaaaacctaagccagtctcaatcccttcaattatccgtttatttaacggcgacatcgtttttttctggtgtatttcatagggagtaatataccaatacaactgaaagtaaaagtaacgaatctgcaattcttctccctgtagttgtccattttttatttgcaaatcaaagacggctaacaattgattgagttccttaatctttcgaaataaagaagactcactaatcataaatttagtcgttaattgaacaatagaaaactctttattacgatataaataatctaaaagttgaaatttaagagactcttttacaaatgcttcaattaaatgattcaacgaaaaaaaatccgataaggtgattgatagctgttggccatcataagtaagctgacaatcctgtccaaaaggtttcaaaaaataatgtaaatcctctaagtctttttcaaaggaggcttttgtgaccgctaaaaatgctgttaaatcagagactgagcaggtgccgcctgctaagatggtttgttgtaccgttaataattgtcgcatcgctttcttttctaataatgtctcaactttcatcgttctctctccaataagccgaagcacccatcaaatttgtaatatcataaatattggttaaggaaggttgataaaaataatctttttgtaataggtctgtcagtgtctgacctgtttggatacttaatgctaaagtatttattttttctaaacaattgttttttgaacaaagctgtgcaccaaggacccgttgcgtcactttatcatagattaatttgcctaaaatttctgtcccatgttgtagaggcggcgctggctgtctaacaattatggaagcaagtgtttgcggaaaaaataaaccttccgtttcggttagacctgtactagcaaggtaatagtcccccacttttgttcccattgttcgcaaagagccaatgaatcggtgtgttttttcttctaaattgttggcgactactaagccagttcgtaccgcattgttcactaacggagcataaaaagtttccgcgactggttcattcataactgaaatgcaatcaccgatggcaaaaacattcggcactgaagtttgtaaataagcatccaccgcgattgtctgatccagattccgttgaatttttttatccaaataggctaattgaggatgtaagtttaaagcaaaaatcccactgtcacaagaaatttcctgctcgcttgtttcaagaacaataccatttgctgtttcttcaattcctaggaccgtttcttcaaaatggaaaattactgcttgtttttccaaagatttttgaacttctgcgaccatttctttatcaaaatatttaggcaatagattttccaagctttcaaagacatggaccgttttcttcattttcacaagaaaatcaatagcttccattccaatgggtcctgcaccaatgacggctactgtctggctattttccagtaatggaacagccgctaaagcacctgataaaaatttatatttgagtagtttttctgtttgactaccacgaatttgcgtggaaaactggctcgcgcctgtcgctaaaatcaatttatcataagaataccactgttgctcttcctttcgtgtccaagcaatcaattggttctcaacatccattgccacaacttctctatttaaaagcaactgaatcttttgacgacgtaattcctcttccgttatgtaacgtgcttcgtgtaattcattgatggtatgattaaaatacgcacttaagccaccagataaataccccactgttgcttgtttatcaattaaagaaatttctgcttggggatattttttccttgaagcaattgctgcggaaatacctgcgaatgatgcaccaataatcacaattttcatttgtgtcctcctctgtcaggacctactatacttctctcagtttatcatgattaaaaagaatgctaaagcaacaactatagttttcccttaaaataattatttttgctgagcgcattgcttttcaagcactttcattttcatttataataaatgttactactgtttgaggaggagttttcatgtctgcaacaaaagagcaattggaactatttttattttatttatctgaaacccatacaaaaagtttatctttacatgacttagttacaagtcgaccacgcccagaagaagcgcgtattttattaaatattaacgaggttttcacttactatcatagcgctcgtgttctctacacaagtgttcctgctcttgaaaacaacaagtctgagcctttttttcaagccttcgaaaatttttattttgaattaaaacaacattttttcaatgaagaagatgaaaccaatcaattgaatgaacgtctagaggaaatgaaaattgcctttgaacaattgacggatgactacaatgttctataatagaagagaacaattcgttgagaaggggtccttatgaagcaagaagaagtgattgaacgtttaaaagaagaactaaatttgccattttttaatggtatgctagaagaaaagaactattctgaagcagattatcaacaaatcaagaaagagttaattcaatactttgatgattatgtgcgaaatgttgaaaattaacaagctaaaacaacctttgattttaataaaatcaaaggttgttttattattaaataaaaaaaataacaaaaaaaccaccggcagttttgccgatggaaaaggagtatttactcaataagagtaaaatgaaaaataaaaaggttgttgttggtatgaattaataatacaatacactttctcttttgtccataaaaaagacatgaaaaaaatattaaattcgttagttatttttattagttttttattttttcaaaagaatgttgctcatccgcgtaatggcaaaggttaattcatccgttgcttgatcctgcttttcctctgaagcattaaataaatctgcatcaatacctgtttctggatctgttgctaaaatcatttcattgcatcctgctacatattctgtataagcatgttgaaattttttgtgaatgccaagtacttgtggcgtcggttttaatgttccgacttttttgagcattaattcatatttttcagtaccttctttaaattttgcttgaatttctgcaattcgttcggctgttaaatcattcactttattcttatcgatcgcttgacgaacttcttcgtaatatggatycatgacttcgccaatgycttctgtkgttttaacgatatcattaattgttkgaacgtaaaatcttaaatttggtctcataaccatccctcttttcccttttctctttcactccattttacactttttctattccatctgacaagtggcactttttcagtcttcattcttttcattcttaacagagaaaacatagtgaggcatcgttttgccacggtatgttttaatgtatcgatccctaacaagcatctggtttcgaatagcgacattcatagaggctaagttcgtatcacgaatcgttgaaataacttctggaaaatttaatacatcgaatgcgtactgttttgtcgctgcggcagcttcaatcgcataccctttgtgccattctttcacacataaatgataaccaatttctggatagctcttaccttttactaattgattggtgagaccacactcgccgatgacttcgcctgttcgcttcttctctaacgcccataagccgtagccgtattcttgataggactgtaagttccactttagccagtttgcgacctcttcatcagaaaaagcgtgttcataggcatacatcacattttcatcttgcaaaaattttttcaattccacttcatcttccgactgccattctctgacaataagtcgttgtgtttcgaaaataattttccgtttcaagccctttcactccttacataaagaaaaattgactggtttaagtaccagccaattttcttttcttatttattaagcacctttacctgctttacgttggaagaacttcacaatttccacaattgggatgatagcaaaagaagtacctgctacaattgcccattgatatgcatctaaatgtgtgacgctgaataaatcattaaatcctggaataacaatcgttgcagctaatagcaagaacgaaacaagaatcccatagttaaatgatttgttgcggaataagccaactttgaaaattgattgataaatcgacttcacattaaaggcatggaacaattgaattaatcccaaagtagcgaaggccatggttaaagcatcgccgtgttgtaaatcatacaacgcttgcgccgataagtttgtgttagctgcggtatgtgctgggaacataattgacattttgtacacaatcaaagtcaatgccccttgcgtaatcccttgataaacaacactgcttaaaacgccgccagagaagaagttcgattttttaccacgaggttcatggctcatcacatcacgttctgctggttccacacctaacgcaatcgctgggaaagtatccgttactaagttaatccacaataagtgaacaggtaacaaggtatcccaattgagcattgttgcaataaacaaggttaatacttcccctaagttagctgaaagtaaatattgaatcgttttttggatatttgagaagactttacgtccttcttctactgccacaataattgttgaaaagttatcatcggcaaggaccatatctgaagcaccttttgatacttctgttccggtaattcccataccaatcccgatgtcagcagcttttaaggctggggcatcatttacgccatcaccagtcatcgcaaccacttttccttcttgttgccacgctttaacaatccgaaccttgtgttctggtgaaacacgagcatagacagagtagtgtcccacgacttgtgcgaatttttcatctgacaattcatttaattcagcgcctgtaatgactgcatcgtcgtcgccttctttgatgatgcctaaacgtgccgcaattgcttctgctgtatcacggtggtcacccgtaatcataattggacgaatacccgcttctttcgcgacttttacagcatctgcagcttcttttctttctgggtcaatcataccgactaaaccagcaaatgttaaatctttttccacaagttcagaactcatttcggctggaatcgtctcaacatatttataagccattcctaaaacacgtaaggcttgtttcgctaatgaggtgttggttttcaaaatttcttgacgttttgtttcatctaatggacttgtttctccatttgataagatttccgtacaacgtttcaataattcatctggtgcacctttgacagaaactaggaagccacctgtttttaattcatgaacagtagtcattaatttacgatcagagtcaaaaggaatctctgccacacgaggttcagctgctactttttcggttacgttaaacgcatgatctaaaccaaattgtactaaggcagtttctgttgggtcaccaattaatgaaccatcttgagcgatttttgtatcattcgtaaagttcatgatttttaaagccatattatcggcagggatttctgtggaagcagataaaacttgaccatctgtatacaacgcttcaacggtcatttgatttaaggttaacgtacctgttttatctgaacagataatgtctgtacttcctaatgtttcaacggctggt

SEQ ID NO: 163 - DNA, 6723 bp; double-stranded, linear
caatgctcatttccactcntcctaaatctgttattgccagtagttttgctctaacttttctaaataatgkgaatagtatccatgctgtcgaacctcaaattcttttaagtaatctaatggaatactcytacgttctaagtttttttgcatatttaaataatcatcaacatccactaaaaatacttgatgacttttgttgaattgaattaataaaaatgctgttccaccgcttaatttaaaancctttaaaaaatttttttggtgatcttttaacattggtttatttccaacataaaatggaaatgcagttttattttcagtagatttgcaatcgaaggcgattggccgtcccttcaaatgtccgataaaatcacatcctgtcttgttagttggaatcactacgggttttccaccaacccttatagttttagttccattaggtatttttgctactgtgccttttctgttacgacaataccactcgttggtttgttcaatcattttttcaaactgactccacgctttcatcacagcacctctctcttaatttccctctggatttaaccagttatgcattgtaacttttggtattgaatcgacagaaatctcctcttgatcatttcgcatattgtattcactaattttttttatagcttgattttttgtctttattcccttacgttcccagcttaacaatatgcggtccatatactttagactgaatgcctgattaagaactgcctctttaagggctaattgaataaggtcatctggataaccatcttctgtttgccactgtttaatcatttccatttcgataggcgaaagtggtctcccaaaattttgttcgacggcagcgtatatatttaatttatttttatctgtttctggtgaaaaagaattatttgtgtttatgttttgtttatgtttaattaatgtgccactgttcgttgactgcgttgtactctttagtgtcactttatcgttactctgttgtgtactctcttgcgcactatttaacgtataaagtacgcataccttgtaagaagtagcttttcgaccattacttttaaaatcaatcaaacctagttgctttaacgcgnttctatttttattaattcctgagcgtgacaaacctgacaaagattctaatgttgcattagctgctgtaaaccatgtagcccatcctgctttgttgtttatggacattaatgcacgccataaagcaatctgacctgatgaaagcttttgtttataaagcaaataatcgtcaaacgcaagaatctgttgtaaataattcaatgtcacacctccactctctatgcaataattatttttttattggttatcttttctatttcttctttaaatttttctggatcactattcttgtcgcttaaatggatgagatatatttcttctgtttttgttaaatcagttgactgaaaaaactttttgcaggcatctatgctcatatgcgttcttaaaattcgatcttgaacactttttggcagtttgctctgtcttactaacttgatatcatgattacactcaacgagccaatgagtgacgtctttaaacgttttaggtaaatagttagtatctgtagcaaatactattttctttccactaggtgaaagaataagaaagcccagtggttctctcgcccgtgcctttttgtcatcgtgaatagtggcaaaaggtttaactaaccaatcaccaattttctgttgctggttagcttttaaaatatgtgaccgtctatttatacctaatccttctaaagttcctcgtgaagcccacacatcaaatcttccagcgagtaaaatatcattgatatactttgagtggtcaccatgttcatgtgttacaagtaaaccttgaatatttgaaaaattaataccttgtttcataatatctttaggctttaatcctgcttctaacattaaggaagagtttccatctgcaagtaaataattattacctgcagatgaagaaccttgtatattaatttcaatcattaaaagccacgtccatctgtttcgctagcaatatttgtggttaattcatcaaaaaacgctgtctgggttggttcgttttctatttcttgattcgttgttgctttttgaatcggctcttctggttcgatgatagtctcatctgctgcagtttctttatcgagttttactgcttcttgtttgacttctgttggttcttcatcaaaatcgaacacttcttgtgctgtttgctcagtgacatcttttctaacagatttaaccacttcatcatcttgcgactgatactgcattgcgacataggcgttttcaaaatttttaggaattttcttaacaatgktgtttctcattttacgaacaatcatggattctctactttgtggagatttccatgcgggactaatataagtctggtactcttcgctatccaagatgtcatctaaagacattgttttcaaattgttcatgatttcttgctttttattttcgatttctgttctctgactctgagttgctttgaatttattttcagctagtccaaacgtctcattcatcaaattttggttgatgtgggcaattaagtttttaacaacgtctgcacgctctgaaatatggaactcaacagatccgtctgtcatttcaactggataaacaactctaaccacttttccttttccagtgggtccccactctggatcagtcacagacagccctttgtatccagggtacgaaaaatggtcctcttcccgaacttcccaatgtcgatgaacatgcgccacatttcgtccgaactttgaaagaatggcgtcattaccatctccttcaattcccatttcaatctgtttaatccaaacatctttcggcttgcccgtgtttggatcattcacttttcttttaacatttcgggtttgaaaatatacttcgcgaggaatcgccgatgcattcacttgtaatgctgcgatggtcattagcgtttctgttatattcgttgaatctacatcattaattgacaaactggcatttgtaagcattgtattaattgcttgaawtgagctgattacgcattgtttttgatattcattcatattaattccgttgcttacaagctgcgattcaacttgtggtaaaaacgtatcgttgattttagttaatctattctcgaaaattttattttttgcaatttcattggtcatcaatatctattcctttctctgtcaaagcagccatccatacttttttaatttcgtcgggacaatgactcatagcatctttccaagttggccatcttccgtttttgtcatagaatttatattgatatgttaaactttgctgattatgtggttgctcttcatcatgcttaactgcacaaatttcgcaggttccttccggaacgtttccgatcatcataaacccagtttcgtcttttagaaatcccatctattttgcacctgccttttcaattgaatgctgttcaattctaatttttttayctttttcgcttacatacatcgcaatgacttgtgtatctacttgaacagagtctctattgtgattagtcaaaccttcagcgttatcgataaaaattggaacgatatagccttcctgtttcattagagtgttggagacatctaatccagcttgcatacggctaccgttatttagagaactgaacggtactccgtcaatcatcggttcacatactgcttcattgagtcctccatcttcaaagaaatcgaacaatttccatttaacaactgagaaatgactatttataatttcttgcagcatgttctgttttgttataaagaattcttcaaatagtactaatttttgtaatacttcacctttcttatgagataattggcgctcttgttcattgaaatcttcaataatcgatagctgtctttcatactcttttagcaaggctaatttttcatcaatcattgcgatttctttatctatttctgtaatctcacttgttttagcggaagtttgttctagaatagcttcgttactttgagtaatgtactcttgcaatttttttatttctttagtgatagttgaatatttttcagttgcttcaaatggtattttgtctaattttaatgaggaaatctgctgctctacatcagctaagttttccttcacatcttccaagtgttttttagcaatgttatatgcttctgttttaatcaatagttgttcttttaactcgccgatccctttttttagggcttcgcgatctttgttattttgaatgcctttttctcgaatttcagagagcttgatttgcttatccgcttcaaactgggcttttatttctttatttgttaactcaatttcttctgcacgtttttgctcttcttcctcatgatgtcgtttcatttcatcttgatccttgacatcatatggacgattacagtgctgacaaactaaaagattttcattgaaagataatttggtataaactagaccgcctgtaaattcttcagcttctacttcatcatatttgtcgtacaattcttcatgctttttatttaatgcaatcagttcattatcttttatagaaaccaaacgttctgttacattaagacttgattcttcatctgcatacgtcttctgggctttattgagatcagcaaagagttttgacttaccttgctcaatgccattaatgcgtgcattctgtgcattatcatgcttcaatttagcagcagttaattcttcttgttttgtattaagacttgcaattaattctgaaatattaccaccatttctaatagtaacgagctggttttcgatgtcatttttctttaatgtcaactcgttgcgagtggttaatagttgctctttgttgatattttcaatatctggcaatgctgcttgaataccttcaatttttacaggaatatttttcagcgtttcgttgatcgcttttgttcttgaagcacacgctcacgagctgttttaatgtcatcattaccaataatttcttttaattggtgaattgatggcgattcgttgataatctctkcatctgtcttgctgccaaagtattcaaaaagcttttgacgtcgttcatctgccactaactgctcacaaaaataagtcacactagtcagattcttaaatgtgtcttgatctaatactttttctacttcatcgtcaaatgctttcttagttgtggtctctaatccgtctacgaggtattttgtaaacatctcataagacttgtgttccgaatttcgtttgataacctctttgtctcctcggaccttttcaaactcctttgcctgaccattgatagtcaaaacgacagttactgatgtctgtttaccgcgaattggctcgctattttcatcaagtggacgccactgaatcttagtacgttcttttgaatctttgttgaacaagcaccagagaaaagcatcatagatagttgtttkgcctgcatcgttgtctccaaaaatatcaatacttttaccatttggttcaatcatcaggtccgatatacctttaaaattatgaatacggattgactccaagctaatgtttttcatacaattaatctccttcaatttcgatattgtcttctaagattgctcgtataactgtttctttgcgtttgttacaaatttcagtagcgacatcataccaagcactactatgattttgattcagctctgttgttaaatcatatctataacttttactaattattggatcaactaaccaatccatacgtgcaattaaggctgtagcgtataattctcgttctgcgcaattttcagtcgcgtttttaaaccattcttcaaaccgttttgacatggttaatttatttgacacattatccatttcatttcctccagattttgtgttataattctcatgtataatttttgtatgggacttaatcgtttgtggacgagtgagtctctttttttgtgtaagctaaatattttgcatcgtcgtatttcatgaaccaaacaactgcaattggtccaataatcaaaagtagatagctcgctggaacactatttttaattactaaccctaatataaagacaagaataaatgatcctaaaattctagcttcgtataagctttntggttttctttccttcatttattttccactcctatttacccatagcactctgataaacattaaaaaaagtgctaatataatcgctgttaaaaattgtgatttaatcaaacataaaataaacacaaagaataaaattcctacggaaagtgtcatcattgttttaattgcaagttccttattcttcactagagaccctcctatataaagtttctttcataccattcttctaaatcatcgacttctattcttaccaatccaccatttcttttagcaggtaatggatcaatttctcgtttcatccatcttgtaacagtagcagctgaaacattttttctttttggctacttctattgctttcaaaggtggnaatttctttgaattaacttttcgatcktttttgatttaaaatcaataacttctagtgccattkgwatyctccttcctcatgtatcctagtkgttcccaatatggaaaacgttgctcacttaaataacgaatatcgatgaaagcaagatcacacaagctactaagtagtgtgattcaacaattactcancaaatanccattgcgnagcactatttagaaatactgtcagaaaaa

SEQ ID NO: 164 - DNA, 27360 bp; double-stranded, linear
taagcgaattggacatcatatgtcaataacaaatgttgataaaaaaggtcaattaaacgctattttgaaaaataaaatcagcttttagataattttgccaaaaatttcgcttaatgagtattaaaaatatttttttattttatgtgctcaaatatttttcaaaaagaaaaaattgtattaaggtaatagtagaaagggaggagatttaatgacagaaccaaacttaaaagacccaagaaagttattttatagtgatggatttccgcaacaagatcaagaaactcccgcattacaggacaaaatggtccctaaaccagattgtggggaagacagctatgtcggaaatcacaaattagaaaatcgtcgggtattaattacaggcggtgattctgggattggacgagctgcggcgattgcttttgctcgtgaaggcgcagatatcgccttacattttttcccaggtgaagaaaaagacgccgaagaagtggcgcactatatacgagaagctggccgaaaagtcgttcttttgccagcagatttaagagataaacaggcacctgaagaattggttgcacaagctcatgaagcattaggcggcttggataccctcgttttaaatgcagcccaacaaatttcctgtgccgctattgaagaattaccaatggaacaagtgatagacactttccatgtcaatattattgcgatgtttggcattgtcaaagcagcagtgcctcacttgcctgccggaagtagtattgtgacaacgacttccgtccaagcctttaatcccagtgagcatttgttggattatgcagcaacgaaggcatcaattgccaactttaccgttggtttagcaaaacaactggcaccaaaaggcattcgggtaaatggcgtggctccaggaccaatctggacaccgttacagttagatcatggacaaccaattgaagagttgccagaatttgggcaacattctttactggaacgtgcgggtcagcctgctgaattagcccctgtttatgttttcttggcgtccaatgatgcaagttatgttacggctcaagtttatggcgtaactggtggagaagcaattaatctttaggagggatgttccgtgaataaagttgttaaaatacttttgcttctaggttcactgattttaatggcattatttggcgcggtggccatcaccacttggtcagccgatacagcttggcaaccaccagataatgtccaatggttcttgcaagacaacgagtacgcacgtcaagcaatcttttgggtagcgctggttttactaggaattatgctctttctctttttattcattcttttattcccaagaagaaaaggcacgtttgaattaaaagaagagcaaggaaagttagtgttacaccgtaaagccatcgaaggatttgtacgctctagcttgcaagacagtgactttctggaagcaccaaccattcgtgtaaaggcgacaaaacggcgcattaaggtcaatgttaaaggcacactgaaacgaacggcagatttaattgggcaaacagaagcttggtcaaaaacaatggaagaacggcttgctcgtttggtgggaactggtcacaagattacgattgatgttcattttgaagatattcaatcaatgaaacgaccacaacaacagcaaacacaagcacgtgtggagtaggagggatgtacaatggttgaatggataaaacaatatgccgttccgttaattggtggcctagtcggcttggtttttgcaatcttgtttctgtcaatcggcttctttaaaacattgttagtggtactcctgacaggactaggtatttggctaggtttgtatttggaacagacaggcattgtcaaaaattattttcatcataaataggaggttttggctatggaaaatgcaaatgtatcgattgttaaaggtgagttgacgtttgaggataaagtaatccaaaaaattattggcattgctttggaagaagtcgacggtttgttaactgtggacggtggttttttctcgaatttacgagataaaatgattaacagtgaagatgttacaacaggcattcacaccgaggtcggcaaaaaacaagtcgcagtggatatggacattgtagccgaatacgggaaagatatcgagaccatttatgatcaaatgaaagaggttattactcgcgaagtccaacaaatgactcacttggaagtaatcgaagtcaatgtcaacgtagtagatatcaaaacacaagcagagtaccaagaagaaagtgaaacgrtccaagataaacttggcaacgccgctgaagcgacaggtagttttatgtcaaaacaaaccaacaaagccaaacatgcggtaactaaaggcaagacaaaagtcaaagaaaacacggcacctcgtgttcaataattggttattattttattaaaaataaagcaataatagaagaaactaggaggaatgaaccatgagtaacgaaaaattcaataatgtaccaaaaccagcaggaaacggaccacacacaccagaagatcatgcaatcaaaggtgaattaacatttgaagataaagtcgttcaaaaaattatcggtttagccttagaaaatgtcgatggtctattaacagtcgatggcggctttttctcaaatattgctgaaaaattagtaaacacagataacgtcacagcgggtattgataccgaagttggtaaaaaacaagtcgctgttgatatggatatcgtggtagaatacggcaaagatattcaagacatttacgaaaaaatgaaagaattaatcagtcgtgaagtgaaaaaaatgacccacttagatgtgattgaagtgaatgttaacgtagttgatatcaaatcaaaagaagaatacgaagaagatagcgaaacggttcaagataaagtcacaggcgctgccaaaagtaccggtgaatttgcttctgaacaaacagaaaaagcaaaaaaagctgtgaataaaggaacagaacaagtcaaagaaaatatggaaccacgtgtagaataaacagttaaagggaggaaacaatcatgggctttatttgggcattaattgtcggcggggtcattggggcaatcgctggagcaattactaaaaaaggatcatcgatgggcattattgccaatatcattgcagggttagttggttcaacaattggtcaagccattttaggcacatggggaccaagcttagctgggatggctattgtgccatcgattatcggggcagtgattttagttgccatcgtttcatggattttaggacgaaaatagagaaagtttaaaaaaatagggcataagtcgtttcggcttatgtcctatttttctttttctatgtatgaggaagtttcgtatgaaaagtaaattttgagcaattagccaagagcttattttaattaaaatcattagtcattttggcttttcaacaaaaatcaacaacatttgttgaagttatttgtagataacgtttatcattcacaaatttacatttttttgtaacggatatctcgtatagtaataactgcaaatgaatttcagaaaattttttgataagtcatcaaagtgaggggatagcggtcttttattgaaaaatagcaacacaaaataaacagaacaaaagagagaggaattcaaagaattatgacagaacaaacaccaacaaagcttttgaataaaggctttatcagtattacagtgattaatttcattgtctatcttgtttattatttattaatggttattattgcggtgattgcgcaagatagcttacacgctactttaggtcaagcgggtttggcctcaggaatttacatcatcgggacattgcttgcacgacttttcatggggaaactccttgaactgattgggcgcaaacaagtcttacgttatggggctttgttttatcttttaacgactgttgcgtatatgtatatgccaagtatgggcattctttatctggtccgttttttaaatgggtttggttacggaaccgtttcgacagcgaccaacgcaattgttaccgcctatatccctaaaaacaaaaaaggggaagggatcaattattatggtttgagtactagtttagcagccggcattgggccatttattgggatgttattgttaaatgtttccaacttccatgtcattattaacttttcaattattttaattttgttaacaaccattgcttgcttcattttcccagtgaaaaatattgagttaacacctgaacatcgtgaagctttatctaaatggaattttgatagttttgttgaaaagaaagttttatttattacatttatcgcctttttaatgggtcttgcttattcaagtgtcttatctttcttatcttcttatgtcaaagtaatcgatttagttgacgtcagcaccttcttctttatcgtctatgcggtcgtgattaccttaacacgtccatcgacaggtcggattttcgatgtcaaaggtgaacgctacgtcatgtatccgagctacattttcttaacactaggcttattcttattaagtatgactacgtctggttggatgttattagtttcaggtgggttaattggcttaggttatggtactttcatgtcaaatggccaagcggtttgtcttcaagaaagcccaagtcctcaccgtatcgggattgctttatcgacttatttcatcggtttagaccttggattaggggttggtccgtacgttttaggtgaattacgtaactttatgtcattccaacaaatgtacttcttagcaggctgtatcccaatcgtttgtaccattttatatatggtcttccacaaagctaaaaatgatgccaaagatttgtctcttgaaacgattgaagagattgaacacggctcagaactataaatggacaaggagtgatttcaatgcctaacgatgaacggattttaaacgttttacaacaaacactaacggaaattcaacgcatgaacacgcgtttagctaaaattgaaacagagttagccgatgtcgatcaacatcacgcgactttggatcattacttgcaagagctagaattggtgacagaaaataacaacgtcatgtaaagtgagtagttagtaaatgaatgttctacgtttcggtatcactagagtggaacattgaaaattttcgtaaaaaacgtcaaaaggtagcagtttttctgctaccttttggcgttttttgtaatttttatcacttaaaatgtttcacgtgaaaacttttaaaagtggcgtggactttgtttggtgacaatttgtgtatttaaattttctaagctttgcgctagttcaccaatgctagcagaaaaatcaacataataagtgggaaccgttgatttgacactaacttctgaaaagatatctgtaataattacatcgaaaggcttttctggtgaagcgacaaaaattaattttttatccacggctttacttagcttttcataaagggtatctaaaattaaattactttgattggtccttactaagacacgaatcggtggtaaagatttcgttttcaatgtacaaaaaagaataaacaagcagtcaactaacaatttttcattgccaatcaatgtcggaagcatttcaattgtaaggcgcttcacatctttgtagagacttggattttttgaagtgcttcttttaaaaagctttcttgcacaaatggattggcaatcgtgacaaaggtcttaaaaaagacacttaaattttggatagaagtatatagataaagatactcgtgaaatgtcaatttaatttgataaaaagacgttagttgataaatgatctctttaatgggtgagcctaatagctggaccatatgcatccgtgctgcaggaatttccaagacatcttgtgtggcgtagctgacactaatcgtcaataagaaaaaggcaaaaaggccttctttttgtataaattttgttggaacttggtgtaaggcttcttctttaaaaaacaattcaaattcactcagattaacaaagggattaacaatcgcttcttcctccacgaaagtttctttgataaaaaagccctctttccaacgcgctaaaatcaccgcagaaaaaatcaagtcttttgtaaaatcttgtgttgtattgaaagaaacagagtgttttaaacgtcgaaagagactatggacttcttttttagtaatcgtgtgcaacggccaatccccttcagagtaattgttccaaaaaagcatcataaagaaaatccggatatctttttctttgcccaccaacacattggtacgttttaaattgatttcaatctgatatttttggagccattggtttaattgtccaatttttcgtgtaaaggttgatgaagaaatctctaggactttttcaaaatgtttgctatcaattgcattatggttaaaggcataggtcagtacttgatacgcgaaactttttttgacaaagtagggcatcaaaaacgacagttggaaatagggtgcaaaccaaaatgtgatttctttggcatttgctgataaagaaaataagttctcccagccgtttttttcaatttctgtttggagcaaagctacagattgtagaatggtattttgttgcatttttaattgagtcgctaaagtagaaatcgccaatgtttgttcttctgcttcacgacgttcgagtaactcttctaaaagagcaaaacttttacgataaggtacatcaagtaaccctgttaacatccgattccctccaaactgttttccccacgcaatttagcaaaataaattttgcgaactacttgttttaggttatagtattcgtctaaataaggaacgggatgccaataaaaagttttactggcgtgaaaaagcggattatttttgtcagtaatgactaagtcaggcacttcttgaatatgattaacaaatttcaaaggaacatcgcaataattattgatttccttcgctaaccaattttcttgtatctgattaatagatgaatgaagtaaaattttaacaggaatttgtttatttaataaaacactccgaataattaaaaaaatggtttctttaaataacgcatctagtggatgttgtttgtcaaaaggcaaacgctttaagaaatagttggttgttcgtgaaacatttgggtattgtttttcatacaaagagacattagcaacctcatagctcaattcctcttccacagggaaatgaatcagtcgttcactggcattggataaattaaccaacaaaaagaccacttctattgcgcttaaatccaactgtaattgcgtacatttttcaaaaatccaagtagcgtgtggactgttatccattcccatgatcgctaagttggcaaagttgatggtttccatttggaccagagagtacatcgttaatgtgctgaagaaatcataataaaaatgaatctcagcttgccaagtgtcaggctctttttgttcatcaataaaacaatcattcactaatagttggaattctgaataaggaaaggccaaattaatagcagcaacttctggataattggtgattgtaaaaccggattgataacggagtaaacctatggacataattaattttaatttgcgtaaatcagtatatgtaaagtaagggtaacggtttttgatgatttcaatgaagttctgcaattgtgcttgattagtcttagatagaaatggtactagagaagttcctgaaatgaagaataaggaataaaagaaactgcgaaaatctttctcgttaccacaaattttttctcgtctttttaagtttaaataacaattaaatctagctagatgattatttaaacggtcactgacttgtttaaaaatagaaaagttaataaagtgctcttcacaaaaatctttggctgaagtgtagcgttttaaaagtaaatccagggctaacatataggttagtgacccgcggacaacagcttctttcattaactcaatcgggatattttcatcggcgactaattctatggactgttgattattaataatacgaatatgtacattttcatgtgtattgactcgagaaattaacaaagttaattgattcaataaattgttgatattgtaatgggaaaattcatattttcgtcggagtacttgcatggggactttttctttactgtcatacaagtattcaattagggaaagtaactgaatttcctgtttggttaataagttatacataataaccacctttctaattggttatgattgtttgatttttcagataatacagatagggcattcttttctatatgacattgacgattgccagtgaaagaactagttgttcttatgctactgtatctattcttaaaaatcaagaagaactgaatgtgtcaaatggaagaaaacatggacaaaaaatgatagagcaaaaaattattaagaaaaacaaccagtttatataaaacatttaaataacaaaaatgataatttgagtctattgattttttagcttaaatagcttatacaaataggtttttttgtctggttagttcttatgaaaaaaattaaaaaaaacggtatagtggaagaaggaatagtaaaaataagaaaggataaggacgtgttttcataaagatgaaaagggtttctgggatttcatcaactttttctatttggaggagaagttgttgataatttttgctgaaaaatctcgttatactcttcttattcttatagaagaatctataggaaaaagcagaaaatgaatccgcattcgaagtaagagtgcgttttgaggagataaaaagaaaaggtgtgttggctgtctgttttagcaaggaagaaagacaacagaagagcactcacttatttggtttaaaataaaaaattggtacgaagtgaacgttctcttctatgtgtcgttagtagaggaaggatgaaagaaatgagaaagaatggtccaatggtaaaccgttggctctacgggttgatgtgtttgttacttgttctaaattatggcacaccactcatggctttggcggaagaggttaacagcgatggccagttaacgttaggagaagtgaagcaaaccagccagcaagaaatgaccttagcgcttcaaggaaaagcacaaccagtaacacaagaggttgtagtgcattatagtgccaatgtgtcaatcaaagctgcacattgggcagcgcccaataatacgcgcaagattcaagtggatgaccagaagaaacagattcaaattgaattgaatcagcaagcgttagcagatacgttagtcttaacgttgaaccctacagctacagaagatgtgacgttttcttatggacaacagcaacgagcgttgacgttaaagactggtactgatccgacagaatcaacggcaatcacgagttcgccagccgcatcagcgaatgaaggttcaacagaagaagcatctacaaactcctctgttcctcgttcgtccgaagaaactgtcgccagcacgacaaaagcgatagaaagtaaaacaactgaatcgacgactgtcaaaccgcgcgtagcaggaccaacagatatcagtgattattttacaggtgatgaaacaacgattatcgataattttgaagatccgatttatttaaatcctgatggaacaccagcaacaccgccgtataaagaagatgtgaccattcattggaactttaactggtcgattccagaagatgtgcgagaacaaatgaaagcaggcgattacttcgagtttcaattacctggcaatttgaaacctaataaaccaggttcaggtgatttagttgatgcagaaggcaatgtctatggaacctacacaattagtgaagatggtacggttcgttttacctttaatgagcgaatcacgtctgaaagtgacattcacggggacttttctttagatactcatttgaatgattcagatgggcggggcccaggagattgggtgattgatattcctacacaagaagatttgccgcctgtagtgattccaattgtcccagataccgaacaacaaattgataaacaaggccattttgatcgaacgcccaatcctagtgcgattacttggacggtagatatcaatcaagcgatgaaagatcaaacaaatccaactgtgacggaaacatggccaacagggaatacctttaagtccgtgaaagtctatgagttagtgatgaatcttgatggaacaattaaagaagtgggtcgcgaacttagtccagatgaatataccgttgataaaaatggcaatgtgacgattaaaggtgacaccaacaaagcgtatcgtcttgagtaccaaacgacgattgacgaggcggttattccagatggcggcggcgatgtgccttttaaaaatcacgcgacgttaacaagtgataataatccaaatgggttagatgctgaagcaactgttaccgccacatatggcaaaatgttagacaagcgcaatatagattacgacgaagccaatcaagaattcacttgggaaattaactacaactatggtgaacaaaccattccaaaagaccaagcagtcattacagacacaatgggggataatttaacgtttgaaccagattctttacatttatattcagtgacatttgatgacaaaggaaatgaagtcgttggagcagaacttgtggaaggaaaagattacaaagtggtaatcaacggagacggttcctttgcaattgactttttacatgatgtgactggcgcagtcaagattgattataaaaccaaagttgatggaattgtcgaaggcgatgttgccgtgaataatcgtgtggatgttggcactggtcagcattcagaagatgatggcacagccagtcaacaaaatattattaaaaacactggtgcagttgattatcaaaattcaacgattggttggacgttagctgtgaatcaaaataattatttgatggaaaatgccgtgattacggatacgtacgaaccagttcctggcttaactatggtacccaattcgttggttgtcaaagatacaaccactggtgctcagttgacgttaggcaaggatttcatggtagaaataactcgtaatgcagatggtgaaacaggctttaaggtaagttttataggggcgtatgccaaaacaagtgatgccttccacataacttatactacctttttcgatgttaccgagttagacgctaacaatcctgcgttggaccattatcgaaataccgctgccattgattggacggatgaagcaggaaacaatcatcattcagaagatagtaaaccgtttaaacctttacctgcttttgatttaaatgcgcaaaaaagcggtgtttacaatgccgtcaccaaagaaatcacttggacgattgcggttaatttaagtaataatcgtttagtcgacgcctttttgacggatccaattttaaccaatcaaacctatttggctgggagcttgaaagtctatgaaggcaatacaaagccagatggttcggttgaaaaagtgaaaccaacgcaaccgttgacggatatcacaatggaagaaccaagcgagaaaaaccaaaatacttggcgtgttgattttcctaatgatagtcgtacgtatgtgattgaatttaagacgtctgttgatgaaaaagttatcgaaggttcggctagttatgacaataccgcatcttatacaaaccaaggttcttcacgtgatgtgacaggaaaagtttctattcaacatggtggcgaatcagtgaaaaaaggtggcgaataccacaaagatgatccagatcatgtgtactggcatgtaatgatcaatggcgcccaatcggttttagacgatgtggttattactgatacaccctcaccaaaccaagtgctagatcccgagtcattggtgatttacggtaccaacgtaacagaagacggaactattacgccagataaatctgttattttagaagaaggaaaagattacacactggaagttaccaccgataatgaaacaggacaacaaaaaattgtcgttaaaatggcccatattgaagcaccttattatatggaatatcgtagtttagtgacttcttcagcggcggggagtacagacacggtatccaaccaagtgtcaattactggaaatggttcagaagtcgttcatggggatgacaatggcgatgtggtcgttgacattgatcacagtggcgggcatgccacagggactaaaggcaaaattcagctgaagaaaacagccatggatgagacgactattttagcaggcgcccatttccaaatttgggaccaagctaaaacacaagtcctacgtgaaggtacagtagatgccaccggggttatcacatttggtgggttgccacaagggcaatacattttggtggagacaaaagcaccagaaggctatacagtttcggacgaattagctaaaggccgagtcattactattgatgaagaaacttcagccgaaggagcacaaccaaccattattaaaaacgatgtcaataaagtatttttagaaaaaatggatgagaagggtaaaaagttagtcaatgctcgctttaaattagagcatgccgtaaccacgccgtttactcattgggaagaagttccccttgcgccggatcgaaccaacgcgaatggccagttagaggtggatagtttaaaaccagggctttatcagttcacagaaatcgaagcaccgacaggctatcttttagacacgacccccaaacgattcatcgtgacacaaaatacgagcggacaaattcgtgatgttcatgtcaaaatgcttaattaccaaggttctgctgaactaattaaaaaagaccaagcaggcaatccattagcaggtgctgaattttcagtccttgacaccacaggacaagcagttcgagaacacttagtttcggatgcaaacggaaaagtcacagtgacggatttagccccaggaaaatatcaatttgtggaaaccaaagcgccagcagggtaccttttaaacactgaaccaagtgctttcacgattgcagcaagcgatcggggcaaaccagcaacagttatagcaacggctaactttgttaactatcaaggcacggctaaattaatcaaaaaagatgtgaatggacacttattaagtggtgcgacatttaaagtgcttgatgcgaagggagaaacgattcaaacaggcttgacgacaaataatcaaggggaaattgttgcagagcacttagccccaggaaaatatcgctttgtagaaaccaaagcgccaacaggctatttattaaataccacgccagtcccatttgaaattgctgagaaaaatgctggtaaaccagcggtcgtggttgctagtgacaactttgtgagttacaaaggggctttccaaatcgtgaaaacgaatagcgcagaccaaccattagcaggtgctgtttttgaattatatgatcacaataaacaatcattagggattacagcaacgagtggcaaagatggcaaaattatctttagagacttggcgccaggtacctattattacaaagaaatcaaagcaccaaaattaccagatggcgcagattatattatttatcctgaattagtaaaagtagaaattcgtggtgatttcaaaggtgatccggagattttccaattaggggccttcgccaatttcaaaggacgcgccgtctttaagaaaattgatgccaatgcgaacccacttccaggaacgatttttaaattgtatcgaatcgaaaacggggaaaaaatctttgaaagagaagtaactgctgaaaaagatggttcattggctatggaggatttaggtgctggtagctatgaattagatgaactggatgcaacggatggctatatcgtcaataaacaacccatttattttgtagtgaagaagaattcaaatgataaacaaccactagatgagttagagtttgtaaattatcaagcagaagtaatgggacgtaaagtcaacgagcaaggtcaaaccttagcgggtgcagtttttgcaatttacaatgccgatgagcagaatcagccccaaggttcaccgataacattcttgaatcgtgcaggagaaaaagtttctgaaataacaacggataagactggcgaaatttacgctaaagggctaaatgaagggcattacgttttagtggaaacgaaagcaccaacaggctatctgttagacacaacgctacatccatttgatgtaaccgcccaattaggaaaagagcagccaattgctttaggcgatcttatcaattatcaaggaactgctcaattaaccaaagaaaacgaaacaggtgaagcattggcaggtgcggtgtttaaggtcattgatgaaacagggcaaaccgtagatggacaaaccaatctgatgtctgacaagcaaggcaaagtcattgcgaaaaacttagcaccgggaacgtatcgttttgtggagacacaagcgccaactagctatcttcttaatgaaacgccaagcgcaagctttacgattgccaaagacaaccaaggcaaaccagccactgtggtacttaaagcaccttttattaattaccaaggtgctgccaagctggtgaaaattgatcagcaaaagaatgccttagcaggtgctgaatttaaagtgacagatgcagagacagggcaaactgtcgctcgttcattacgttctgacaaccaagggttagttcaagtgaaccacttacaaccaggaaaatatacctttgtggaaacaaaagcaccggatggttaccaactgtctaagcaagctgtcgcattcactattgcggcaacagcgaaagacaaacctgaactcgtgaatgcgggcacgtttgttaacgagaaacaacctgtatccaaaaaaacaaaaccaaatcagccaacaacgaaacaagcagctagagagacaggttggcttggtttaccgaaaaccaacacacaagtcaattacttctttgtctttatcggcctcatgttggtcggtttggcaagttggctcttctataaaaagagcaagaaataagcaaaagctataaaaaaacagaaagrgcctggaacaaaaatcactttggatttttgttccaggcycaaaaccttataaacggcggtaacagaaccaactccttcggaaataagccgaaattctccaaaaattaaagagcaattttcggaaatttcttcttatttctcggagctaaacggttctgtaccgacctcttttttcatcttaagctaatcaactgaacaaaagcagctccttcttattgacattctcaggtaagccttcatctcagtttaccctttgaacagaacttactgggttcttggagataaccgcttttgcctcagcctttgtttttcgatgctatctttaggtattttggctaaaatattgtacactttacatgtgcaagaaatttagttagagatatgaggatagaatgatgaaaaagatgatggttttatacaacgaaacttcaggaagtagtgaaagtaaagagattgcagaacgctttaaaaaagctgcagaagcgagaggggaagcggttattttgcaaccttccaatccagacattgatcctgaagaaatgcggaaaaatgccaaagaaaatcaagtgggtgtcttggtcgtcattggtggtgacgggaccattcatcatgccgttcaaaattttaaagacaccattcgtgactatcaaatagggattattccaggtggaacagtcaataattttgcacgtgtgttaagtattcctttgaaagaagaagacgcctttgagaccattttggcaggacagaccacaccagttgactttgggatggtaaatcaagatgtgatgatttcgaccttaacgattggactattagcagatacagcagcaaatgtgacccaacaggagaaacaaaaatatggtcctttagcctttacaaagcaatttttccgcttattaatgaaaaagaaaaaatacaaactaaaaattgatggcgatgaaagacgttggcatggcaaagcccaattattaacgatgaccatgacgaattctgctggtggctttaccaatttcgatgccaatgctacgccagatgacggcgaagtccacattatcattttacctaagttagttttttacaagtttgtctattatttacctaaaattatcagaggacaattaaatgaaattcctggtgtcgtgtatttctctgggagtcaatttaaaattagtggcgaaaaagacaagaaagtccaaacacgaacagatggcgaccctactgatgatttaccgattaaagtaacggtggaagctgggggactcaacgtgtttgttcctgaaacgtccacatctacgaaagaataaaagaaacaactgttattttttcgtggaatagatttctcattttgtgtacaatagaacagaagagaggcagttgagtgaacagtgaaatgggatgaatatgttgatatattcgatacagatgtcgtttctaaaattattattttaagaaacttgccaattaatgaaggctggattgacatcaatgagttagcagaagaattacaattaaacaaaaaatcagtcaaaaaatacgtagaacttctaaaagatgacattacgtattatgttgtggataatgatgcttctttggcttttgaaaaggggcatggctatcgcttgaacttggcgtctagccaagcgttccagaaactttatacagcaatttttcgggatagtttaacttatcaagtaatggaagatttattctggggtcgatttaatggaattgtgccagcgacagcaaagtatcatactagtgatgccacgattcggcgcttgctcaaagggtttacagaaattttagcaccattgggtttagtaattaataaaagtacttggaaaattgaaggcaatgaagcgtatttgcgccattttgcttacactatttttatggacttaatccgtgatacttggccttttgactatatacaagaaacggaagtcgcacaaaccgtccaaaaaatgatggcttttttcaacgtagaagttgcggaaacggtgacacgccgagttaaatatatggtcgctatctcaaaagtccgtagtgcgcaaggcgccgaatatcgaccttcagccgagcaagaaacttatttagaaggtaataaacattaccaagcctttatagaagagatgacagctacaacccttttccttaacaaaaacgatttaacttttgtgtactttttcttgttagccaatgaccaattttatcaagatgaagccactgcacaagcaattttagcgcattttgatgagactgaagcacctgtttacatgttgactcatttagtccaacatttcttattagaagaaatacacatgacgccgcaattggagaaaattcgtccgcaaattttttattatttgtttgctacacatttatttgccgaactttactatgtccaaaatgtgaaaatgtacaatgtcttttggaataaaatcaaagaaaaatatccggttcttttagcagagttaattcaaggtttaaatcaactttacgaacaaacaggcaatgaattatttacaaataaagaatttttggctttgcgttattctagtgttttggcgctttccaatgatttaattcatcgcgaacaaaaaattgttttagggttaaaatcaggcttgccagtactggaagaagaacgggtgaaactttcgattgaaaataattttcgtcggttttatgcattggaagttttacgatacagtgaagcaagcaaagaagaatggcaaaatattgatttactattagtgacttctttggcagatgtggaaacgggccatccagagatctttttattttcaagtgagttaacgtttgagcaatataatcgtttgaaccaaaaaatagtaaaaattaacgagaaaagaaccacgtcactttaataaaaaataggctattttgatgcacatatctgataaattgtaaaaaaatttttctaaaaagtaaaaaaagacaagaagaaaacgtcaataagtaggtgttgattacctacttattgacgttttctcgttgttttttaataaatactgcgtcaattcttctgaaaattatgtcaaaaaggtactttttttgctttttttatcgtaaataatagatgattagctattgatagcaaaggaactactactttttttaacagtcagttaaaaaatattgaggtttctcacaagaatttttctatataatagaaagagcaagggaaggaaggcgggataagatgaaaaaacagatggaacaaattgaagaaatcttaagttgtgaagaaaatagtgcaggcatccgattaaaggaattggttgaagctttagaattggaagtcacaaatcaaaacttgttaaaggtaacaagtatcttacatatgaatccaaaattcaaaaaaatttatgcatacgaagacagtcgtgttattacgctgtatcaacttttacaaaataagccgttggaagtaacggaatgaaaagagggaaacacatgaagaaaacaatgctcattcttctatttggtttattgacagtggttggtctgccaatggtgaccgaagcggttgaaccagttaacgcaacagatacaacgatttttggtgcgcaagcgatggtgcctaatagcacagaagatcaaacagataagttacagacgttgctgagtcagacagcaaaggaaggacgggcattatttttaccacagggaagttatgctctgtcaaaagatattgcgatttcttcaaattatcaattaattggcgatacaacaggagccactattttacataatgctacaggtgcaccgattcagctaacagacacaacgtacgggacgaaaaccaatgtacgacttcaaaatattgcttttgacggcatcaatgtgaccttaaaattgacgaatcaattaacgctagcaaacaatatcttttataatccattaaaaggattcgtggtcaatttaaatgcagacattggcgttaagatttcaggcaatattttcatgcgagacacggcacatatgcaatcgggaggtgattttaaccgagcgatttacattggtggttattcaacgccaagtcgcttccagtatatgtcagatgtagacatcgtggacaatctatttggtttaaaagtgacagaattagatgcgattaaaagtaccagtcgttcagacttagcagcgactattacacgtttgcaaacagccattgaagccggtgctatttcagtacctaatgaacaaaattatctatccaccggggttaattcttttaatatgctgaaggatgtaactgttcaacataattttttctattcaccctatgataatgaaaacttgaatggtctagtgggagatcatgcaatttatttccgtggcgcccaaaacatcacggtagtagggaatcatttacgcggactacaaaatggtccagctggcggatttaagtttaaatcaggccgtaatattacgattatgaataattatttgcgaaatacaggtctcattatgtatggaacaccagagatcggtttggcagaaacacaagcagagggggctatttcagaactctctaactggttagtggctaataacatttttgattggaagtattgggacaatcaatatgcaattgggatggaatacaatcgacatacaggaaataacaatgtgttcaatggcgtatttatcaacaatcagtttgttaactaccataatattccgcaaaaccgacgtcgggaattgttaatcgctagtggcggtgggttccgaccagaaacgagttttgtgaaagacaatactcgagatgatggccttaaaaacggccaattattggtagaaaattggacagaggcggactatcgcttaatgccagcaacatgggaatcattaatttcaccaacactttatgagcaatataaaaatacgccaattccggttagaaatactttagcaacccctgtggctacaacgattgtgcaaggacaatcaatcgatccgcagcaactggttgctaatacaaatgacgcggatgaagcagtcccagccgctaaaatcgtcaatccagaggtcttaaatgaaatcggccaacaaaaagtgactgttcaattaacttatgaaacagggtcattggtaacagtgaacgtaccggtgacggtagaggcccctgcaaaaaagcttgatttgtcccagctacaaaccgtttatgcttcgattggtgaagcaaaccaatatacagtttactcttggcagctattcactgccattgggcctaaaacaattgttccttcctattatcagcaggcgacacaattgttagcagaaggtcaggagagtcaggacaaaacccaagagcaagtggatcagttaacaagtaatttgcaatctgcaatgaaagtattagtcaaaaaagccgatatcacgctagagcgtacagaagcagaaaatgaactggcaagcgttcataaattagacgaatctgtatataccaaagactcttggcaagccatgcaagaagccttaatagatacaacaactggcgaaggaagctctaagcagttacaacaactgcttgcttggtcagatgaagaattattagagccaacacttggtggctttaaaacgcctgcagatgcacaaaagcgtattaatcaattaacacaaaccataaaaacggcgttacttctgttagttgaaaaatcaacagagacaactagtaacacaagcgaaagcagcacctcaagcacaaccagtgaaaccagtaatacaagcgaaagcagcacctcaagtacaacaagtgaaacaagcaatacaaatgaaagcaatacaccaagtacaaccagtaaaaccagtaatacaagcgaaagcagcacctcaagcacgacaagtgaaacaagcaatacaaatgaaagcaacacaccaagtacaactagcgaaaccagtaatacaagcgaaagtagtacctcaagcacgacaagtgaaagcagtagtaccagcgaaagcagcacgccaagcacgacaagtgagagcagtagtaccagcgaaagcagcacytcaagcacgacaagtgaaaccagtaatacaagcgaaagcagcacgccaagcacgacaagtgagagcagtagtacgagtgaaagcaacacgccaagcacaaccagcgaaaccagtagtaccagcgaaagtagtacctcaagtacgacaagtgaaacaagcaatacaaatgaaagcaacacaccaagtacaaccagtaaaacaagtagtaccagcgaaagtagtgcttcaagtacaaccagcgcaaccaacaatacaagtgagagtagcaccccaagcactgtaaacgaaagtagccaaagcaaaggccagaattctgtcatttacgcggtagagtctaatcaagatcctaatgacgctcaaagtaattcaaagccctctgccaaggctagtcaaacaaaggaatcagtagcagaaaaccaagcaactaaacagatacagacaaatcaagaatcgtcaggaacagtcaaaaaagcggataatacgaccaaaattgccaagaaaaaattccccaaaacaggggaacaatcttcagcagttgggagcttcctaggcctgagctttttatcgttagccatagcaacctattgttttaaagtgaaaagataactctttaaaaacggataagtaaacatcctgaaacaagaaataggacttgtttcaggatgttttcatataaaattaaaagaactacagtttttagtgaaaaaacacacaaaagtacttgaaattctgtgatataagggtaaagtaaaggaggacaaaaaacaaaggaagtgaaatgtttgtatacaccagatgaaattttaggtattagtattgaaaatggtcagaaaaaaattcaaaagcctttggtagcaaaactcattttaggatttatcggcggtgccatgatttccctcggctatttggcttatgtgcgtgtttccgcctctattccagcagatttagccagtgttcaagctttagtgggagctgcggttttcccaattggtctaattgttattttaatggctggtggtgagttaatcacaggaaatatgatggcggtgagtacggcttggtttgctaaaaaggtctctttcagagaattactcgtgaactgggtcacaattacattggcaaatatggttggcgccctatttgttgcctatttttttggccattatttaggtttaaccagtagcggcgcctatttaaatcaggttctttctcttgcagaacataaagttgcagcaacttggcttcaagcaattatttcaggtattggctgtaactggttcgtaggtctggccttatggctttgttatggtgcgaaagatgcagcggggaaactattaggcatctggtttccagtaatgatttttgttgcaattggctttcagcatagtgtggcgaatgcattcatcattccagccgcaatttttgaaggcggcgttcagtggggagactttttccgtaattttatttttgtttatttaggtaatatcattggtggtgccatttttgtttctggcttttactatttaagctatcgcaaacattaaatccatttagcagataaaaacctacacaaaggctaaatgcctttgtgcaggttttttctttttaaacaaaaaggaaaacggttgaaaaattattgctagatttttaaaacaatgttacattaatgttacaaaaagatttctggaggtaacgaaaaatgaaaaaaattgctttgttcagtatgttaacgttcagtgtattgtctttaagtctagcaggatgtggaaacaaaaaaacagcaagcacaaatgattctaagccaaagcaagaaacaaagaaagccacgcagaaatcctctagccaacaagaaatgaaaagtagtcattcgtctgtcacgggtcaaaattctaatgtgacaggggaaaatccgtcagaaaatgccacgcagccttctgcaggaactgatgaaacgaatgaagtccctcaaaaccaagcacctgatacaaacattacaattaccaatgttgttttcaatcctgaaagaaatgaaattaatggtactacattacctaatgcaaccattacagcaacggtagtcggtgatgcttctgcacaagcaggtgttttttatgcggatgccaatggcaattttacagtaattagtcccagagcgggagcgactactcaattaatcgcaaccgttgatcaacggaatagtgcacctgtccaaattgatattccaagttcaggacaagaagcagcgctttcttttagcaatattacgattgatccgaaacaagggacaatttctggtaaaacagcaccgaatgcaactattttagtgtcacgtgcagatgatgcgcgggtgattttagcaagttttactgcggatgcccaagggaatttcacagccagtaatttagttcccggcacaaaaaatcgcttagatgttacgttaaatggagaaatagggacaccttacttgtttgatttaccaaattaaaatagaagagaagtgatcaaagccaccaacgctagttagcgttggtggctttgatggtttaagcttcttcttttttatgattgcggatatgtaaatagatggtattttttgaaatacctaatcgatcggcaatctttatgacagaatctttgagattaaaaattccttgatcatataaacgaataacaatttctttattttgattcaaatgtgatacatttggatcgctttctactgcttgttttacttttgtcagtgaagtagtgattaattcgtcaatattgtcagaaaaatgttcagaatttttaagctcttgggacatatcattttgttgtcctgaaggtaataagtcttgcaagtaatcaattaatggcatttctaaatgcatattgatacagatcaatccaataatacgatcattttcaccgataactggaatggtggaagattttaaaataacccctttttgatttttattgtagtagggtttcacagcgtaatcatgttccgactctacttgacttaacatttttaacgccatatcagtaatgggggcaccttcttgcggttactgaaatggccattgatgactttgatagccgaactttccaaattttctaaactatgaagaatgacttcatgggtactaccaaagaagttccctaatccatcaagcattaaggcatgtgaatgtaagatttgtttatctacttcacttaaacgtaaatatgactccaagtgatatcctcccctacactgaaattaattttagtgtaatacttttttaatggaaaagcaataagattctttacgttaaaaaaacncattgactaaactttkgtttagtcgtatacyckgaatgtggaatgaaatttttgttactcattgtactttagttcatcggaatgctcgctcattctttcacttgttgagcaataaaaattttattcaggagtaccatccgttataaaaaaatatagttggaggcaaagaaatgaaaacgttatcaggaatcttgatgttagtcttagttttatgtggcatgtccctattctcttttaaagcaccgcgagggaaaaaatctttaagtgctttgtctggtgcagcttgtgccacctttctaccagaggcgtttttgcggtatgcagtaggcggcgtttttcatttagattatgtgtcgcaaattggtgaaactatgggtagtctaggtggtttagcagctggagctcttgtgccgcttgctttcgggattagtccagttttttcaattattttaggtctgtcattgattaaagtcagcttgttaccagcctttattaccgcgtatcttttatcttttgttgttgagcagatgcaaaaacgtattccagaagggattgacttattagtcgttattttagtcattccagtcgctgcttcgttagttgctggttttattcaacccgttgtattaggtgtcctagaagttattgggggcacgattttaagtgcagtagatggcaatccatatgtgatgggcgcaattttaggtgctattatcccgattgttggtatgacaccgttaagttcaatggttttaactgccttgattggtttgactggtgtaccaatggctgtcggtgcgttgacttgttacggcagttccattgtcaatgcggcgctatttaaaaagttaaaactaggcacagcttcaaccccgttagctgtggcaattgagccattaacacaagtcgatatcatcagttccaatccaattcctatttacgcaacgaatttattttcaggaatggttagtggcattgtagtgaccttctttggcttaaaagtacctgtgacaggaatggcaacaccgtgggctggtttacttgtgacattaggtaacaatgccattcaaacgactttactagcagtagcgattatcacagtggtcagtctgatgtttggatttttaggtgcgctggtctttaaacgttacagaattgaagcggtggataatacaccagaatttgaaggaacgacggaagtaaccagtgaaaaagaaaaagaagcagtaaaaaccaaaggaggagttacgtatgaacacagctatggccatcaataaacctaaaaaagtgaacaaagtaatgaactacaaaagttgttttgacattatcggtcctattatgattggtccttctagttcgcatacagctggggccttagcgattggcttagcggcaagaaagttattcggcggaacgcagaaaaaattgtgattaaatactatgaatcttttgcagacacgcataaaggacatgggactgattttgcaattattggcggaattcttggactagcagcagatgatgccaacgtaacacaatccattgaacttgcggaagaacaaggaattgagattcaatttttagaaatgagtgaagaaagtccagtgaagcatgctaatacagcatgtgtgacactcagtgatgcaacgcacgaaattcatttaacaggaatttctgtaggtggcggcactatcgaggtgaaatacattgaattagacggtttcaatgtccaactacatggtcctttacctattttgttagtcattaatcaagaagagcaggcgatgcaagcttttaaagatacgttacaaaaaaataatattcaagtgaatgcggtgtctcgttatgtggaagggaatcaaattttattcatctttgacttagattcggcaccaatttcctcggtgaaagaacaactgttttcactagatgacacatcgaaaataatcttattatgataggagtttgacatatgtatctttcgattgaagaatttatcgataaagctgaaaaaacaggaaaaaaaatctctgatttaatgattgagcaagaaatggaacgtagccaaaaaagctatgaagaaatttggacacagatgggtcaaaatttggatgtcatggatgctgctgtcaaacgctcgcaagaaggagcaggcgttttttctcctactgggttaacgggcggtgatgcggctcgtttaaaaaaataccgcgcagctggcaaaacgttatcaggtgatttaatgatgtctgcagttcaagccgcactaggtactaatgaagtcaatgcagcaatgggcgttgtttgcgcaacgccaaccgctggtgcaagtggcaccttaccaggggttttaacagcgattaaaaataccttgaatttaacgcgtgatcaacaaattcgtttcttgtttaccagttctttatttggaatggtcacagccaacaatgcgatgattgctggtgctgttggtggatgtcaagccgaagtaggcagtgcttcagcgatggccgccgctgcagctgttgaagcggctggcggaacaccacgccaatcttctgaagcttttgctatggctttagggaatttattaggtttagtttgtgacccagtggctgggttagtcgaaattccttgtgtcaaacgaaatacagtaggtgcaggcaatgcgttaatcgctgcagatatggctttagctggaattgtaaataaaataccagcagatgaagtggtggaagccatgaataaagtcggccgtcaattaccacgagaattgagagaaacgggtttaggtggcttagctggcacagcgactggccaacgaatgaagaatgaaatttttgaaaaagtaaaattcaccattgnttaaaatttaatcatgaagaggaataaygctggttgaaaaattcgcaatgtgagtgtcagaaagtaaaccggtnggcnagagttanc

SEQ ID NO: 165 - DNA, 11427 bp; double-stranded, linear
cagaaactgaacaaagtgaattcccttttgcgattcacnaaagtcacattttcacgcaggtttaaatcttcctgaaaattttaaaggtatttttttgcttgaagaaagttattatactttaaatggaaaagaacgattcaaatcagatatctttctctttgaagtaaattcgtcaagtaacgttaaattaagttccataactgttcctaaaaactatgctaataagaaatatgaagaaattgaatctattcctttttctgaaatgaccatttcagaaaaatttgttccgattgtttacaaaaaagagaatgaaacttttattggtcaatctgaaagtaaatttacagagaagaatcatttcatattaaaacaaacgatatctgaaaaaaaattgataatcaaagaagagataatgagaggaaataaacggatattcggattcgataaacctatcgaatacgtaagagttaaagaaaattaaaaaagcttttaaaagaatataatttaacagtgaagtaatttctttgtaaaatagtaattacttcactgttatcatattaataaagattttcatcatttctgaaaatatcttctctttccaagaagaatgctaattcagatgtgtgtggttaaattgatagtctgcaacattaaacatttgactgattcactttccaaaattctattataccagttaaaatcgcttaaatagaaatacacttctagcaacatgttccatagtaaaagtagcacttgttaaaaataactaatctgcaacttactatccttgaaaataaaattctcaaacactttacaaacaattattttttaggaagatggtttgttattcttatatttcgagaaaaataaaaatagcaaaagatacattacgatacaactatactatcaatacaaaattagatacctcatctgccctttgttcagtgataaaagcaattgagttaggaataataaatgttcaccttcaatagacttatttattcagtcagctaaacgctgttagatacagctatagaaatctaattatagacatagttagataaacaactatcctttataaaaattggttccatgtctttagtacaaaaagagtactatcattatttaatttaagtaaataacggatttcagaactcatcgttgattcgacgagcactcttattcaattggataagcgttatctcctcttttttaaagtaatttgtattcagcaacctagaatattgatagtgccgattatttagacagctatccggataacttggaataactgaaactagagtaaaaaatctaataaggtgcttttaaaatatcatcatttaagatacgaaatcgcataccccgaaaaatatctgctctctttagttctacaatttctgatatccaaatagttcaatttgagttaacgctggaaatggtgattcatcttctgctttgatcagctgtttcaatgtagcagtcgttactgttcgtggagagaaggtgaagtattgcgttgctatcgcatcactcgtagtgaatatttcttctgaaccatcggaaaaggctatggttacttgtttccaataactatcatggggaaaatcagcacgtaataccaatccaagcttatcgagttcaacttctcggccaaaatcaattgttatttcagcatctttttgctgattgatcccccaagattgataggggtacgatccatgatctctgttggccagaattccatcaattgcatttctagcaaaaaaagtcgcatcgtttcgtgtttcaacatttgcataagcgtggggataaacattggccacatctttttgatcatgaggattgagcgcccagttacgataactagtctgttcttcagcaaaagcctttctgacaaaaaagtaatgcttctcgtcaagaaaagccgctggtggataggcttctcgcaatttttccgtcgtaggaatttcatagacccactcgccttttgataaatacactaaagaggatcctaaagcattgtctagttgaacataaactaattgtttttctgcggttacaactttaaatttatctcctgcttgaaaagcatactttttcgttgccaaaactgcttcatccactccactgctgcacataactacttcattttcttgattaataattgataattctatttgcatactttcttcgctccttttactttttctttaaaaacttacccgcaataaataaaaggagaggcggccttaaccgtttcctcccctctttattctcttaaggttgtttaccaatataagctaaaattccgccatcaacatacagaacatgaccatttacaaagtcagaggcctgtgaggcaagaaagactgatggacctgcaagatcgaccggatcaccccagcgtgctgctggcgtacgaccgacgataaattggtcaaatggatgacgttccccgttttcttgcagctctctcagcggcgctgtttgcggtgtcgcaatataaccaggaccgataccgttgcactggatattgaattgaccatattcagaagcaatattttttgttagcatcttcaaaccaccctttgccgcggcataagcactaacagtctcacgacctaattcactcatcattgagcaaatattaataattttacccccgcctttctcgatcatctcaggaataaccgcttttgacataataaacggcgcattcaaatcaacatcgatgacttgtcggaaatctgtcgctgacatatctgtcattggaattcgttttatgattccagcattattaactaaaatatcgattgaaccaacctcttctttgatttgcttgaccattgcttgaactgctttttcatccgttacgtcacagacatagccttttgcttcaatgccttctgctttgtaatttgccgatccttcatcgactgattcttgagtcaaattattgaaaacgatcgttgctcctgctgccgctaatgatttggcgatttcaaagccaattccataaactgcgcccgtaatcaatgcgactttcccatctaagcgaaacatatccatattaaaatccatctattctcccactttcattcgttctattttagttcatccattggaaccatatccatgtcggtataagtgatattctctccacacatcgcccagataaatgaatagttgcttgttcctacacctgaatggatcgaccaactcggtgaaatcacggcttgttcattccccattaccagatgctttgtctcagctgggtcacccatcatatggaaaatttttgtatcttcctccatatcaaagtaaacatacgcttccattcgacgttcatgcgtatgacacggcatggtattccaagaactgcccggctctaaaatcgtatagcccatttgcagctgacagctttcacaaatattgggatgaatatattgataaattttacgttcatttaatgtcaatgcttccccagtttccattggcttaatctcatcaatactgatttttacatttgggtacttgtgatgcgccggagcagaactaatgtaaaatttcgcaggatcagctgcatcttctgaagagaaaatcacttgtcgagtttctttcccgacataatagccatcttgcttcttcatcgcttcttttcgaccgtcgatttcaataaaacccggaccgccaatattaatgactcctaattcacgccgttccaagaaataatcgacacctaattctttgttcaaaataatctctaacgactcagtcgtcggtgttacaccgccaaagatcatgcgatcattgtgggtatacgtcaaactgacttcattaggtacaaatactttttcaactaaaaattctttcctcaattcttctgttgaataatgactaatatcttttggactgtgcgtatatctcgtatccatattctgcatgtttatttccctcttttacttaatatttaacgaacgattcgaccagaacctgctgtcaaaaattgttcgatctctatttctgaaaattgattacaatccccgtgaacagtatgcttcaatgctgatgcagccgtagcaaattcaacggttctttgcccgtcaaaatctgagatcaatccatgcaagatccccgccgcaaaagcatcacctccgccaactcgatcaacgattggatttattttatgaacttcagactcataatacgtattctccagccataaagtccctaccaactgattgttgctagccgaagaaacgatccttttcgttgaatagaagcatttaatattgggaaactgctgctgcatttgttgataataataaacgaatcctgaattcatccggtcttctggaatctccaataaataacgcgcatccaattctccagctgaacaataatcgacataaggcaagatttcttttaatgctttcccagctgctgcctgactccatagtttcccacgataattaatatcaaagctgactaacacaccaaatttctttgcggctttcactaattcaaccgtccattgacaccattgcactgacaaagctgctgtaatgcctgaaatatgaaatagctcaatcccagaaaaaagcttttcataagaccacggaaactctgttacttccgcaaagcttgaccccgctcgatcataagttacactagcagcacgttcaccgatccccgtttccatgtaataagttcctaaacgcgctccgccaagttgtacaaaatcactcatcacaccgtttcgacgcaaatgtttcactgccgcttgacctagtgagttatcaggcactttacttgcaaaagaaacctgatgaccaaaattggctaatgaaatagctacatttgcctcgccgccgccatagtgacagatcaattgctgtgtttcgttaagacgaacacctatatccgttgaaagtcgcaacataatttcgcctaaagttagtatgtttgccataattagttttcctttatttctctaaatttggccatatattgttttgccaaagccgttactttaccaaactcaccagttttagcgtgagctaataagtttccgccaacacccactgccgtcacacccgcctcaaaccatgacgccatattatccagactaacaccgcctgtgggcataatattcaagtacggcaaaggtgcttggaatgcagagataatactcggaccataggtacttcccggaaataacttcacgatatctactccgctcttcaaagctgtctgcatctcagtaattgtcatacatcctggcaagtaaggaacttgatacaagttacaaatttcagctgtctcccgattaaagctagggcttacaataaattcggctccggccattatagctaggcgagccgtcacagcatctaacaccgtgcccgcgccaatcacgatatctttctcgtcatgatatgtttcaactaatgaccgaatgacttcatctgcttgagggactgtaaaagtcaattctaatccaatcattccgccctctactactgcatgactaattttcaaagcttcctctttagaatctgctcgcaatactgcgataactcccgcattttctaagcgtttcaatacttcaacttttttcattcgtctacgcctttcttataaagctttatggaatcaaatatacgagcaccagattgactataccgcgctacttctttttaaattccttcttctggcagttcttctgtttcattgtttttttcaaaaagcmtaatattgctctttccagcctgtacgactgtttcagcaatttcaaatgaatccgtgacgctatttcgcatcatcaagccttctaatagtattcctaagtttgtgccactcacaacaaaaacttgatctttttcctcagagaattcaacacaggttttaaatggggtaccacccaacaaatctgtgaaacaaatagcttgatcaaacatttgaatttctgccgctactttttggcgatactcatctaccgtctcctcggctaaaaagggaataatgatcacatcttctagttctccagcaatcatcgctaaagcactctgcatcccaatcgaaaattcactatgcccagtaattaataatttcatctcattgctcctttatttaatccgaatctttgcttccttttgatcaatcaaaacaagccgaccataaaaaaattggccatattcactcactaatagtttattccctttgacaatatcttcccgcataacaaagagatcaaatttttccgatccggcgattatccgaaatcccttagcctgacagaattgctcattttctcctgtttgactcacttttattggcgtaatttggatatcctctaacggagaaatgactgttgcttgaatttcttttcccgttttgtaacaaaacttgtttgataagcgtgggtgctcattcagctggttataaatctctgaaccttttgccactgattgctgtgtttggcctccagcaaaaaggagtgtgtacttatgcttgttcgtagttaaagcaaaccgatgcgcttctttttgacaatttatcgacggtgccaaattataggtactcgtaatttcagtctctttctgtcctgcaaagctatcaataataactacggagttgatcgactttaaatagatgaagctgcgctcaaaaatcattggattctgatccgccttatccagccagccgcattctgcaaaaaaaccgacagaaagttcttttatttgctgaaataagggtgtcggtaatttgtcataaccccacgtatcggaaactaaagtatggggattttctgcgataaacatcgtattgtgcgaagcgcactcttttagctgaagtcgctctgatttgttgacatagctgtaacgaccactatcggaaaataagtcatccccttgtagttgtagtgtaaatccacctgtagaagcatgaccatgtgcgctcccatgcagaccgttaaaaagtgtaaaatagatatcctctgctttgtacgccatcagcccacttgattcgccacgaaaaagttcttttggcttcattgtttcccagattctttcttcataaagatcccccgtccaaagccttgccatattcgcagtcatggagggttcaaatatgaaacctaatttgcgatagatatcatatacgtaatgaaagttgacatgatcactatcattgatcggatttaggatatcttggttatccgccaaataatgggtagagaaaataggtgtttttaatttcatgcgaagatctaatggtaactggacttcaagatattcagaaatctgcaatagatacacgaatgtcatcaaaacttcgtgctggtacagcgggctctgctcccaatgaattccatctgaatagaattgtagatcaagctgttcagctaaacgagaccatattagatccctctgtttactggtcaccagttctggaagaaataaatcaatagctgccattccaccaattgccaacacaccccaattactgagcctgtatttatcgatataggaccgctccaaatagtccagatggatcagcaaggcgttgttcaacacatcatcaattcctaatagtctgaaatcagcgattggaatatacgtcaagcttttcatccagtttgttactcgaatcccaacatctaacggacgccaaacatccctattcgtcgaatttggctcaccctcatcgttaataaaatcaataagcaagctgtgccatttctgtaagtaacgttcttttttagtaagtgcatatgcttgtgccagatctacaagaaagctttgacgactcaacataaagagccattctggatcatcatcaggataccgattccacgcatactcttttaaagaataaggaatggagcaagcttccatatccattgcatcattgtaaataatctgatctttcagcaaataagaagtacgttcaaaaagtggcttcaaaaattgtgactgttgctccaagtactctgaaagccaatcttgttgaaaaaattttagttggtagtcttcgattctttgaagattcatcgtgttcccgctttcaaatttttattcgcctcaggcttaaaattacagtatacttcctcattcactccgaaaagtgacaaatacggagacaagaataattttccaaaaattaaaaatcttgtttctgattaccctcgtttactatgctaaaattcctaggacagacgctgctatcccaatagcaaatagtaagatcaatagtttatacgtgttccaatttctcttcttgatcaaataaaacactaagatagttaaaattactggaagcattttaggcataatcttatctaaaatatcctgaatagcgattacttgtttttcaccggattctacgtgatgcgaatactttatggcgatgttggccttaacaaatgatgttgctaatgccgctataacagttactccgacaatattagcagccgaagaaattttcccgatcttatcactcaatgtttcgatgacactcgttccaagtttaaagcctaaatagcccattaataacttgataatcaacatcgagattagcattgaaaaccaaaagcccatcggtgcaaaacccaaaccatccattgctaacccggcaaagattgttgagaataaaggagcaatcccaaattgagcgattgagtctccaattcccgataatggtcccattagcgccattttgatgctgcgcgtatccgtgacactttgtccattgtcatacattgccaactgcatactagtaatgaatggcagcatttgagggttggtattataaaactctaagtttgcactcgccgtttctttcagcttctctggttcatctttatagattttcttcagcgctggcatgatcgtgtataaataacttaccccttgataagatgtataattaaaagcgttctgtaacaaatacgaccgtagtgctgtcttcatgtagtctttttggcttaattttggtgtcctagattccattactaaaatcctcctcttccatcaaggtggtttggctttcgtctcttatgctcttttctccaacaatcgttttatcttttccataatattgaatcaacgcaaagacagttcctaccattgcgacagccatcgtaggcagctctaaataagctgcacaaatatagcctagtaacacataaggtgtcagactcttttcgagcatcacagacatgatcattgcaaaacctatcgctggaataagcccgccagcaacagaaaagccattgattagccaatttggtaacgcttcaacaaatgcctgcaatccaggacgactcaaggccgctaatagtccaatcataaatcctgcaacggcaaaagctatatatgttgaattagcaatcagattaaaacgtgtatatttcccttgctcaattacattcttcgaccatttaacattcccagaaaatatagtatagatcgccgttgttaccagttggaacaatactgcaaagggaaatgatagtgctaacgcggattcaggtgttaccccttgatgtttaagcgtaatggccataatcgtaccaacgattccgggtccaactggattgggtggtacggttccgcctgctccaacaccaaatcccatataagccaactcggctaaagcaccaaatgttaaagccgttggaatgtcacccaaaacaacacctacaaaaaaggacataaccagtgcacggtttgtgtaaattcctaatagctgccccgaataacaaaaagctgtgatcaatccgatcaatataccttgaactaatgaaatctccatctgcttctccttctccttctccttctaatttaattagatattttttccatcaatacatctaagtactgtgagccatcatttgaaagtggtgaagtcttggtgttgaaagttacaccatagttatctcgcatcaagcagagagcttgcttatcttctttacctaaatagataaattgagagattttctccttgccttcgtcagcatgaatattcccaatatttaactgctccattggaaagcccaatttgcatagttctaaggcatcatgcaagtttccaacgactacaaaaattgtttgactaggggctgctttccaaataacttttgccgtacgttcgatcgtccaaaaacgaatatttgtttctttcgggactaccgttttcatcagcgtctgctgtaagctatcctctgccgctttatcattggcacaaataactaagttcactcctaaactcttgatccatagttgaccttgtccatgtatcagacgttcatctacacgcaccatttttacattgggtttttgcattttctttcctcctgtttttaccagtacattttccaattttttttgaatcgcactaaagcttctagatagaaataatcaccccaaatattaccttcatttacgcctttaccactatgccaagaataaacaccctcattcagtaaagctgtaattccgtctgttttggattcagtatagttttcagataagcttcttagcatggaatgctgcgcacacttgtaaaccaacttatgactgttcgtctcaggtaaaaacgcgtccattagactcataccacaaacagcaatcgctgtcgcagaagtatctcgggactgttcggaaccatccataaaaatcagatcccaataactaacaaaatccttcggcaagcgattcaagaaataattcgtaatcgcctcaaaaatttctgtattctcttcctctggacagtaggagcggaacaatgccaaaccataaatcaaccacgattgtcccctcgcccagcttgaactatcggaatatccttggcgggtttttccatacaaaggatcgcccgtttcagcatcgaagaaaaacgtatggtaagcagatgaatcttctctaatcgcattatcgattgtcgtatgataatgtttaacggctacttcacgataacgtttatcttgagtcactgttgacgcccaaaataataatggaatattaagtaagcagtctacgatcaaacgatagttatcttgattgcccaattctccccaagcttggataaattctcccttagattggtagcgctgcaataatttttctgctgcacttatcgcggcattcttagcagcttcatttccagtcaacttatacgcacttacacaggataagctgtataagaatcccaaatcatgatgctcgacttcaatttcattttcaattcggtaaataaaactcttgacattttgttctgcaacttcacggtaatgcttttccccagaaacttcatagcacagccataatattcctgtccaaaaaccgtttgtccattctgtattatccatagctatatacgtawtgtccgttgktgckggtgttgggaattatctcccagttt

SEQ ID NO: 166 - DNA, 1669 bp; double-stranded, linear
ccctgngactatttttcttatctcttttataaatagaagagaaagtattctgattttgtgttttaagctttttatgctagaataacgccagaacataaggaaagggacgagwcawttggaacccatttatttagatcatgcggcaacaacaccgcttcatccaacggtcattcaagcgatgactgaaaatatgcaaacgacttttggcaatccatcaagtattcatcagtttggacgaaaggcacacggtcttctggaagaagtgcgtcaaacgattgccgagagcttacaagccaaaccccacgaaattatttttaatagtggtggcacagaaggggataacacagccatcttggcagttgctttttctcgtcaaaaggaaggaaaacatattattactacggcaattgaacatcccgctgtgttacgaacgatggaatacttagaaacgttaggctttgaagtgacttacttgcctgtgaatgaaaatggtcagatttcaatggatcaattcaaaaagtctttacgcgaagaaacgatcttggtttcaatgatgtatggcaataatgaaattggaaatcgattaccgattgctgaagttggtgcaattcttaaaaatcattcggcgatttttcatacagatgccgtccaagcttatggaagtgaagtcattttacctcatgaattagggatcgacttattaagtatttccgctcataaaatcaatggtccaaaaggcgtaggttttttatttaaaagcgatgcaatccaattaccacctcttttacatggtggggaacaagaagaaaaacgacgtgcgggcacggaaaacttagctggaattattggcatgggtactgccgtttcattactaacttctgcagaaaagcaagcaagaaaaacagcctatcaaagttttcaaacgattattttaaaagcgttagaagaagccaatattgatttttcmattaatggkgaaccaaccaatcgtttagcgcatgtcttaaaycttcatttaaanggaatcccagtgatttgctcttaatgcatttggacttaagaggtattgcgatttcaacaggctcggcttgtacagcgggaactgtggatccttcgcacgtgttgacagcgatgtatggagaaaattcctcagctattaaagaatcaatccggattagttttggctacgggaacacaccagaagaaattgcgactttttctgaagtactagttgcagtgattcaacaattgaaaaaataatctgattgcggcagctacaggttttcgctataatgaagataacaatgaaaataatgaggtggaacccatggcatttacaacaacggctgctgttgaaggctcaacagttttttacaaagtacatcctagtgcaaaacgctatacattaaaagataacggctttactgaaacaaaatcagggaactttcaattgattcgttccttagatccaacgcctcagagaaatgaaggcttcaaattgaaaattacgatcactgctgatctaaaagagttgaaaatgtccattacaacggcaaatggtttaaaaccaatgaatattttcaagaatgaacaacatgaaatgagtaaagaaaaatactttttcttaatggatggcttaattagccgtggtgtattagagaaagtagaa

SEQ ID NO: 167 - DNA, 19031 bp; double-stranded, linear
ggtgagtgttctagcagtgctgtttgtggcagctgcttgttcctcaaaaccagaagcgaaaattaatacagaaccatactctgaccgtcaaacaatgcttggtacctacgttcaaattcgcatctacgatgatggcaaagaagacgtcttaccgaaagcctttgcccgtgtcaaagaactaggcgataaaatcaccgtcaaccaaccaggttcagaaattgatgaartcaaccaagaagcaggcgtgaaaccagtcaaagtctcagatgacttgtatcctttgttgaaaaaagcctatgaatacagcaaagactcccgcggcggctttgacatggcaattggcccaatcacctctatgtggcacattggcttcgatgatgcccgcaaaccaagccaagccgaaattgatcaagccttgaaacttgtcgattacacgaaagtcaaattcaacgacaaagagcaaaccgtttatcttgaagaaaaaggcatgcaactagatttaggcgcaattgccaaaggcttcatcaccgatgaagtcgtgaaagttctgaaagacaacggcgttaccaccgctattgtcgatttaggtgggaatgtttacgtcttaggacacagcccgcgtggcaaagacatggattggacagtcgggattcaagatccgaataaagcccgcaacacagtcttaggtcaagtcaaagaaagcaacaaaaccttagtcacatcaggaatttatgaacgctacttaaaagtcgatggcaaaacctaccaccatctctttgatcgtgaaactggctatccgtttgataacgacatcgcgggtgtcaccattatcaccgacaaatccatcgatggtgatggtctctcaacagccgtcttctcaatgggcgtcaaaaaaggactagaatatgtcgaaagtctgaaaggaaccgatgccattttcgtcacaaaagatgacaaagtctacatcagcaaagatatcgaaggcaactttgaaatcggcaaagactctggctatacgatggggaatcgggccgatttgaaataaggagcgactaaaaatgtctttaaatgtgtttttaaaagtagtggaaattcagacgaagcttgccagtctctttcccttcattatcggggtcttgttttcaatgacctatttcggggaagttcagtggggcaacacgctggttttcttcattggcatggtggtctttgatatggccactaccgccattaataattacatggacttcaaaaaagccaaatcagacgtctataaatatgaagaaaatattatcggacaatcaggcgtttcaccacaactggtccgcaacatgattttcgccatgattgccttcactgccgttgtgggtgcgtacttgacggttcaaaccggctggctcttccttgttttaggcgggatttgctgcttcatcgggattttctacacgtatggaccgattccgttatctcgcatgcccttgggggaaattttcagtggcttcacgatgggcttaggcatcttcgtcttaaccgtttacttgaacgtcgtcaccaatccgcctttttacttaacggtcgattttgctagcggcgcctttcgcttagacggcaatctctgggcggtgcttgcgattgtcgtggcgtccttgcccttggtctgttcgattgctaacatcatgctcgccaacaatttacgggacttagacacggatattgagaaccaccgttatacattagtctattatattgggcgcccatcggggattgtgctgtttcaagtgttagcgctasctgggtatctggtgattttattcggcttcattagtggtatttatcaatggcctgtgttaattacatttgccactttacctgtcatttggaaaaatattcaaacgtttaaacaagaattgccgcagccgaaaagttttcgccattccattaagaacttaatggttttcaatggcacctatgctttagggctattcattagcgccttacttggttagtcttgcgaaaaaatagcgggctgggcgaaaaaaatactgttttttttcagaggcctgcgtcaaaacaatcaaacaaagctcaaaatgttagtattcgttgctaacattttgagcttttcttgttaaaaagagcggaatcttaaaattttgtcaggggattttggtaaaaatttgccgaaatcgccctttttttgagccgattattaaataacagctgttgtaactcttgtcagaataggaaccttcaaaattttcgcatggggtgcgaaaaaatcgtcaatttctgctgggggtttctttgttattatagaggagtaacaaaaggttgttttgtctttcttgtgtaaaagggcaagaaaggctagcgagttaaaaggaggtttttcaatgaaaaaaaagcgttatttaatgattgtgtgtctactatcttctcctagtttttttataaatgttgaagcgtctgatggtggttctagttcggtggggattgaattttaccaaaatccgagaacacccgctcctaaagatcccccaccgaaaacagatgcgccagctgctgatcccaaggaaccagctggtcctccgcaaggagatcaacgaagtggtggttcgacacagaccaccacaactggctcaacgctccctcgtacagggagcaagagtcaggcaaatttgagcattctcngnttcgccttaatcggtttggcgggaatcgtacatagaaagaagggacgacatgaagcaaactaagtggcaacgattagcaaccattggcttgtgtagttctttagtaattaacgccttttctggtgtgacggcagttgcggaaaccgtgacgattgaaagtagtccgaccgccgaaagtagtgccaaggaagagacgcaagcaagtagcgtgaaggaagaaacaacgaaagccagtacggaaaatagtcaagtaacaactgacacgagtcaggaagaagcaacgaaagaagcggagaaagaagaaccgcaagcagaagtggaacaagcagaaacaccaatcattcctaaaccaaaaaaaatcaatatgaaggcaacttattcattttctgcagaaacttatcagtttggatttgtgaatgaatcaggtcaattaataaatccagatattataccaattacgtatagctatgccaaaggatcatggaagacagatggttataatcgaaagtggactagtatggttcaagggagtgcttcaaccgtaggaaacttaaagaatgtaataatgccagcaacttctgtagttatgccaccaggaccgtcatatgaaggaactcaagaggtgtacacaaacttttcaattcgcataccaaaatattatgcatcagcgagtctctacaatagagaaggtaaaattgattctacttatccgttacctgctattgcactagcaggtactagaccgctatctttgactcaaagtagtgtaattagtgcattggcgctgaccagtaaaggagacaatgtttatacaccacgggaaacattttttggaggagatcctgcaggtgtaaagtttactaattttttgtatcgtataaatgactttgatgtgaaaggtaataacataggttataagactgtgagtagcccaatctattaccatctgaccaaccgccgtgtcaccgaaaacttcgtagatacaagtggcgccaaaatcacgccaccaagtaatttcacccaagggaaacaaacggtcattaacagtgatccttacacgttccaacaaagtggttttttacccgagacctacaaagttggcacgaaatcttaccgattcaaaggctggtacaaagggaaaaccaaaaccgagcctttggccaccactaaaacacctagctataaagtcacgtatgatgacaatgatgatttgacggtggtctatgaggagttttcagggtacgagctgcctgcttcgaccaatcaatttggctttgtggatgaagcgacgaacaaattaattgcccccgaccaagtgcagatgaagtataatcttactttaaatgaaaataataaaaaaacagtaatgagcagtaacttaacggggacagatacagcgacactgaaaaacttgtccgtgcctgtcaactattttgaacaatatcgcgtcaatacgttttatggcgcgagtgacattacgtttacattgcccaaacggtacaaatcaatcaatattaccaaatcagatggcaaaaccgacccagcttttcctcttcctaaaatctataatatagatcaagtagaaatgtcacacatgcctgtgaccacttataacaagttgaaacagctgtcgggccaaacgtttggctttaatgctttagccgatcaacctgaattttatacgaaaacgttatttgggacagagtctggcatcgatgacccagtcaattattatacaatgagtggccctgtttactattatttagaaaaccgcaaagtcaccgagaacttcgtagacaccaacggcgctaaaatcacaccgccaacaggtttcacccaaggtaaaaaaacggtgattacaagcgacgcctacactttcaaacaagcaggcaccttaccagacacttacacaacaggcggtaagacctacaagttcaaaggttggtacaaaggcaagtccatactcaacacattgacaactaccaaagcgccaagttatcaagtgacctacgatgacaatgatgatttgaatgtggtgtatgaagaagaaacagttacgacagtgtatccatcagtcgatatgaactttgtgaatgaaaaaggcggggctttcacaccggcgttaacttttagtggtaagtactatgcgcaaagtacgagtgcgtacttaagaaccgatttatatgacgtgacctcaaaaaataatggtaatgggcaatatacggtaagtattaataatggtagtatgccattgtcccaagaattattgaaaaaatataataatggacaaccaatcagtgctaccaacagattacagtttaatgttgataaattagccatcgaccaacaactaaaatatgttgacagcattcaattagacacagctcaaagtagcaatctgaaatcctatagatatgtgtacacgaacaatagctcactggttttcgacccaaatgtagcaccagcagaggttgaccttagttcagaatctcttaacttgcttaattttgattcagatggcacctatttttctaatgcaaataatagacttttttacacgcatttaggatatagtggcacaccaggagttaactatcttctcgtaatgtttctttttaacgccaaacctgcggataagtcaaaacttgtctacaaagtcactcgcaaacaagtcaccgaaaacttcgtggatgtcaacggtgccaaaatcactgcaccaacaggcttcacccaaggtaaccaagtaccaatgaacagtaacaccttcaagtacacagcggcaaaagctttaccagcgacgtatactacaggtggcaaagtctatacgttccaagggtggtataaagggaaaaccaagccaagtacgttgaacaaaacaacaactccaacgttcaatgcgacctttgatggcaatgacgatatgaccgccatgtataaggaagaaataccaacagctagtgtcacattaactcgaccaaaagaagtgattgatacgaataccaatgtaatctggacaacaacgatcacgaatactagcaaagcacccttacaaaatctcaccttgaaaaaagggcccaattggtcagctggtctgacgatcccgacctttatggaagtgacaccagaaggagaaacgacaaaatcaatcccagtaaatagtacactttggacagagggggttcctttaccaaatgccgttcctatcggcaaaaaagtttcagttgctttcacaactcgcgcaacagggaaaccaaacactgttttgaaagcagaagttgtagtatttggtggtattaaagatagtacagtggataacttcgtgagaattcgtccaaatgatcaagaagtagtcacaccaacgaccgaaggcttcatcagtgtgccaaccttcgacttcggccaagtgggcgttgcaggaactaagcaacaacacagcttgaaacaagccgcggattactacggtaacggcacacggaatccgtatctgcggattaagaaaacgcaacccaattggagcttaacagcgcaactgtcacaaccaaaatcagcgacagacagcttgcctacagcgacccgcttattattaggggcggcgcctgtctctagctttaccaattacaatcaaccaaccgagttgaaaaatacggtcggtaccacgagtgccattagcttaacagccaacaacacagcaacgagtattattgccaacaagcaattcacaggtagtaatgtttatcagttggacttcaccttcaataatgtcaaacttgaagtgccagccaatcaaggtgttaaagggcaacaatacaaggccgcagttacatggaacctagttacaggtccttaaaatagttaagttatcatgagaaaagctcaaaatgttagtggttatcactaacattttgagcyttttggtttaaatattaaggaaaaaacagttggagttcatcaaaagagcgtttaaatccttgattttcgctaaaataacacttattttcaaagggaacagaggcgctcagccttgaaaggataggaatcactaaaaaacggcactcaatatgtcaaaatttgaaatttcaagctgtgtgttctttggtaaaatawatawaaaaatgctagttatcagtatcgataataacaggatactgattaagaaaggactttatagagactatagattgaatttttacatagaaagaaggagcaagatgaagcgagtaaattggaaaagatggctagttgttgggttaagttgttctttgttcatggattcagtggttggtgtgactgtgttagcggaaacgattactggggcgacggagcaaggagtagcaacatctcagtcgagtgacgaagcgagccagacgacgcaaacaaccgaagagtcacaggcaacggtcgctagtgaagcgaaaacagtaccgccacaggaaacggcaagaattgcttctcgagcgattggttattcttctgtggaagggcgcgagattccctttttctttgtggaggaagacgggacgttgtttgatcccgaccgaattacgatggcggtcaatctttccacgttttcgttttatgaagagaaattacaacgaaccccccttgagcccaccactgtgaatggcggaaagttactgtctattccaacgtcaccagcttttaaatatgatacaaataaccagaatccaagtaatatttatggcgtttctgaagtgtcgtttactattcctaaggagtatcaaagcctggacattcgaccaagtacgttttatacaggagacactacgcaatatccagtgccaacggtttttgcgaacgttgggggcaaagtgacgaactatgtgggcgccaatgcggagacggaattagagttaaccaatgaaaaaatgcccaataagctgacgtttggtcctaaaaagacgtttaaatatacggtagctacggcaccaggaggcgttacgtatgcgctgacctatttttatggagatgtcggcggtccaactagttcgcaccaaagacgaggaacagcgggtcctgtgtattattatttaacaaagcggcgtgtcacggaaaaatttgagaatcccgcaggcggggcgattcctgcgccagaaggttatacgcaggataagaaaaccattgtaacaggggaggattttacttttacccaagaaggcaccttgcctgaacgttacacaggcagtgatgggaagacgtatttatttaaaggttggtacaaagggaatgcgaaacctagcacgttggaaaccaccaaaacgcctagttatgcggtgacctatgatgacaatgacgatttgcatgtggtctatgaagaagcagtgatgaaaacctatacgttgccagcgagagaagctttgttcggctatgttgatgagcaaggaaacttgattaatcccgccaagtttaagctaagtgcgaccatgggtgaaagtgacggagccacaggggaaatgacgacttttcccacaattgatggaatcgatatgccagcaagtcaattaaagaaattagccatcccgcaaaaagtctacacacgcccagacgatgggacaatcgtaacttatggcccgcaagaagtgagtgttgaaattcctaagtattaccagacgatttcgatttcaccaactactgcgtatacaggggataaaaccaagtatccagtaccaaatgaagtgcgccgtggcatcgaaaaccccgacaacattgttagtagtttagtgggaamcmctgcgtataacttgacccaaaaaagtgccacacgctatactgcccgccgttcttactggamgtggggccccacgaagacactttactcaatgagtatctattcaggaactgctgggggcaactataatttatcgacccctgatggcaccatttattattacttagaaaatcggcgggtcactgaacattttgtagacgaaagtggcgcaaaaatcacgccaccaactggctttacacaaggaaatcagctagtggtggacagtgaaaactatgtctacactgtcgcaaaagctttgccgaagatctaccaagctggtgaaaaaacctatatcttccaaggctggtttaaaggcaaaaccaagccagcaacattaaagacgacaacgaccccaagttttacaccaacttttaatgatgaggacgacatgaccgctgtgtaccaagaagcgattcccaccgcggaactaacgttaacaggtgccgttgacataatcgaaaatggcgccacaatggattactgggaggcgctactgaagaacacaggcgaagcgccgttaaccaccattaaaatcaagccaacggcaacttgggcggctggcatcggcgcacccaacacgatatttgtacaaggaacgggtcaaaacaccaaagcttttcctgtcaccaaagaacaatggacgaccggtgcaggagtgtccatcacgttggatcagcctttaccagctggcggtcaattaaaaatgaacttattaggaaccgccgttacaggaaatcctggtcaagttttaaccgctgatgttgaagtaacgggcaactttggcagtttaactgccaaagatacggtccgtattaaagacttagatcaagaaattacgagtcctgacggcgacggctttattagtaccccgacatttgattttggtaaactagcaatttcaggaagtaagcaacaatatggtttgaagaaggccgcagattactacggcaatggcactcgcaacccttatttacgcctgaatactagccaagccaattggagtttaacggcccagctatcgcaaccaaaatcagccacagacagcttgccaacaacgacccgcttgttgctaggaacggccgctgctgccagctttaccgattacaaccaaccaacagaaaccaggacaccacttggcaagaccagcaccgtgactttaaccgccgacaataccgcaacagcggtggtcgcaaaccaacagttcacaggcagtgacgtctatcagttggacttcacgtttgctaacatcaaactagaagtgccagccaaccaaggtatggctggccaacaataccaagccgccgtcacgtggaatttagtgactggcccctaaaataaaaatgcccgagccttagaaaaataagaggctcgggcatttttattgatggtcttttgatggtcgttgtgctataatagcattgaaaagagagatatgctgtaacatacctctctagtgtagagccgtttaagacggtgaccgattttgttacaaaaaataaccgtactcagtcaaagtaaacggttattttttcttgtcttctttaacaacctttaggattccgaagattaaagtcgcgataaaagaaccgaaactaatcatcagagctaaagcttctgcgatagacaaaaggcctctcctttcatagattttagtacttacattcataagcaccaccacctttcagattggatagccaccgccataacttctctacacttttattataccatttagaactaaaaaataattagttttcaatatatttttttaggaaattgtgctataatagcaatgaaaagagagatatgcttcaacatacctctctgatgtagagccgtttaagacggtgacctttttagttacaaaaaataaccgtactcagtcaaagttgacggttattttttattgtcatttttaagctttaaaagattttcctgttccctaattgttaagaatagagaagaaaagctcaaaatgttagttctgattactaacattttgagtttttttcaataaatatcaagaaaaatcagcggaaattagagagaaaatggtgaattccactgatttccaggctgttttttaccaaaaaacagtggctcctccttggtataaaaggaatcattggaaatatcaagttgtcgtatcaaaatttaaaatttcagtggggcctttttttgataaaatgaaaatcatacaaaaaatcatacataggacaataaaaataacaataaaaagttacataaaaaaggagaatggcatgaatcaaaaaagaaaccgtttatttgcaatcgctttgtgtggttctttactaatcagttcattaaatggcatcccagcaattgctgaaaccatggcggccccagatgttcaaggggaggaccgccaaacagtagtcccgtcagagggggttcaaggacgggcgcccgtttcttttccagaggcagatacggaagtnagcgtaccgccagctgatgaagagctaccagaacagactgaacaagtagtcgggcaagttgaagcgtcagtgacgagtccaataatagttaatacaccagaatcactgcgtgcgcagcgagcagtgcagacattcgatattccagagaagacgtacaaaatgtcgtttttagatgaaagtggtcgttttattgatccagcgaaagtttcgattactggggatattatgaagtttactatgcaaggcgctttgacgaaagtcggggccgtggccactaataatgtgggaaccacgaagcaattgacggtgccgaaagtagctttgtctggggatacagccataaagagttatgatttttccggcatccaaaatgaaaagattactttgccgcggttctataatgttccgaaaatcacgcccagtgcgaattacactggacaaatctatccaatggcagtgacgaaacaggtgaatgttacaggagaagtatcgaatgaggaaaccacaggcgcgaggctgaatatgtttgtatcaggtatccctaaccagtttgtcttttctcgtgctagttgggacaatgatccagcgggaaatatgtttgcgcgtggctttaacatggctactgcaggcggcacaccagcttatctgactacggatgatcacatttactattatgtgcctaacaaacgggttaacatttattataatgacatgaccccgaatggcttaccagcgtatcctccagggtataatgccagtctttcaaaaacagtagttgattcagaaaattttcactataaagcgccaaaagcttttccagaattctttagttctgggaatcgtcacttccagtttaaaggctggtataaagggcctgcaagaccagcggatccaaaagccgttaagttagaaacctcattgacgccagagttcgatgtcacttacgatggtgccgataatttatatgttttttatgatgaagtgaaagaaatgaccactactattccagaagttacctataagtttggctttgttgatgaaaaaggggcgcttgttgcgccaacgaatgtagacattcaggcgaacttaacaactgtcgaggataaggtggtccagaaggtgggggctattacaggcgctaatgtaggcaatttaaaacagttaaccgttcctagccaaacactaacctatgtacctaaaattaaagttgcttcttctggggtaaccgattttcggttgactattcccaagcgctataaaattccaacagtcacacctggttcattctacactggctcaacgaccgcctatcctttggcgacaacgctgttaaggcatattagtggtcaggcagatgaacggataacaacggatggcactcgctatagtttatataatttaccgacgcctcatagctatcgtatgtacagaagtagttggcaacctgacgttaccaacacgggatttagtgcaactttaaacatggcgacgaccgagatttatccagcttatttcacgaccgataacacgatgtactatttcttagaaaaccgccgcgtcactgaacactatgttaatgaagcaggtgctgaggtaccgatgcctacaggcttcacgcaagggaatcaaacggtgattgacagtgatacttatcattttaaattggcaaaggaattgccgtttagttattttttaaacaataaagcataccgatttaaaggctggtataaaggcaaaaccaaacctaaggtattggaaacgagtcgaacgcctgagtatgatacaactttcgatgataacgatgatttaaccgttgtttacgaagaaattaaatacggcggaaatgcggtgacatttggttttgttggggaagatgggcaattgcttcagccgacagggtttcaggtgactacggatattgttgaaacaatcgatgggctgagtacggttttaagtaatgtttcagctgtcgacagtacaggcaacgttaaaactttgacgatcccgcaaaaggaatatgtattgactccccagatgaatttctatggaacaaaaaattcattgattacgattccaagacaataccaagaaatttcttttaccaaacctgccaactaccaaggactagattatccagttgcagggcgtgttgagaatatgtttagtggtaatctgtatgttgagggggcacaaccaccttacttttctgcttcgaaagtcaaagccaatcaatacaaaataattgagtttcattggaaagaagagcctacacaaagtttctctagtttgtacaaagctacgttaattcgaagtagcgtggcaccaacaggcgtagaaatgtatcctaataagccaatctattactatgcgaccaatcgccgagtgactgaaaactttgtagataaatctggcgcaaaaatcacgccacctcaaggatttacgcaagggaatcaagtcacagtcaccagtgatccttttacttatactgcttcaaaagctttaccaagcgtttatgcggctggggcaaaaacctataagtttgttggttggtataaaggaaccaccaagccaacgaccttaaaaacaacggctactcctaattatttggtggattttgatgataatgacgatatgacggcggtctatgaagaagaaacgccgactgctgctttaactttgaccagcaccaaccgtgtcgtgaataatgacgatagtgtagattgggtggcaacactgaaaaatactagcctggcaccacttaaaacgctgacagtgaaaccagcgactacttggcctgcaggaattggtacgccgacgtcactttctgtccaattggacggacaagcaccgaaaatttatccagtaacggcgactacttggtctgaaggaatcagcttaacaggtcttgaaataccggcaggtcaaacagccaacgtgacgcttgttggcaccaaaatttcaggaacatcagaccaacgcttgacggcaacccttgatgttacaggaaattttgcgacagtgagcgccgcggatgcggtacgtctgacagatacaacccaaggaacaattacaccaacagaaggctttatcagcgtgccaacctttgattttggaaaaatgaatattgctagtaaaacgcaacaatcaggcttgaaaaaagcggccgattactacgaaaatggtacacgcaatccttacttgcgaattaagaaaaatcaaccgaattggcagatgacagcgcaactatctcaaccgaaagcaaccacagatagtctgccaacagcgactcgtttattgttaggtccagcgaatgtttcaagttttacaaattataacgaagcaaccgaacaaatcaaagcagttggtaagactagttctttgagcttaacggcgaataatgtggcaaccagtgttgtcgcaaaccaacagttcacaggtagtgacgtctaccaactggattttacgtttgagaacattaaattagaagtaccagccaaccaaggaaccaaaggacaacagtacaatgctgcggtcacttggaatttggtgactggtccctaaaataaaaatgcccgagccttgaaataggaggctcaggcattttttattgatggtctttttagggttgttgtgctataatgataaagaaaagagagatatgcttccaacatatctctctgatgtagagccgtttaagacggtgaccaattttattatttaaaaataaccgtgcttggtcaaagtagacggttattttttcttgtcatttttaagcaatttcacaatcagcgcaatcaaagcaatggtaaacataccaaacccaagaattgtctgaattgtttcatatgctgacaaaaggcctctcctttctgtgaatttcggaaatacgtgcatacgcatcacctctctttcagattggatagccaccgccataacttctctacacatacattataccatgtggggctaaaaaataattagttttcaatatatttttttaggtaagtgtgctataatagcaatgaaaagagaggtatgcgccaacatacctctctagtgtagagcggtttaagacggtgaccttttggattatttaaaaataaccgtacttggtcaaagtagacggttattttttcttgtcttctttaacagcttttaggattccgaagattaacgttgcgattcttgttgcaaagcgcatgttcctgtgcgcttgccgccgccataacttctctacgcttagagtatactatgtaaaacaaaaaataattagtttccaatatattttttaggcaattgtactataatggtaatgaaaagagagctatgcgctaacatacctctctgatgtagagccgttactaacggtgacaaaaattaatatttttgaaatgaccgtctaactaggcaaagttaagcagcgcccctttcattaaggggcgctgctttttagtcgttattgcgattgttcagtgtcttttgtagagaggttcatttgttctttgatggcattttcgacacgttggcgttcactctcttccacaagttgataagaaataccttcaatccctgtcacgccatcgccagtgtaatcgtagccttttaattgatcggtttcaatcgtttttagtgcgggggtgtatttttttagcattgccatcatttggtcaaaggataagtcggtttcgccatgttcgccgattacgtccagaatttcttgatattttagcaagctgttaaaagaaagtagcttgttggttaattcgattaaaacttctcgttggcggcgttgacgaccatagtcgccttcggggtcttcgtaacgcatgcgcgcgtattgtaaagcttcccagccacctaaatgctgtttgcctttcggataatgaatcccttcagcgtcaaaagcaaaggcattgtcaacagtgacgccgcccaccgcatcgccaaggtccttcatagcatccatatcaattgaaaagtaatgattgattgggatgtgcaagacattttcaaccgttttaatttgcatatcggcaccaccgaaaacgtgggccgcattgattttattgtattcgccattggtgccagccatttccacatagtagtcacgcgggatgctagtgatggtagttttttgtaattgattattcactgtaaccaccattaaggcgttggagcggtaatcggttttgcgttttgagtcattcgcaatccccataattaagaaactaaccggttcccctttggctaaatcgggactcttcgttgaagattttcttggtttatacatggtgttcgccgttttttgcaaattgcgatacatgctgacgccgtaagccgaaacagaaagtgtacctaaaaataaaagggttaaactgaagaccacgaataaactttttcttttacgagaatggcggcgccggcgttgtgtcgatacttctgcttcctctggttcaggtgccggcaaataacgttggacaatttgaaatgaaaagttgatccagctataacttaggagcatcccagcaatgacatcactaggataatgaacgcgtaagattaagcgacctaacacaatcaaaactaaataagtgagtaagaaaattttgatgcctttggttttttcgacatgaagataggtcaaaatgatcaaaatcgtacagactagcgccattgctaataatgaatgtccgctgggaaagctagcagagctccggtcagctaaagcgcctaggtttggtcgagcccgacccaccacgtgtttaaaaacgctccctaaaaagccgacagctaataggttactgacagcccaaaaggctagaattttttcttttttgcgtaaaaggtacaccatcaatgataagaagaatagcagcattggtccaatcgtggcagtttttgctaacagattgaccgctgttaaaagtggggcatttaattgccatttgatgtgatagatagcttcgtccatttgttgaaaccaatttggactagccgccactaacaaagtgaggaaagtaaaaccaagcgttgttagggcataaagtggaaattttttattcgatgtttgcatgagaatccctttctttttcccttgaaagagtagactaagccagcatcgatcgtaaataagcgcttgcgactaaacaggacacagcaagccaatcggttctcatcgtctgagctttagcactatccaacgtaaagatttctcttagctatttttagaagagccttaattcgaccattcctgttttacacattggtgtctttcgacatttctgcgcaatagcctatgtttggataggagcctcacctaacaaggttattttatctaacgctagaagtatagaatttatgcagcggttctcacaatgaagtttaagaaaatttattgttttttaaataaatttaaaggtgtgggagaaaagcgttatttcggtaaatttattttaaaaacggaaaaacgttttacagtatcggtctttaacgatataataaaagaatagatgaaaaaacgaggaggtgaacagcatgctagttaattttacagtcaaaaatcttctatcttttaaagaggaacaaacactttccctacaaacaggtgcgtatttacgaaagtatgtcaataatcgtttgcgaagtgaaacctaaaaattacccagaaaaactaaggttactgaagagtgccattgtttttgggggaaatggttcaggaaaatcaaatttagtgagtgggttaaatgcattaaaaacattagttttaagagaacaagcttcgattaatgatgctttattatatgaaccttttgcgttagaccctctcactaaacaaagcccatctgttatgaccattgaatttattaatgacagtgtcttgtatcgctattcgttagctaacacagcgcgcgaagtagttaaggaatctttagagatttatgacaaaacgcaggatgattttgtttattattttaaaagagacggtgcggaatcttccgtttttccagaaaaatatcaagaataccaaacacaaattaagtctaattcgttagttatccatacgttggaatcaaaaaatgatcagcacgctacgaatgtcgttcgttggtttgccaatcagttagttatttttgatgggtctttacggaatattgaacggctgagcaatgaaaaagacaaagagaaattcttgaactttttgaaacttgcggatatgaacatggttgacctggttcctgtgaaagacaaagaggaagattactcgaaacaagaaaaattagccgctgttttagaacgaattatccaagaaaaagacccgaccattgaaattggtcgagtcaagaaaagtctgtattcgctgtactctgtttataaccaatatgatgaaatgaatcaagtggtcggacaagaacgtattcattatgatttggaatcttctgggacgaaaaaattaattggcttagcgctaaatattttatttaatccagaagaaaaagtttttgtttttgatgaatttgatgatgcatttcatcaagagttgtcaggaacattgttagaagcgttcaatgccatggagacgaatacacaatttatcttgacctcccatgaacttcatttgatggataatcaattgagaaaggatcaaatttacttcacagataagaattatcgtggcgccagcgaattatacgctttgtatgactttgaagcagacccaaaaaaaggtcgcggagatatcacatattatcgccgttatttaaatggtctgttcggtggtgttcctcatattgatcgaagtgaaatcgttcaggcagtgaaggtaaaggagtagaagttggtatgccaaaaataaaaagggtaaaaaaaggaaagaawttaaaaccaatgtcatgattttttgcgaggagaaacagaagaagcttaccttagattgattwaacgaaaatattctgcagtcmatattwaaagtaaactcmaagtaaacmtgtagacgtcmaggrgggcgttggtcgaatacgccgtttcctgtattcggagtatggggaaaagcggacgnggataattatgatttgttttatgttatgtatgacaagg

SEQ ID NO: 168 - DNA, 1563 bp; double-stranded, linear
gaaaatttatctttgccattaatacgcaaaatgattttttggatgattctcgtttctgctttaatggggattgggttgtcatttattgtcggctggccgttattaatgggtctttattgttacttaattggtattttttattcatcaggaccgaaacctttatctagtctaccattaggggaagttttctcaggatttacaatggggttcatgattacccttatttgtgtctacattaatacgtttgaagttttcaattggtcagcagctaatttatgggggattttcttagtcgccttacctaacacttgttacattgctaacttaatgttagcaaataatatctgtgacttagaggaagatgaaaataacaagagatatacattagttcattaccttggcaaagcaagttctttgaaattattcgtcggattaaatacaatagcaatgttagccattttgttagctgtcggtttaggattaaccccgccaacaatgttactcatgcttttaactttaccttttgtacggaaacaaacccaagccttactgaaggaacaagtgaagagtaaaacatttgtttgtgctgtgaagatcttagctgtgggagcaactgcacaagtgctattttttgccataggtttgtggtggctgtaaattttttatagagtggaagggaatcaaaatgaataagaaacatgttgttattttaggtgctggttacgcaggcttaaaaacattacgcgaattacaaaaaggcgccaaagacgtcgaaattactttagtggatcgtaacaactatcactacgaagcaacggatttgcatgaagttgctgctggaacacaaccagctgaaaaaatcacatacaatattatggatgttgtcgatgaaaaaatgaccacctttatccaaggaacagttaaaacaattgatgctgcaacacaaacagttgctttagaagatggccaaacaatcaattatgattacttagttgtttctcttgggtttgaatcagaatcatttggtatccctggtgtgcaagaacatgctctacaaatggtagatgtgaaaacggctttaaacgtgtatgaacatatccaagaacaaatgcgtcaatataaagcaactcaaaacgaagaattcttaaaaattgttgtctgcggagcaggctttacagggattgaattattaggttctcttgttgaaaacaaaccaaaatttgctgaaatcgcaggtgtctcagcagatcaaatccaaatttattgtgtcgaagcagttactcgcctattgccgatgtttaacgaaaaacttgcgaactatggtgtgcaattattaaaagattcagctattcatttattattaggtaaaccgattaaagaaacaaaccaggcgcagttgtttatcaagataacgaagcaggcgacttggcagaactttctgctaaaacaattatttggacaacgggtgttagtgggagccacgttgtaggcgattctggctttgaagctcgtcgtggtcgtgtcatggttcaaccagatttaacagatgcgaaccatagcaac

SEQ ID NO: 169 - DNA, 3168 bp; double-stranded, linear
aagcgttgacactcgtgattttattcaaaacaactacacagagtacaaaggcgacgacagtttcttagaaccaatcgctccgagcactgacaaattatggacaaaactacaagaattatttgaaatccaacatgaaaaaaatggcgtttatgacatggatagcgatatcccagcaactattacgtcacatgaacctggttacttaatcaaagaagaagaaaaaattgtcggtttacaaacagatgtaccattaaaacaagcatttatgccattcggtggtattaaaatggcgaacaatgccttagtttcaaatggttatgaaactgacgaagaaatgacaaaaatcttcacagaatacagaaaaacacataaccaaggtgtttttgatgcctacacagctgaaatgcgtttagcacgtaaaaacaaaatcattactggtcttccagatgcttatggccgtggccgtattatcggtgactatcgtcgtatcgcattatatggtatcgactacttaatggaacaaaagaaaaaagatcatgataacactggtaacaaagaaatgacagacgatgttattcgcttacgtgaagaaatttctgaacaataccgtgcgttaaatgacttaaaacaaatggctgcttcttatggtttcgatatttctcgtcctgctgcaaatgcgcaagaagcaatccaatggttatactttggttacctaggtgccattaaatctcaaaatggtgcggcaatgtcaattggtcgtatctcagcattcttagatatctatatccaacgtgacttagaagcaggtttaatcactgaatttgaagcacaagaaatgattgaccatttaatcatgaaattacgtatggttaaatttgcacgtacaccagaatacaaccaattattctctggttatccaatttgggcaacattatctattgctggtatgggtattgacggtcgttcattagttaccaaaaatgacttccgtatcttacacaccttaacaaacatgggaccatctccagaacctaacttaactgtattgtattcttctcacttaccagaaggtttcagaacatatgcagctaaaatcgcgaaagaaagctcatctatccaatttgaaaacgatgacttattacgtgaaaactggggctctgacgactgtgcaatcgcatgttgtgtttctgcaacagttatgggtaaagatatgcaattcttcggcgctcgtgcgaacttagcgaaagctgttctttatgcaattaacggcggggtcgacgaaaaaactaaaatgcaagtagcaccaaaatatcgtccaatgactggtgacaaattagattaccatgaattcatggaacgctataaagacatcttagactggttagctgaattgtacgttaacacattaaacattattcattacatgcatgataaatatgcatatgaagcaccacaattagctttaatggatactgatttacaacggacattcgcaactggtattgccggaatctctcatgcgactgatagtatcatggcaattaaacacggtgaagtagaagtaatccgtgacgaagatggtatggcaattgattatgtaccaacaaaagaattcccaacatacggaaacgataacgaagaagccgatgcaatggctaactggattttagattactttatgacacaaattaaacgtcaacacacataccgtaactctaaaccaacgacttcattattaacaatcacttcaaacgttgtttatggtaaagcaacagggaacacgcctgacggacgtcgtgctggcaaacctcttgcaccaggtgcgaacccaagttatcaagacggtaaattcttaggtgagaaaaatggcttattagcttcattaaactcaacagctcgtttagaatatacaatcgctttagatggtatttctaatacacaaaccatcaaccctaatggtttaggtaaagacgacgacacaagaattaacaacttacgtaacgtattagatggctacttcgataaaggtggttaccacttaaacgtaaacgtatttacaaacgaattattattagatgcacaagcacatccagaaaaatatccaaacttaactatccgtgtatctggatatgccgtgaaattccgtgacttaactcctgaacaacaagcagacgttatttcaagaacttcacacgacagactataaaaaacatttacattatttaactgaaagggtgacatttaacgtgtcatccttttcgtttgaaagaagagggatcattatgacaacaccagttacaggtagaattcattcaacagaaaattttggtaccgttgatggcccaggtgtccgttttatcgtatttacacaagggtgtcgcatgagatgtcaattctgtcataatccagatacttggaaaattggttccggtggtcgtgtggtgacgactgacgaagtattagaggaagcattacgttttcgctcttattggggcgaaaagggtggtatcactgtcagtggtggtgagccgctattgcaaatggactttttgatcgatttatttaaaaaagccaaagcacaaggcattcatacaaccttagatacgtgtggcaagccttttactcgggaagaacccttcattagtcaatttgatgaattgatgaagtatacagatttactcttatttgacatcaaacatattgataacgagcaacataaactgttaacaacgcaatcaaatgataatattttagagatggctacctatttatctgaaattgacaaacctgtttggattcgccacgtattggtgcctcaacgtagtgattacgacgaatatttaatccgtctggatgccttcataaaaacattaaacaatgtagataaagttgaagtgcttccttaccatacgatgggcaagtacaaatgggaagaactaggtattccttatccattagaaggaattgagcctcctaaaaatgatcgtgttgaaaatgcgaaaaaactactacatgtcgaggactatcaaggttatctagcacgttaacaaacgaaaaaatagaaaagaagacaatttttttgttgtttcttttctattttttgttatcattaagagtgaatcaaaaccaaggagtgtgtattatgtcaaaaattttagtttttggaca

SEQ ID NO: 170 - DNA, 1282 bp; double-stranded, linear
accatcttaatttgacaatgaatgacactggttgagaagtcgattccaatatggaaggctctgtcagctagtttttcactctaccaacaaaataatcaaccaaaataacaacggaaagccaaacaagaaacatactaatcatgcttcttcaaagaagcacaaataaaaaagtgatgactcgagaagaaaatctctatggagtcatcgctttttcttatattttagttaaaaaattattttactaaaggttgaagtaacttgttccagaaactaataagtgggccagcaccaaatgcacaaataattgtaccaatcccaattggaccaccagcaataaagccaattaataggaccaacaaatcttgtgcttttcgaacagaagcgtaaggtttgttggtttgttgacagatggttggcgcaatcgcatcatagggggactcgccttgatctgtagccatgtataaggcgcagccaaatgtaaaaatcaggactccgacgaataaagaaagtagtttgccaattgttgagcctcctaaactattggcataaggttgaagccaagtagaaatctgttgaatcaaaattcctactaaaagcatatttaaaatagttcctagaccaatggcttttttgttttttaaatagacatagaataaaataaacgcattgacaataatttgaaaaatgcctaattgcataccaaacatcgaagaaagtccgatattcatagcagtgaaaggatcaactcctaaacctgccactcttaaagtggatgcgccaatcccgataataactaaaccaattaaaattaaaagaacatttttgactagtttcatggtaagcctcctgaatagattttgtgtgtgatagtacaaagtctgcaacaaaaattcatagagaattttgttgcagactactttttaaccagctccgtgttggaacgaaggatatagagacatcccgccatctacaaagagtgttgttccggttacgtatgaggattcatcagaagctaaccaagcggccgcagcagctacttgatttggtttaccaataatacccataggaaccatgcttgttgtttgttttaactgttcgggatcggaaaatttttcagcattaataggtgtgttaatcgctccaggcgcaatacagttggcacgaataccatattccgcatattccaaagcgattgttttcgtgaacatttcggttgcgcctttacttgccgcatagtgggcgaacgttggccaaggaatctttggtgtacggagacatatta

SEQ ID NO: 171 - DNA, 11871 bp; double-stranded, linear
nnaaataaagaaatcataaaataactttaaaagtcctcttttaaaggaaaatgtctgtaaaatagagagaaatggttttctttctcgtcaagtaatgataaaataaaacggatagattgtgcttcttgtacaaaaaggatacaaaaataaaaagaggtaattgaaaggaacacagataccaatggcaaattttttgaaaaaaatgatcgaaaacgataaaaaagaattaagacgattagaaaaaatcnccgataaaattgatgcacatgcaagtgcaatggaacaactaagcgatgaacaattacgtgaaaaaacagatgaatttaaagcccgttatcaaaaaggggaaaccttagacgaactattaccagaagcgtttgcggttgtccgtgaagctgctaaacgagtactaggtttattcccgtaccgtgtccaattaatgggtgggattgtgcttcatgacgggaacattcctgaaatgagaacaggtgaagggaaaaccttgactgccacaatgcctgtatacttgaatgcactatctggcgaaggagtacacgttgttacagttaatgaatacttagcaacccgtgactctaacgaaatgggagaattatataatttcttaggcttaagcgttggcttaaacattaactctaaatcttctgatgaaaaacgtgaagcgtataactgtgatatcacttatagtacaaataacgaattaggatttgactatttgcgtgataacatggttgtttatcgcagccaaatggttcaacgtccattaaactatgcaattgtcgatgaagtggattcaatcttaattgatgaagcaagaaccccattaattatttctggacaagctgaaaaatcgacagcactttatacgcgtgccgataattttgtcaaacgcttaaaagaagatgaagattacaaaattgatattcagtctaaaacaattggtttaacagaagcaggtattgaaaaagctgaacaaacttttggattggataacctttacgatattgaaaatacagcattaacgcaccatttagatcaagcgttacgggcaaactatatcatgttactagacattgattacgtggttcaagacaataaagtcttaattgttgaccaatttactggtcgtatcatggatggtcgtcgttattctgatggcttgcatcaagcgattgaagcaaaagaaggcgtcgaaattgaagatgaaacaaagacaatggcgacgattacgttccaaaactacttccggatgtacaaaaaactagccgggatgactggtactgctaaaacagaagaagaagaattccgtgaaatttacaatattcaagtcattcaaatcccaaccaatcgtccaattatccgtgacgatcgtccagatttactttatccaaccttagaaagtaaatttaatgcagtggtggaagatattaaagaacgttaccacaaagggcaaccagtgttggtggggactgttgcggtagaaacgtcagaattactttctgataaattaaacgcagctaaaattcctcatgaagtattaaatgcgaaaaatcactttaaagaagccgaaatcattatgaatgccggtcaaaaaggcgcagttacaattgcaacaaatatggctggtcgtggaacggatattaaacttggtttaggtgtacttgaactaggtggtctagcagttatcgggacagaacgtcatgagtcacgtcgtattgataatcagttgcgtggacgtgcaggacgtcaaggggatccaggggtttcacaattttatttatctttagaagatgacttaatgaaacgctttggttcagaacgaattaaaacattcttagaacgaatgaatgtgcaagaagaagatgcagttattcaaagtaaaatgtttactcgccaagtagagtctgctcaaaaacgtgtggaaggaaataactatgacacacgtaaaaatgtcttacaatacgatgacgtgatgcgcgagcaacgtgaagttatttatgcgcaacgacaagaagtaattatggaagaaaatgacttgtctgatgtattgatgggcatggtaaaacggacgattggccgagtggtggatagccatacacaattagaaaaagaagaatggaatttagatgggattgtcgattttgcagcctcaacacttgtccatgaagatacgatttctaaaaaagatttagaaaataaatcagctgaagaaatcaaagactacttagtggcacgtgcgcaagaagtatttgaagaaaaatctcaacaattgaatggccaagaacaattgctagaatttgaaaaagtagtcatcttgcgtgttgtcgatactaaatggacagatcacattgatgcaatggatcaattacgccaatctgtcgggttacgtgcgtacggtcaaaacaacccattagtagaatatcaaacagaaggttattctatgtataacaatatggtgggttcaatcgaatatgaagtaacacgtttattcatgaaatcggaaattcgccaaaatgtccaacgtgagcaagtagctcaaggacaagcggaacatccagaaacagaacaagatgcagctgcacaaagcaacacaagtgcgaagcgtcaacctgtgcgtgtagataaaaaagtgggccgtaatgatttatgcccatgcggaagtggcaaaaaattcaaaaattgtcatggaagaaacgcttaattaaagaaaaaacgcagggtggggcaatttgtcccgcctttgctctttttacaataaaaagaaagaaggaatcattttggaaaacccagaaattcgtacattattagacgaaatgacacaaaaaattactagcttcaggaggtctctttgacttagaccagttagaagaagacattgccgaggcggaaaatcggatgggagaacctggtttttgggacaacacagaaacggctcaaaagctaattaatgaaaccaatagtttgaaagaaaaatatcaacaatttcatcagctctctgaggaaattgacgaattaacggtgatgtttgaattacaacaagaagaatatgatgcagagattcaagaagaattggaagaaagaattcatctcttgcaagaacgtttaacaacgtatgagctatccttactactaaatgagccatatgatcataataacgccctaattgaattacaccctggtgccggtggtactgaatcacaagattggggaagtatgcttttacgaatgtacacacgttgggcagaaagtcacggtttccaagttgaaacgttggattaccaagctggagatgaagcagggattaaaagtgtcaccttattaatcaaaggttacaatgcttatggttacctaaaatctgaaaaaggtgtccatcgtcttgtgcggatttcgccctttgattccgctaaacgccgtcatacttcgttttgttcagttgatgtaatgcctgaattagacgacacaatagaaattgcgatcaatccagatgacttaaaaattgatacctatcgagcaagtggtgccggtggtcagcatattaataaaacagaatcggctgttcgaatcacacatattccaacaggtaccgttgtcgcaagccaagcacaacgttctcaattaaaaaaccgtgagcaagcaatgagtatgttaaaagccaaattatatcaattggaaatggaaaagaaagcccaagaagcagcaagtttacgtggtgaacaaatggaaattggctggggctcacaaatccgttcttacgtgttccatccgtattcaatggtcaaagaccatcggacaaattacgaaaccggcaatgtacaagctgtgatggatggagaccttgatggtttcattgatgcctacttaaaacagcgcttaagttaagctcttcattaaattgaaataaaaatgtaacttaatgcaagaagtttgcaatattgacatgttataatgagtaggattgaagaaaaaagagatggagagaacgccatgattgaaatgaaagatgtaatgaagaaatattcgaatggtacaacagcgattcggaatatttcagtagagattgaccaaggcgagttcgtctatgtggttggtccctcaggtgcagggaaatcaacctttattagattaatgtatcgtgaagaaaaagcaacaaaaggtaatttgacagttgcaggtcatgatttaatgaaaataaaaaataaagaagttccttatttacgtcgtgaaatcggcatcgttttccaagactataaactattaccaaagaaaactgtgtatgagaacgtggcctatgcgatgcaagttatcggacggcgtcctcgcgaaatcaaaaaacgcgtgatggaagttttagatttagtcggtctaaaacataaggtacgtgtttttccaagcgaactttctggtggggaacagcaacgggtatccattgcacgagcaatcgtaaatacaccgaaagttttaattgccgatgaaccaactgggaacttagatccagagaattcatgggaaatcatgaaattgttggaccggattaatgcacaaggaacaacagtcgtgatggcaacgcataatagtacaattgtaaatacgattcgtcaccgtgttattgccattgaaaatggtcgcattatccgtgaccaagtggaaggagaatacggctacgatgattagaacattcttttctcatttatttgaaagtatcaaaagtttaaaacggaacggttggatgactgttgcctcagcaagtgcggttacaattacattagttttagttggtatttttatgggcgttatttttaatgcaacgaaacttgctgatgatatcgaaaaaaacgtgacagtgtctgtctttgtcgatattggtacaaaacaaaatgaaatgaaaacattagaaaaacaacttaaaggattagacaatgttgaagatatttcttattcaaacaaagatcaacaattgaaaaaaatccaagaacaaatgggggatgcctggaatcttttcgaaggcgacagtaacccattatacgacgtgtattatgtccgtgcaaaaacaccagaagacacgaaagatattgcgaaacaagcagctaaattcccaagtgtttttaaagccgattacggtggtgtaaactcagacaaaatctttaaaatcgctcaaaccgttcgaacttggggcttagcagctgctgcattacttttattcgttgcagtgttcttaatttccaacactattcggattacgattttatctcgtcaaaaagaaatccaaattatgcgtcttgtaggagccaaaaacagtttcattcgttggccgttcttcttagaaggtgcttggattgggttgattggcgcaatcgtgccagtcattattakgacgttaggctaccatcaagtttataacatgttcaacccgcagttattgcgttcgaattattcattaattcgtccagaagattttatctggaaagtcaatctattaatgattgcaacaggaatgattattggatcactaggttcagttatttcaatgcgtcgtttcttgaaaatttaaacgaaaaaaagctctccattttggagagctttttttgttttagttttaaaatacttgttatttaatttaagagttttctcagttgtaccaacaaattgataacttataattttcaagtcctacatataatggtaaaatagaatggattgaaattaattggaggaataatgaatcgatgaaaaaaagattgctattatttattggtttggcaagtatacttactttgacaggatgtgcaaaatggattgatcgtggtgaatccatcacagcggtaggctcatcagctttacaaccattagtagagacagcgagtgaggaatatcaaagccaaaatccgggaagatttattaatgtccaaggtggcggaagcggaacaggtctgagtcaagtccaatctggcgcggtagacattggtaattctgatttatttgcagaagagaaaaagggcatcaaagcggaagacttaattgatcataaagttgctgtcgttgggattacaccaatcgttaacaaaaatgtcggtgtcaaagatatctcaatggaaaatttaaagaaaatctttttaggtgaagtaacaaactggaaagaacttggcgggaaagaccaaaaaattgttattttgaatagagcggccggtagtggtacgcgtgcgacttttgaaaagtgggtcttgggagataaaacagccattcgtgcgcaagaacaagattccagcggcatggttcgttccattgtttctgatacaccaggagcgattagttataccgcattttcatatgttactgatgaagtagctacgttaagtattgatggtgttcagccaacagatgaaaatgtaatgaacaataaatggattatttggtcttatgaacacatgtacactcgtaaaaatccaagtgatttaaccaaagagtttttagactttatgttgtcagatgatatccaagaacgtgtgattggtcaattagggtatattcctgtttcgaaaatggaaattgaacgggattggcaaggaaatgtcattaaataattctcttaacacaaaatttacaaacttaacataaaatttacatgttattaaaaacaaattgatgtaaaaaaggtacactatttttatctgtaaaagttggattgtttgaggaggaaatattcttggaagatgtacagaaaaaattattaacaaaatcgaaaagagccaagatggagcaacgagggaaatttattagtttcctatgtattgccttaattgtagcagtggttgtttcaattttctattttgttgcaagtaaaggacttgctacattctttaaagataagattaatgtgtttgatttcttatttggaacaaactggaacccaagtgatatcggtgcagacggtaaacccatggttggggctttaccgatgattgcgggttcctttattgtaacgtttttgtcagcgattgttgcgacgccatttgcgattggagcggctgtttttatgacagaaatttcacctaaaaaaggagcaaaatttttacaaccagttattgaattacttgtagggattccctctgttgtttatggatttattggtttatctgtcattgttccttttgtccgttcaatctttggcggaactggcttcggtattttagctggtacgtttgtgctatttgtcatgattttaccaacggtcactacgatgaccgtagatgcattaaaagccgtgcctagacattatcgtgaagcgtcgttggcgcttggtgctacgcgttggcaaacgatttataaagttgtcttgcgggcagctgtgcctggtattttaactgcggttgtctttggtatggctcgtgcgtttggtgaagccttagcaatccaaatggtaatcggaaatgcagctgtgatgccaactagtttgacaacaccagcttcgacactaacaagtattttgacaatggggattgggaatacaattatgggaacagttgaaaacaacgttctttggtctttagccttgattctattgttgatgtctttactattcaacattgttatccgaattatcggtaagagaggagccttaaaataatgaatgcaaaaaaagcagataaaatcgcaacaggtatcttatatgccgtatctggcgtcattgttttaattttggcggccttactgatttacattttagctagaggaattccacatatttcgtgggaatttttaacacaaccatccagagcctatcaagttggtggtgggattggtattcagctgtttaactcactatatttactattgattacaatgattattagtattccaatttcattaggtgctggaatttacttatcggaatatgcgaaaaagaattggttaactgatttaattcgtacctcgattgaaattttaagttcattgccttccgttgttgtcgggctgttcggcttcttgattttcgttgtacaaatcggatatggcttttcaatcttatcaggtgcgttagcattaacattttttaacttaccattattgactagaaatgttgaggaatctttgaaagccattcattatacacagcgtgaagcggggttagccttaggtctttcacgttgggaaacagttaaaaaagttattttgccagaagcattaccaggaattttgacaggtgttattttgagttctggtcggattttcggtgaagccgctgcgttaatttatacagcaggacaaagcgcacctgccttagatttcagtaattggaatccattgagcgtttcaagtccaattagcattttccgtcaagcggaaacgttggctgtgcatatttggaaaattaataccgaaggaacgatgccagatggcgctgcggtctcagcaggtgcctccgctgtgttaattttagtagttttacttttcaatttcggcgctcgttttatcggcaaccgtctttataagagaatgacatcagcttaatgttaggggaattagcatgaaagaatacaatttaaatgatacccatttacttcaactagatagccaaaaagacccgattgcgttacacacggaagacttacatgtcttttacggggacaatgaggctatcaaaggtgttgatttgcaatttgaaaagaacaaaataaccgccttaattggaccttctggttgcggtaaatccacgtatttacgttcgctaaatcgtatgaacgatggcattgccaattcacgtgttactggaaaaatcatgtataaagatgtcgatgtcaatacgaaagaagttgacgtctacgaaatgagaaaacgcattggcatggtttttcagcggcccaatccatttagtaaatctatctatgaaaatatcacattcgcattgaaacagcatggtgaaaaggataagaaaaaattagatgaaatcgttgaaacaagtttgaagcaagccgcactttgggatcaagtgaaagataacttaaacaaaagcgccttagctctgtctggtgggcaacaacaacgtttgtgtatcgctcgggcaattgcgatgaaaccagatattttattgttagatgaaccggcaagcgcgttagatccgatttcaacaggaacggttgaagaaacgttagtgaatttaaaagatgattacacgatcatcattgtgacacataacatgcaacaagcggcgcggattagtgactatacagctttcttctatatgggtaaagtcattgaatacgaccatacaagaaaaatctttacacgaccaaaaattcaagcaacggaagactacgtttcaggacattttggttaggaggagcaagatgggcaaagaaattatttcatcaaaagatttacatttatattacgggaaaaaagaagcattgaaaggcattgatttaacttttaatcaaggagaattaactgccatgattggtccttctggttgcgggaagtcaacgtatttacgttgcttgaatcgtatgaatgatttaatcccagacgtaactattactggaagtgtcgtctataaaggaaaagatatttatggaccgaaaacagataacgttgaattacgtaaagaaattggcatggttttccaacaacctaatccatttccgttttcagtttatgaaaatgtgatttaatggcttgcgcctaaaaggagtcaaagacaagcaagtcttagatgaagcagttgaaaccagtttgaaagctgctgccgtttgggaggatgtcaaagataaacttcacaaaagtgcactttcactttctggtggacaacaacagcgggtttgtatcgctcgtgttttagctgtggaaccggatattattttattagatgaaccaactagcgccttggacccagtttctagtggtaaaattgaaaacatgctgttaacattaaaagagaaatataccatgattatggtgacacataatatgtcacaagcatcacggatctctgataaaacggccttctttttacaaggtgatttaattgaatttaatgacacgaaaaaagtatttttaaatccaaaagaaaaacaaacagaagattacatttctggtaaatttggttaaaagggggaaaaagaatgttacggacacaatttgaagaagaactattgaatctgcacaatcaattttatgaaatgggtatgatggttagtagtgccgtccataaatccgtgaaggcatatattaatcatgataaaaaattggctcaagaagtgattgatcgcgatattgaaattaatgatatggaagtcaaacttgagaaaaagagttttgaaatgattgcgttacaacaaccagtgacaacagacttacgtatgattattactgttatgaaagctagttcggatttagaaagaatggcggaccatgccgtttcaattgctaaatcaacgattcgcttaaaaggagaaacacgtattcctgaaatcgaaaaagaaatttcagatatgtctgattatgtgaaaaaaatggtggataatgttttaatcgcctatgttaaaacggatcaaaaagatgcacgaatgattgcacaaatggatgatcgtactaatgaatatttcgatagtatttacaaacatgccgtagaagcnatgaaagctaatccagaacggtcattagcggractgrttatctacatgtggcacaatacttggaaagaattggcgactatgtcacaaatatttgtgagtggattgtttacttggcaactggtaaaattaccgaattgaatagtaatcgtgacgaacaattttaagaaaaacaaataaaaaaaactaggagacggccttttttagaccaattcctagtttttttagcgtaaaatgaactgattttataaaactagtccttactaatgagaagaaatcgttcttaagtcctatgacaaatgatcaaaaacaaggcataataatgcatgtaaggaaaacactattgagtgaaaaatttgctaaggaggcaatatccatgaaagaaagagaacgcgtattagaattagtgaaaaaaggtattctaacgtcagaagaagcgttaattttattagaaaatatggcaactgaaaaagatgaaaaacaaatcgaaaaagctgctgaaaaagttgatacacaaaatattggaacaacaaataaagaagatcaagtcgcagatttaatgaatgcattagaaaaaggcgaatcagaaggacctactgttgattcgtttgaagaaaatacacaggacagtgcagaaaaagatcgtgaaaacttagaaagaattcttgatgagttagcaacaaaagccaatcgtgcttcggctgaattggacgaagtcaacgcagaaattgccggcatcaaagaagaaattaaagaagtcgcagaagaaattggaacattagatacaaaagaagaattagatgcattaacagaagatgaacaagttcaacgaaaagacttgcacgttttacttgcacaattagaagaaaaattagcgactcaaagtactgaaaaaacagcactggaagaagaactaaaaaacattcgcaaagaacaatggaaggtcaatggatgtacaaaagaaaaagtttcttctcaattctctgaagagtggaaagatcaagccacagacacctttaaccaagtcggcggcaaagttgccgaagttggtggtcaagtgggagaattcttgaaaaaaacatttaattctttcagtgataccatgaatgataatgtggaatggaaagacattaaaatgaaagttcctggtgtggcaacaactaagtttgaacatgagtttaactatccaaatccacaagcaagtttaattgatgtcaaggtagcaaat

SEQ ID NO: 172 - DNA, 8084 bp; double-stranded, linear
aatgggtaacagatttaagatggaagatggtctttgagcagagtaagtgagcgaacagtgaacttactacggggcgcccgttacagccaacggtatgcgaagaatcaagtaccgtatgaggttattattgagaaataatagcgaattaaggtggtatcacgaaatgacaaactttcgtcctttttgctgtaatagcaaaaggatggaagtttttttgtttttattaagcaaattcgtttcataaaaagtgcgaaaccttcaaaataagaaagtagaacagaaagaagaggagaacaaaatggcattaattgaattacgtcatgtaaaaaaagagttttccggtaaagcgggtaaagtcacggctttaaaagatattgatttaacagttgaatcaggtgatatttatggcattattggctattcaggtgcaggaaaaagtacgttggttcgcctattgaatggacttgaaacacctacagaaggtgaagtagaaattcaaggacaagatattgcattgttgccaaataaagaactacgaaacttccgtaaaaaaattgggatgatctttcaacattttaatttattatggtcacggacggtcctagaaaatatcatgctcccattggaaattgctggcgttccaaaacaaaatcggaaaagccgcgcagaagagttaatcaagttggttggtttagaaggacgggaaaccgcctacccaagtcaactctctggtgggcaaaagcaacgagtggggattgcccgtgccttagctaacaatcctgacattttgctttgtgatgaagcaacgagtgctttggatccgcagacaactgatgaagtgctagaattactactaaaaatcaaccaagaattaaatttaacggttgtattaattacccacgaaatgcacgtgattcgtaaaatttgtaatcgcgtagctgtgatggaatatggtgaaattgttgaagaaggtaaagtgatcgatattttcaaaaagcctcaaacagaaattgcgaaacgctttatccaacaagaagcggataaaaacattgaagaaacggaactggttgttgaagaaatgttggaacaatatccgaatggaaaaattgttcgcctgcttttccacggtgaacaagcgaaattgccaattatctcgcatattgtccaagaatatcaagtagaagttagtattattcaagggaacattcagcaaacaaagcagggtgcagtgggttctctttatattcaattattaggcgaagagcaaaatattctagcagccattgaaggattacgtaaacttcgtgtagaaacagaggtgattggaaatgaataatcgtggcttagcaagtttctttgatttttcccaaattgatataagtaaactacaagaaaaaacgattgaaacactttatatgacagggatttcaatcatagtggtcgccattttagggctgattttaggactactactttttgaaacgtcaggcagaaaagggattttgagccgattactgtattggctagtggccatttttgtaaatattttccgttcgattccgtttattatcttaatcgttctgttaattccttttacaaaaattattttagggagtatgtctggtgtcaaaggctccttaccagcattgattatttccgcagcacctttttatgctcgcatggtcgaaatcgcttttcgtgaagtcgataaaggcgtgattgaagcagccaaagcaatgggggccaatcgtttccaaataatttggaaagttctattaccagaaagtctgccagcgcttgtttctggcttaaccgttacaaccatttctttagtgggctacactgcaatggcagctgctattggagcgggtggtttaggaagtttggcgtatcaagatggcttccaacgtggtcaaaatacagttaccttagtagcaacgatttgtatcttaattattgtctttgcgattcaatggcttggggatacagtcgctaaaaaaatagataaacgataaatggagggaataagatgaaaaaacgtacattatggtcagtaattactgtagcagtagctgtcttagttttaggggcttgcggcaataaaaagagtgatgactcggtcttgaaagttggagcttcaccagttccacatgcagagattttagaacatgtaaaacctttattagaaaaagaaggcgtaaaattagaagtgacgacttatacagattacgtgctacctaacaaggcgttggaaagtggcgatatcgatgccaactatttccaacatgtgccgttctttaatgaagcggttaaagaaaatgattatgactttgtgaatgcaggtgcgattcatttagaaccagttgggctttactcgaaaaaatacaaatcgttacaagaaattcctgatggttcaacgatttacgttagctcttccgtttcagattggccacgcgtattaactatcttagaagatgctggtttaatcacgctgaaagaaggggtagaccggacaactgctactttcgatgatattgataaaaatactaaaaagttgaaattcaatcatgaaagtgatccagcaatcatgaccactctttatgacaatgaagaaggggctgcggttttaattaactcaaactttgccgtggatcaaggattaaatccgaaaaaagatgcgattgccttagaaaaagaaagttcaccttatgccaatattattgcggttcgtaaagaagacgaaaacaacgaaaatgtaaaaaaattagtcaaagtgttacgtagcaaagaagtccaagattggattacgaaaaaatggaacggcgctattgttccagtcaatgaataaagagaaaaagacaatagaataaaaacttgaggtcgggacaggcgtgttaagcttcaagaaataagaagaaagttctgaaagatgctttttgtctctcaaggacgttcagcttatttccgaagaagctgctcctgtcccgttgtttatctaaaattttagggctaggcagatacatcatgttgatttacttgccaagtctaagtttttttcttttaaaaaaggattataaatgataaagttacaaggaatttcttaattatcaggaaaattaagggactatgcataggcatttgcattagttattgttataataattaagatagattttttggaatggagggaaaaagatgttacgtttttttccgcaaaaaaataaatatgtagaagaagcaagccagtacgcctttgataaagaaggccaaattccgcagcacattgccattattatggacggaaatggccggtgggcacagaatcgaagactgccgagaattgctggacataaagaaggcatggatacggtcaaaaaaataacgaagcatgctagtcatttaggcgttaaagttttaacactttatgcattttcaacggaaaattggaagagaccaacagatgaagtcaatttcttaatgcaattgcctgttgatttttttgatacattcgtgcctgaattaattaaggaaaatgttaaagtcaatgtaatgggctaccaagagtttctaccaagccatacgcaagatgctgttaagcgcgccattgagcaaaccaaggacaatacgggcatggttttgaactttgctttgaattatggggcgcgtgcggagctactaactgccatgaaacagattgctgcagaggtttcagaaaaagcatatacggcagatgagattacagaagaaacgatcgcagatcacttaatgactggctttttacccacggaattcgtgatccagaattgttgattcgaacaagtggggaagagagaattagtaatttcttgctatggcaaattgcttatagcgagttgttttttacaaaagcatawggcctgatttttcaggagacactttagaaaccgcgattgcttctttccaaawtcgtaatcgtcgttttggtggtctaaaagaaactmcagamacagaagggagcgatccgcagtgagacaacgtgtcatcacagctatcgtcgcattaatcatctttattccaattatctggtatggtggttttgcaattgagattgccgctgttgctttggcagtagtcggcgtgtacgagttattccgtatgaaaggattaacgttattaagttttgaaggcgttttatcagcattaggggccgtttttttagttatcccgacaattaaatggttaaactttttgccggaaatgcaaacaaatttcattttattttatgtcactgtaatgttgttgttaggtgcttcggtaatttctaaaaatacatatacgattgaagaagctggctttccagttattgtcagtttatatgtagggatggggttccagaactttattagtgcccgttccgcaggttttgaagtcttgttatttgctttattcattgtctgggcaacggatattggtgcatatctatttggacgccgatttggtcgtcataaattgatgccagatgtttcacccaacaagacaatagaaggtgcacttggtggtattttatcagccgtcgttgtagcagcgttgtttttagttttcacagctaataaagggctatttccttatccaatgccggtgatgctcgtattgacggttctgttttctatagtagggcaattcggtgatttggttgaatcttctatcaaacgtcattatggcgtgaaagactctggtaacatcttgccaggacatggtggtattttagatcgttttgatagtttattatttgttttcccaattatgcacttatgtggattattttaaattgattaacaaaatttaaaaaagtatcgtcaaataagcnaaaatccagaagagagactcttctggatttttgcygtttrttgggttagtttaggtaccttgtgagttatttartttataagagtaattgtataaagatggctaaagtttctaaaaaattaaataggtgatcggatgttaaatatctgaacattccagtgttattcgattgttaaaaattaaattatmacamtcgaataacactggaatccytatttcmataaagccattgacgtttrgcatagataaatttatacttaaaagaagaaaagcaaaataatgtattttacatgcttgttcaatcgtggtgagagttattcataaatttaagcaagtaaagagaagataatttagagatttgtgaacgcgttcttcatacaaaattatagattaggattatatttttgataatctaatgtaaaggattaattcaatgaaaaaatttttagagaatagtatacatcaagccataaaagcttgttttttctttttaggtaaactgcctaaaaagaagttatttatttttgaaagttttcatggaaaacagtatagtgataatccacgtgcaatttttgagtacataagagataactgtcctgaatatcaatgtatttgggcagtcaaaaaaggatatgagatgccttttgtggaagagaatgttcctttcgtcaaacgattaagttggagatggctatggttgatgccaagagctcagtattgggtttttaacacacggatgccagcctggatgtataagaatcaaacaacaatctatatacagacgtggcatgggacccctctaaagaaactgggcttagatattgaaacagtcaaaatgccagagcatgaaacagagagctataaactagaagtcattcaagaagcaaagcgttgggattatctcatctcacctaatgcatacagtacaagagtgtttcgacaagcctttcattatgaaggggaaatattagaaataggttatccaagaaatgatttgttagtttgtgaaaataaggacaaaatagctttttctgttcgcaatcagctaggtcttgcagctaacaaaaaaattattctctatgcgccaacctggcgcgatgatgagtctatccgaaaaggagcctatcgttttaccaatcatttgccagttgaacaacttttagaaattgattcttctattgtaatacttacacgattacattatttaattgcagaaagttttgatataagtgcatttggttcacgtgtaatcgatgtttcttcttatccagatatcaatcaactttatttaatcgctgacttattaattacagattattcatcggttatgtttgattttgcattaacaaaaaaaccgatgctattttttatgtatgataaggaaaagtatcaaaatagtacaaggggattctattttgacccaacagcaattttgcctgggaaaattgtgacagatacggatagcctagtaacgtctgtaaaaaacgtattgttttctaaaacggaacaggaacaacgtttatatgtgcagttttttcgtgaattttgccttgaaaatcaggatgccactagacagctgatttcagaaattttaaagagataaaaagccggagggtgtaggttggaaaaacaaaaagaagtccaaaaagaatatgaagagtatcaatatatgttagatactgaaacgtggaaaaaggagttaagtcaatttaagctgtcctcttcagaaaaaatatcaaaaaatcytaaagtctcaatcattattgctaatwaccaataatgccaccatatcttaaaaagatgatggattytcttgttcaacaaaccattgggattgagcaattgcaagtgatgtttattgatgattgttccacagatcattcgttaaaagtaatagagccatatcttgaaagatatccgaatattgaaatttatcagctgcttgaaaacactggaggagctcacggcccaagaaacgtagggattgtaaatgcacgtggtgagtatagtgtcttcttagatgcagatgattggtatgatttaaatgcattgaaatatttatcagacctactagatgactctcacgatgattttgctgtttctggkctaatacagagtacggacggccacttaatgttaaaaagtaagccatattatgtggatgggtcatttaaaaatcggtctatccaagaattgccagctgaattttatggttggttaggaccgcaagctatcatgttaagaacttcactgatacacaataataatttacactttgtnaatcaacgggtggctggatgatgtgctgttctttatgaagccagcgattttcaaaaccattacacaaggggaaaggktaacgacttatttaaatcgagatgcagataatgaaagtttaagcmaatcattaatcggacattatgcttyctggttgcgtgcgttaagttatatcaatcaacagttyccagatgattkgtctaaagracggatgttagcacgccgtttagaatggctaatttatgacttttgtattcggaggaatactgggtatccattcagtaaaaggcgattacaagattttaaagtacagatggatcagtatttaggtgaattaaattttgatcctagcccgtattttagaagtgatgtgcgccaaatcatttggacatttttacaaactaacgatattgatggtttgtattggtttattcaatgtcagtccattcgttgggtgttagtcaatcgctttggttatgtttcaaaaacagagagaagctattattatcccagattattgaaacgattcccagcagttcgcatgaatgcttatgcagaagcaacgcaacgtgaaggcaatacgctttctttaaatgtgtatacacaccaaaaaattacaggatttgaaataaaagagctgaaaaatccttttgaaacaagacagaggctggcgtttaaaaaaattagtgaaactagttatcaggtagagttgccagaaaaattttcaaataaagaaagtagatttacgatagtttttgataattatttagaaattggggttaaagattttagtaagttttttgcttaaattttgtccgtttaaatcaggatattttgagtatacmacyawaaatgattagtgrgggraattkgtttakggaaaatgtgaaagtgtcagtcattgtacccgtctataacgtagaaacctatttagaagaggcattaatgagtttgaaanacca

SEQ ID NO: 173 - DNA, 12438 bp; double-stranded, linear
ttncncccaaaatggwttgkccgragtgcytamctggaggagratgcytcctttcytatccggaattttatttggtccaccatggacctatcgtgcttcacgtcgggtgacggataatttagcgactggggaagaggaaaaaaataggaaacagcactgtcataagcatagaggaagaaaaggccatgctgcctatgcagaacatctttatcaaataattgatcattcgaaattaaccattgaaacgccaaaagaattcacatggttcatgcagacggcgatgcatgccgttttctcaacaattgttgatgggtatcgtcaacaaagagaaaatactgcctatgattcaactgaagcagtcaaacaattaaaaatgaaattaagttggttgaaaaatggcgcttataagtagcaaaaaggaggagaagttagttgattaaactagtcaaacggatgtcattatggtcggtctttgcagcggttgtatttatgatcgtacaaattatcgcagatttatatctgcccacattaacatctaatatcattaatgacggtgtcgctaaaggagatattaactatatttggagtacaggagttgtcatgttaggcttttctttgattagcattgtcgcttctattggaaataccttttttgccaccaaagaatcacaaagtttaggaaaaaaattacggactgatatttatcgaaaagttgaaaatttttctaataatgaatttgataaatttgggacagcttcgctaattacacgaacaaccaatgatgtcaatcagattcaaatggttatgcaaatgtttttacgtttaatgattaacgcacctttaacgttaattggtgcaagttttatggcgtataacaaggacccacaattaacgaaaatttttctatatgttttaccaattatggctgttttagtgggaggtatcatgtttttagcggttccgttatttaaaagcatgcaaaagaaaacagaccgtttaaatttagtttttcgtgaaggactgacaggagttcgtgtgattcgggcctttggcaaagcaaactatgaagaacaacgttttgatgaagccaataaggattatacacaaacggcgattaaagtgaatacgattgtcgctttgatgattcctttaatgacactcattatgagtggtaccaatattgcaatcacctggtttggcggtcattatattgcggaaatgcaactagaggtaggtaacttaattgcctttatgacttatgccatgcaaattctgatgagtttcatgatgttatccatgatttttgtcatggtaccgcgggcgcaagcttctgctgatcggattaatgaggtgctaaatactgattcagaaatcaaagatgtacccaatccagaactactctctctaaaaggcgacaaagcaacattggcgtttgaacatgttaattatcgttaccagcatgctgaaaacttagcactggaagatatagatttttcagcaaaatctggggagacggtcgcgattattggtgggactggttctgggaaaacaacgctggttaatcttttaccacgcttttatgatgttgaatctggcaagattttgctaaatggtaaaaacattaaagatacgtcacagcataatttacgagaaatgattggctttgtaccgcaaaaggctgttttatttacaggaacgattcgtgaaaatatgcaatacggcgccccaaatgcgaccgatgaagaaatttggcaagccttagaaattgcgcaggcgaaggcgtttgtttcagaattggcagaaggtttggatagtcatgtcgaacaaggcggcggtaatttctctggcggacaacgccagcggttggctattgctcgtgctttagtaaaaccagcagatgtctatgtttttgatgattccttttctgcattggatttcaaaacagatgctaatttaagaaaagccttaaaagagcagatgacggatgcaattgtcgttttagtagcccaacgtgtaagtacggttatggaagcatcgacaattttagtattagacgaagggaaattagttggtaaaggaacgcatgaagagttattagcgaataaccaaacgtatcaagaaattgtacattctcaattgagagaggaggaccttgcatgagtagtcgaccaaaaggcggaccaatgggcggtggaccaggacgcaacattggcgcaaaagggccaaaaccaaaaaatttctggaaaacagtgaaacgtttatttcgatacatgtctaaacgaatgctgtcaattattgctgtcttagtattagcaattgcagccgtcgttttccaaattcaaacaccaaaagtattaggacaggcaacaactgaaatttttaaaggcgtcatgaaaggcgctgctgaaatgaaacaaggcttaaaaataacatcttttccaattgattttgacaaaattggtcaaattttattaattgttattgccatgtaccttatttctgctgtctttaatttcttgcagcaagtaattatgacacgtgtttcacagcgaacagtttatgaattacgtcaagaattagaagcgaaaatgaacaaagttccaatttcctattatgatactcatagtaatggggacattatgtcacgggcaattaacgacatggataatattgcgagtactttacagcaaaacttaacccaattaattaccagtatcgtgacatttgtgggtgtactttggatgatgctgaccattagctggcagttaacactaattgccttagcaacagtgccattaagtttaattgttgtgatggttgtggcgcctcgctcgcaaaaacattttgcggctcaacaaaaaagcttaggattattgaataaccaagtcgaagaaactacggtggtcacgtagtagtaaaaagtttcaaccacgaagaaagtgatcaagaagtatttgaaaaagaaaatgaaaaattatatcatgctggtcgcaaagcacaatttatttcagcgatcattatgcctttaatgaactttatcaaaaatctaggctacgtgtttgttgcagtccttggtggcgtaaaagtagcgaatggtatgatggatttaggggatgtccaagcatttcttcaatataccaatcaattttcacaaccgattactcaaatcgctaatttaatgaatacaatccaagctacggtggcttcggcagaacgtgtctttgaagtattagatgaagaagaaatggtggatgaaccttctggcataccagtggaaacagatagtccttatcgtgtttcttttgaacatgttgcttttggctattcaccagagaaattattaatgaaagatttcaatttaaatgttaaacctggggaaatggtcgcaatcgtgggcccaacaggtgctgggaaaacaaccctaattaacttattggaacgcttctatgatattagtagcggcagcatcaaatatgatggcgtagatacgcgcgatttatctcgcgaagagttgcgagcacacttttcaatggttcttcaagatacttggttgttcactggaagtatctatgacaatattcattatggtaatgagcaagcgagcgaagaagaagtgatccgtgcggcgaaagcagcccatgtggatgattttgtcagaaaattaccagaaggctatcaaacgattctaaatgaagaagccagcaatatttctcaaggtcaacgacaattaattacaattgctcgagcattcttagcaaatccagacgttttaattttggatgaagccacctcaagtgtggacactcgaacagaaatactgattcaagcagcaatgaatcgtttattggaaaatcggaccagctttgtagtcgctcatcgcttgtcgactatccgtgatgccgatacgattatcgttatggcagaaggttcaattgtagaaacaggaacccacgatgaattaatggcgaaaaacggtttttatgctgacttatataacagtcagttttcagaagaagtagcctaaaaggcgaagcaaaaaaatagtaattcatgatgrggcttcaggaaccatagtcgtaaagactggttcctgaagccttatttttttaacaaaaagttagcgaaattgaaaaatttctattttcttttgagaaaaacaggatattacttgatgaaatagcaagagatgtataaaatgggagagaagaaaatggaggtaacagaaaaaatgactgaatttcaattagaaaaagctgcgacattaaaaacattgccattcgtgcgaaaaaagttggcgaaatggtcgacttttataaaaaagtaatgggttttgttttaaagtcagaagaaaataacctgtctatctggggtacacgtgaagcaggaacgcaattattaattttagaagaaactagaaaagccgaagattttcataatgaagaaaagcaaatggcttatttctcaattaaagttcctacggaaaaagaatttttacaaattgctcaacgagtgcttgagcaagactacccaattgatgaaagtttccaaattggcacacgacaaagcatgttcattactgatcttgaaggtaatcaatttgagatttttcacgatgaagcaacagcaaattcgacttctgaaaagcaaccaattgtgcttaaagatcttatcagtgaggacttagagccacatcaagggttagccgctgggtcatatttagcgcatgtgcaattaaaaacaaacaatcaaaaagaaataaaagcatactatgaggaagttctgggtttaaaacgcaatgaaaaagatcaatttgttttagaagatggcaaagcaactattggattccaaaaacctgaaacaagtgaagtggatcaattacctgatccacacttaggtttagatttctttaccattaagctctctgatcaagaacatattttagcaatggagcaacaattaacggcaaaaaatcaagagttctttattgaccagaaaaaagcgattgtcactgtgtttgatccaattggcttggaatggtggtttgtcttaaaataaacgcttagacagacaaaataagcttgttttagcaagtctggaataaagtcggaataaaagtttaacgctacttttgttcggaacttattctagacttttcctttaatattaaaaatagaaggtgaaaaaatgtacgaaaaaacaaagtggaaaattcaaaaaatgatgaaaaaaggtgttttttcgggggctagtttttgtttcattgaaggtgaaaaagaggagagcaattgttggggactggcacaagtaaaacccaccaaagaacaattaacctcggccatgctgtttgatgtggcttctttaaccaaagtagtcggcaccaccaccgttattttgcaattagtggaagaaggaaaaattattctagatcaatcattacaaacttattatccctcttttcaagattctaatattacaatccggcatttgttgacacatacggcagatttacaaggctatattcctaatcgtgatcagctgaatgcccaagaattaaaagacgcctacaatcattcatttcacgcaggcaaagcaataggtaaaaaagtcgtctatacagatgcagggactattttattaggctttatgttagaagaaatgttccaacaatcaatgatagaaattttatctgagcgagtattgcttcctttagggatgaacgaaagtacgtttctaccaaagaatcctttaaactgtgtgccaacagaattacatgaacaaagagggttgattcgaggtgcaacccatgatcctaaggcattcgttttacgggaacatgcagggaatgctggcttgtttagcaatgtctatgatttaacaaaatttgttcgaatgtatttaaatcgaggcagttatcacaatcaccaattcttgaaaaaagagacaattgatttgttactagttaaccaagtgccagctgcagataaaccacgttctctaggctgggattttaaatatgatgtagctacgcaacggccattattattccatacaggctatacaggcacttttttgctaattgatgtgcaacaacaatcagcgcttatctttttatctaatcgagtccatccagaggaccaccggaacacttatatcgaagaaagagatcagttgttggcaacctatttaaaagagaaatcatcagtttcagatgaaatgactagtttttagtgatataatgagagcgaattcaatttgggaggtcacagtcaatgcaagaaccattatttttacaacctgtttttcaagaaaaaatttggggcggcaatcgtctacacacgctatttggtttcgatttaccgagcgataaaattggtgaagattgggcaatcagtgcacatccacatggcgttagtactgttttaaatggcgaatttaaaggaaaaaaattagatgaattgtgggcagaccatcaagagttattcggccatgcaggtggcgctgtctttccattattaacgaaaattttagatgctgaagatgatttatccgtgcaagttcatcctgatgatgcatatggccaaaaacatgaaggcgagctaggcaaaactgaatgttggtacattattgatgcagaacctggcgctgaaatcatttatggacatcacgcgaaaacaaaagaagaacttgcagaaatgattgaagaaggtcgttgggacaatcttttaagaaaagtaccagtgaaaaaaggcgatttttattatgtaccaagcggcactattcatgccatcggctcgggtattttaattttagaaacgcaacaaagcagtgatactacgtatcgggtttatgattatgatcgaacagatgatcaaggaaagacccgggaattgcatattcaacaatccattgatgtgacaaccgttccggcgaaggatcctgacctctctattcaacaagaaaatcaaggacaatcaagcattgttacttatgtaaaaacagatttctttaatgtctatgagtggcgtgtcagtgggattctaaaagtcaaaaaacaagcaccttatacattagcaacagttattgaaggtgtgggtcgattgattacagaagatgctgcaaaagcagatgtggctacttttgatttgaaaaaaggcgatagctttatctttccgacagatattccgagctggcgttttgaaggtgatctaacgattatagcttcagaacctggcagtcgctaaaaaaagaggagatcatcaacagatgatttcctcttttttagcattaaaacagtttattttgttataaaggaacgtttaggtaaggcagcgataacagctgtgacgatgatgactgatagcagacgatccccgtaatctgttatcaattgaaccaacaggacgcttgctaactgattgaagcctaaaccatataaaaattggacaattatgctggagccagcagaagtaattccaccaaataaacaaactgttattaaggaagaaatcactgttcctggtatcgttaaccacaacgttttaaatggtaatttggttacttttaactgctgatgaaggagcaaacctgctaaaattcctgtgcagagttggacaggtgaataatacagagaaaagatatccgttgtcaatccagttagtagacttgttaaaatacctgtcagtgcgccaaagagtgggcctaataacgcacctgtaaaaatagttcccgcactatcaagataaattggtaaacgaaggagtaacgcaatggtactgccaaggtaatttaaagcaacactaaaagcgataattgtaatgattcgtggtgttatttttttcatggttatcccatccttaaatttttgaaatctctttcgatctcatctatttgtacatttaaaagaatggatagaaacttcacgaaaaactgttgactatcaaccgtagtcaagacatgacaattagctggttgctgctggaaatgatattgatcgatcattgattgccccatagcaatgccgtcaggaacaatttgtccgtaactggaaaagccttggcagagcgtaggatcaataaaataagcaaccgctaagggatcgttgataacacaccctaaaatacgttcatatttccaatgaaaatcaaaataaaattgagtaatctcagcgaggtaattccccattttggggttgagtcgttgacaataattgagaattgttggtgtaaaaacaatttctcgtgtgacatctaagccgaccatctcgatttttgcacctaatttctcaaaaacccaagctgctgcatcaggatcacaccaataattaaattctgcaacaggagagcaattgccgtggcttttaaaggtaccacccattgagacaaaacgttgaagatttcgccccagaagaggttctttttttaaacccaaagcaatatttgttaaaggaccaagggcaatgattgagcaatcggtagcttgttgaaaggtttgtgctaaatagtcagcagcggaaagcgcttgtgcttggattttgctagttctggggaaatatgtttcacctaaaccatccatgccatgtgtatcttgtgcactaacaaatggccgttttaaagggctagcagccccttggtagacaggaatatctaagcgattaactttttccaaacatttaaaaacattttccacgccaatctccacagggacatttccacaaacaacggtaatcgcttggacatctagctctggtgaagcaagtgcatacaagagagcaagcgtgtcatcaattccaggatcacaatcaataattactttttgcattttttccaatcctcctttttcattaactgcaaatgataactcttgttaaaaaagctatgacttgagttagtattgagagatacttagttttttattctgggaagtttccgaaccagtccgagaaattctcgattttaaatgcacctctttatcttactatattttgtaaagatgtaaatagttgtcggataaatgaaaaagaatctagccctatatgtaggaactagattcttcttttatttataaagcgtttcaggaatagcgatcggttcaccatattttttctctaaagcggtccgaattaaccgaatccctagatttttgttgcgtgctaagattggaccgtggaagtaggagccaaacacatttttatagacaacgccttcgccattatcttgaccgttattgcctttgccttgtttgactgttcctaaaggtcgttccccttcgcctaaaaaagtcatgccgttatgattctcaaaaccataatacgtttcatcaaattcttcattataaatttcaatatcaccaatgaaacgattgttgtcttggctcaaagtgtaatgatctaatgcaccgattcctttaattttttcgccttgtgcgccgacatagtaatgtcctagaagttgataaccaccacagatagctaacaagacgccgtcattttcaatataagaagtcaaagcttcttttttattctgaatgtcttctgagatgatcagttgctcgaagtcttgaccgccaccaacaaagactaaatcatatttttcgggatcaaacggttcgtagatactaataatttctgatcggaaggtaacgcccattttttcggttaaatatttaagcatcaataaatttccgttatctccgtaagtatttaataagttgccatataaatgacaaacgactaattctttagacaccattcattcccccttgaatatacccttgggctgttaatgattttcttaattgcaaaacagcagtataggttgccaaaatatagacatgatctgtcggcaacgttttaatttctgaaattacttgctctaaatcagcaatttctagtaatttttcttcaggaatacccgcaacttttaaacgcaaggccatatcttcatggcgatcaccgccagcaattacttttggaatgtccatatcagcaaaggcttcatgattaccatcccaaatccaactgacatcaattccatctgcataattagcatttaataatgaaaccagcgagaaagagtaaggggctaagcccatcatatcaatgacctgatttaaaccaacgggattttttactaaaactaacgtacattctttatcgccaactttaatggtttcttgacgcccaaaaactttttcatcataagctaagcctgctcggattttatctggtgccacctgataatattctgctaccgctgtggccgctagcgcattataaacattatacatcccaccaacagcaatgccgtattcttcgccatcaatcacaaaatcagcagatgtattatccatccggaccatttccgttaactgcacatccaattcagggcgtttgaagccacaatttgggcaatagtaatcacctaaattagcatacgtaatcattttataatgaagaatatgattacattttggacataaaaccccatctgtattgtaatgagccaattgctctttcggtggtaaatgattaaatccatagtatttgcgaggatttacagtttcttttgaattaaaaattggcgaatcaccattgcataaaatagttgcttcaggagcagcagcggcgccttccataattaagcgatacgtcgtataaatttcaccatagcgatccatttggtcgcggaaaatattcgtaaaaacaaataattttggttgaatatatttagtgacacggcttaaacttgcttcatcaatttctaacaccgcaaatttcttttgtccttttttcgccttggcatttaaaaaagtagagacaattccttgctccatgttagcaccagttggatttgttaatacctcatcaaattcttggcgtaaaatgttaacagttaaagcagttgtcaatgttttgccgttcgttccagtgactacgacaatttcatagtcttttgccaatgtatctaaaattttaggatcgatttttagggctaatttccctgggtagctactgccgcctttaaaaaatgtttgtaaaacccattgcgaagtttttcctgcagcaattgctaaatgacttcgaatccccatttgttgtcccccaatttctatatctttaatttttcgttattttaaattaaactcaatctatcataccataactaaaataaaaaattaattccttttactttttcttactattatttaaaaagtcttttagaaaaagtagaatagtgaaggaaaaaagaataggggctgggacaaaaatcactttggatttttgtcccakgywtaaaaaactgataaacggcgggaacagaagcaacactccgcgttgcttcgatctcaacaacttctaaggtgttttctcgacatgcgtctcgtcacagtacagccttcaaaagagctacagctctaagagttgcgatgtttcactgtgraacatgaacagatgaaatcatcgtacctacttggtgaaggtccttcggaaataagccgaaattgttgagaatcacgaagaacgtagtgrttcgatgatgaacaatacctacttggtctccaaaaattaaagaacaccgggtccttcaattctagcatgttccatgcttagaaattgatgcgaacgaaacggagtgtagtgtatcatgcaacatcaactcgtacctcgttgtgttttatgacaattttcggaaattccttcttattgctgagaaacactatttgcaaagcaaatagatgttgaacagtacctacgtggttcttggagttaaacacttctgtcccgacctccatcgatttccatttttatttcgcatcaatataactgtatagcgtatattagaaatattgaagaagttagaaactttgtccccagatttagtgactaagaaggcgcctttattgtttaaaaattgaatacacttgattttatcgtccytcgtcattaatgggaccggcttaccaactaatttgactgattcatgaattaaatcgtctaacaactcattaacatcctgaggaatgtaatcagggtctttatcttcttcaggttctgcagtggaaatcaaagattttaagtttgactctgcagcaatcaatgtagtgatgtcgtagttaatagcaaaaataccatcgagttgaccattctcatctttaaaatacattgtactagattttaaaatacgaccatcatgggtacgggttagatagttaatatgatcattcaactcactagggtctttttttaaggcttctaagactacttgagaaggtccatcgcccagatgacgagaagagacatgacattttcaatggaaacaatagagttgttaatattgtcttcattgatttggtggataacgattcgcagttttccccaaattgaccagctaaacctttagcaatttgtgttaaaaaagtaagtttttcgtcggataacat

SEQ ID NO: 174 - DNA, 3496 bp; double-stranded, linear
gatacatctcatcccctaacaatgaacagccaattgcttcaaaatgtacccgaatttgatgtgttcgtcctgtatggagctgaatgcgcacagctgctgctwgggctcctctttttgcgagccaatattctgtactagcaaattgacctgtttcgataacttggcgttttaataaagaggacaagtcgcgcccaattggcttttcaatcaattgatgctcgcttaactgctcaatcgctccaccaacaagggcataataaatttttgtcacctttttttctcgtaattcttggtcaattaaagcatgagcaaagccgtgtttcgcaaataacatcagcccagaagtatctcgatctaaacgagtcacgacatgaataacttgattcacgtaattttgacgcttgtaatagcccttaacacgattcgccatcgttcctgaaggatgatactgagcaggtatcgaggcaatgccagcaggcttattaactactaaaaaatgatcatcttcaaacacaatttcaatcggttcatcatctgtyaataatgtctcatgttccgcttcatctggaatcgtcattttaacgacatcgccagtttgtaaaggatagatggcattttgaacggtcccattcacttgaattttaccaccctgaaatttcacctttgctaataacccttttgaaacaccttgttcctttaaaaaatatttcacttgttgtgttgtttctttgtcatatgtccattgaaattccatcgtttaattaatcctcaccaataaaggcatctttcactcgatgccaaaaatgcatgtgccgataagaggcaaaatgaatccgttcgtctgcaattcgatagcagacagaagcgatattttcttgataaatatctaattggtccaccgtgacaaaataatcatcactttcctgtaatttaatctccagccactccgtatgtgcgattacaatcggtgaccccaatgttcgaaagacacgattgtttaaggaggcgatttcggttaactgaaacgcattaatgctaggatgcaaaacagccccaccaatacttttattatacgcagtagagccggttggggtcgaaatcgacaacccatcaccacgaaatcgttcaaacagttcatctttaataaacacatcgcccaccatcgtccggtttcctcgtttaattgttgattcatttaatgctaaaaaatgtttatctggtttcccatctctaaaccgaatccgcacatctaataatggataactcgtacttttttcacgatgaatacacaaactctcaactagttcttttaattcataatcacgccaatctgtatagaaacccaagtgtccggtatgtacacctaagaaacttacttcgtttaacagatgattaaatcgatgaaaagcggaaagaagcgtaccatctccgccgactgaaatcacaagttcaggttgacgattgtctatttgaatttggttttgctctaatagtgttgtcagttgttttgtgacttgtttcgatttttcttccgagttatgaacaatcgccactttcataagcagactcctttactgattttctggtgtttcgtttttaatttgcttatagtattcgttttctagcaatccacggccatgagagaagtaatgttgtgcttcttgaatttcttcacgaatagatgacatttcttcatctaataaataggctgcctctgccgctcgctgaaggcgttctttcatttcttcaggaaagacaccttgatatttataattcaaagaatgttcaatcgttgcccaaaaattcatggagagtgtccgaatttggatttcggccaaaataatcttttccccggtgactaattgcacaggatattccactaccacatggtacgaacgatagccactttcttttttattttcaatgtagtcccgttcttccacaatttttaagtctttacgatttcttaaaagtgcgactacctggtaaatgtcttccacaaattggcacataatccgcaaaccagcaatgtcttgcatttcttcttcaatccgatttaaaggaatatgccgaatagccgtctttgtcaaaatactatctactggtttcacacgtcctgtaacgaattcaattggtatgtgtttatcttgctcccgaaattgtttacgaatacctcgtagttttacttttaattcgctgaccgcctgttcatatggcgctaaaaacagctcccactctcgttccatggtagatccctcaatttccttgaatttcattcactgattattttaccacagtcctccctaaaatagggtgttattcgctatttgatttccaaacgcctttcattagaaaaatttttcacagagaagaccacttttcttgacggaaacctatataatatgtgaaaattggagtgatttaagaaagagagagaaccccatgagtgagcacttagaaattgaatttaaaacattagttagtccgcaagatttcaaacgattaatcgaccattttgctattcaaaaaacggacttttttacgcaaacaaatcattattttgatacggacgattttcaattaaaagcacaacgaatgggcttaagaattcgcgtattagcagatcgtggtgagttaaccttaaaagttcctgcgccagaaggattattagaaatcaatgaccctttatcgcttgagacggcgaaccactttatcaagaggaatcacctccctactgagggggctgtggcgaagaaattacaagaattaggtattgaaatcgcctcgatccatttaattggttcattaaaaacagcacgtgcagaaaaacaaattcctcaaggactacttgcgttagacgaaagttggtataaccaacagcacgattttgaattagagttagaagttactgaagctgaaagcggcaagcaagcgtttcaaacattaatggctgatttgaacattcccattacgcttgcacctaacaagattcaacgcatgatgcggaccactgccccttagtattcgaagcactgacgttctggcacctgtatttgaaaaagcatggcattggaggaagtatgaatggttgaaatttatttgttcgtcaatcctttaggcggcgtctgtttagaaattgaaaaagaaattatacaattgtctgttaacgacaagaagaaaatacaattgcgctttattcctttattaaatatgaaaacgatcaatgaatttttgagtcgtcaacatattccgattaatgacattaaacgacggaatcgaatttttgaagatttatactcagccgctcttgactataaagcagcacagttacaaggccgaaaaaaaggccgacaattgttgattggcttacaaaaagcagtagctgaagacggtctagcttactctcctgagttatcagaagaactacttctagcggctggcggggatattgatatgtatcgtaaagaccgacaatccgatttngtcaaagaanctt

SEQ ID NO: 175 - DNA, 902 bp; double-stranded, linear
tttcacaaaagagcaaaaccgcatgtttttgcggtttagtgataattttcacaaacaagaaaacggtttctgttccacacttcttctgtactatttttctcccaactgttatattctattttgaaaatattatataacagttctattaatttgagcccccttatccccgaactggctagtaatctgatttccgaactttgcgttttcatgaaaattatcttgaaaaaaccaaaaaataaaaaccgtcagccgagtaacctactcagcatgcggttttttattttttagagaacaaagtttttttcgttaatttttattttttttggctcgtttttttgccaaatactttaccttaggttttatcacgaacattcattgcttaaaatgaccaaattttcgtaaaacgagtaatacagcttagcaaattcttttctctttcagtagattttactaaatccattccttggtaattttaatatataaacgtttagctacttcaacagttaacatgtacgcaatgatgattccaaagaaccatggccagtagttagccggaagtttcacaaagtcaaaaacctctcttataggcgttgctacaatcaagaaaccgagtaagattgcgcctaaactacttagcatcacaggcattgacgcacgactttgaataaatggtattttccgcgtccggaccatatgaacaactaacgtttgactaacaagtcccaccataaaccaacctgtttggaataaatgttgagttgccaaactattggcactaaacacaaaccacatgacaagatacgttagaatatcgaaaatactacttaccgggccaatacataccgtaaatttcgctagtccgttcgtttcccaccgaacagggcttaataactcttcttcat

SEQ ID NO: 176 - DNA, 3568 bp; double-stranded, linear
tctggtgaagtccgtgtgaatgaatccttgttaaccggggaatctgatgagattaccaaagtagcagatagccaacttttgtcaggtagctttattgtgtcaggttcttgttatgcaagaattgataaaattggcgctgaggcctatgttcatcaattaacgcttgaagcgaaatcaattaaaaaaggggaacaatcagagatggtcggttccattaaccgtttggtgaaatgggtagggattattattattccaatcggctgtgttctatttttccaaagttatttcatcaaccatcaagggcttcatgacagcattgtctccatggaagctgccttgattgggatgattccggaagggttgtaccttttaacaaccgttgcattagctgccagcacaatgcgcttagcgaaccngggcgttttattgcacaacatgaaaagtatcgaatccttagcacgtgtcgatgtgttatgtgtagataaaacaggaacaattactgaaaacacgatggaagtccaagagttggttcctgtggtgagtatcgaaaatgatggtacagacttaaccaatgtcgaaaaattaattggcgatttttgccgaacaatgtcagctgacaacgatacgatgaaagcgatgaaagaattttttgttactaataatcagagggaagccgttagttatacctcgttttcgtctgtcgaaaaatttagtagcgtgactttcccggaagcgacgtatattcttggggcgccagagatgattttgagagacaattatgaaatgtatcaatctgaagtggaacattatacaagtcaaggctatcgcttattggtgttcggaaagtatttaggagaatttcaggaaacgttggcagcagaggttcaacctctaggctacattcttctttggaatccgattcgtaaagaagccaaagcaacttttgaatatttcgctgaacaaaatgtggctattaaggtcatttctggcgataatcctttaacagtatccaatgtagcacaagcggcaggcattattggtgctgaaaattatgtggacgcgcgaacattaactacaatggaagcccagacagagctttagaaaaatacaccgtttttggtcgtgtcacgccagaacaaaagaaacaatttgtattattgttgaaaaaattagatcatacagtggcgatgacaggggatggagtcaatgatattttagccatgaaagaagcagattgtagtattgccatggcttcaggaaatcaagctacagcacaagcctcgcaagttgtgttgttggattctgatttttcaacgatgccggaggttgtctttgaaggccgccaagtagttaataacattgaacgctcttcaagtttattccttgtaaaaaatattttctccttgctgatgtctgtctttgctatgatttttgccgtgacatatcctttacaaccgacacaagtcacattgattagtttatttacaattgggattccttcgacatttctagctttggaaccaaatcatcgtcgcattgaagggaaatttcttttcaatgtgttatcaaaagcaattcctggtgggttaacggatatgttagtagtcggtgccttactaatttgtggtgatattcttgcacttcaaaaaacggacatttcaacgactgcaacattgttgctagtttcagtcggctttatggttctttataaaattagttcaccaatgaatcgttaccgcaagcgcgtaatgattggctgtttaatcggaatggttattacaagtatttccatgaaaaacttgttctcgttaacttcggtatcgccaacagccttgttacttttagccattcttttctttgcagcagactcaactttccaacatttatcaaccatttctgaaaaagttcaattatggttttataagaaaagacattaggagcaaaacaccgagccaaaattattttggttcggtgttttttgttttttatcgttgggaaaaataaaaacacttgcacctagttaatccttgatagtataaacctaaccaattattttagataggaaggattgaataaaaatgaaaaaaagaagttttgtctattggggaatgtttttcatcttttgtcgacgctgataacgccttttctgaaacttgaaacaggatatgcgcaaacggraccaactagtaccagtgraaccaatcaaatttnctgtacgccaaatgtagtgccgcgtaaacaagtgggcaacattgtgacagcgattcaactaacggacaaagagggaaacccacttgggaccattaatcaatatacagacatctacctccgaattgagttcaacttaccggataataccgttaatagtggggatacgagtgtgattactttacccgaagagctacgtctcgagaaaaatatgacctttaatgtagtagatgatacaggtactgtggttgcaatcgcacagaccgatgtagcaaataaaacggtcacgttaacgtatacagattacgtagaaaaccatgccaatattagtgggtctttatattttacaagtttgattgatttcgaaaatgtcgaaaatgaatccaagattcctatttacgtcacggttgaaggggaaaaaatatttgctggcgatcttgattaccaaggtgaaggcgatgatgttaacgaaaaatttagcaagtattcgtggtttatcgaagacgatccaaccgaaatttacaatgtactacggattaatccaacagggcaaacgtatactgatttagaagtggaagatgtgctaaaaacagaaagtttaagttatatgaaagacactatgaaaattgaacgaggacaatggacactggatggaaatgctatttggcaattcacgccagaggaagatataactgatcagttggctgtccagtatggtcctgatgaccgtaatttttcggtgcattttggcaatattgggactaacgantatcgtatcacctataaaaccaaaatcgatcatcttcccgaaaaaggtgaaaccttcacaaattatgcaaagttaacagaaaatcaaacggtggtggaagaagtcgaagtgagtcgtgtctcacaaacaggtggtggagaagctaatggtgaacaatatgttgttgaaattcataaagaagatgaagcaggccagcgtttagcaggtgcagaatttgaactcattcgaaactcaaccaatcaaacagtggctaaaatcacaacagatcaaaacggaacagcgattgttaaaggcttgttaaaagataactatactttagtagaaaccaaagcactaccggttaccaactttcgcaaaacaagattccaataacacctgaagactttggtaaaaacttcagttgcactgaaaactgttgtgaatcataagatttcatatcaaccagtcgctgcttcatttttagctggaaaagttcttttaggaaaaccactgaaggatgctgaatttcaatttgaattgttagatgagaaaggcacagtactagaaacggttagtaacgatactttagggaaaattcaattttcaccatta

SEQ ID NO: 177 - DNA, 2206 bp; double-stranded, linear
catgtttatctaaaagttttgcccagaacacttctacattttttaacatcctttgctctcctttttatttttacttcacgcaaccttctttcactaattatacataactgattgcttttctcctatactatttttacaaaatgaaaactaaaataatgtcagtagtatttggacagaaaaaaaaagagagcgtgggacaaaaatcactttggatttttgctccacgctcaaaaacttataaacggcgggaacagaagcaaatccttcggaaataagccgaaattctccaaaaattacagaacaattttcggaaattccttcttatttctcggagttaaacgcttctgtcccgacctcatctttttattttgcttgtcgttctttgattttcgtgagtaaagattgaacatgctggcgtgccgaagcttcatcttcttgaagcatcttttccgataaaataaaggagccgcccactgctaatacttctttggcttccacatactctataaagtttgtttcatcaatcccaccagttggtaaaaattgaacatcataaaacggaccgcttaaacttttaatggcttttaacccgccgtaaatatcggctgggaaaaatttaaccactcgtaagccatacgccagcgctcgctgaatctccccaggcgtagctgttcctggaaaaataggcacctcatttgccagacaaaaatcaatgacttctggaacaatcgctggggaaacaatgaactgtgcaccgttcgctactgcctcttgggcttctttcaaggttctaacagttcctgcgcctactattaaattccctgaagcagcaagttgtttgatggcaggcaaggccagctgactccgaaaagtgacttcaataaacggtaattcgttttctactaagactgattctacttgtggcaaatagcgtaaatctgttgcagtatatagtggtaaaagtttacatgtcgctaattgttgatacagttgatttttttcaacttttgtttccattctgtcacttcctattttgtttggctttggttgcttcgtacagtccttgaatataggtcaaccccattgctcgatcatataaaccataaccaggcatcgctttttcatcccaaattgcccgcccatggtcaggacgaataacgccttcataccctacgtctaccagtgcttgcattaattccgccatatctaacgaaccagcgacactaggatgcgccgtttcttcaaaacgatgctcacctaaatacttcacattgcggaaatgaacaaaattaattctgtgacctatttcacgaatcatagtaggcaaatcattcgtcgggtccgcaccgagggaacctgtacaaaatgtaatcccatttgctggtgagtccaccaaggaaaggatccgttttaaatccgctaaatttttagtgattcttggcaaaccaaaaatttcccaaggtggatcatcggggtgaatccccattttgatattttcttcttcacagacaggaatcacacgttctaaaaagtagcgcaaattttcgaccaaatcttcttccgttacgccggcatacatggctttcaattcttgaaattgttgcaaacgctcctcttcccaacctggtaaccggaatccttttgactgactgtgaattaattgatacatgtcttctggctgcatgttctctaccacagcttgatcaaataacaacgataagctaccatcttcattctcatacgccaagtccgttttagcccaaccaaaaataggtttgaaactgtagcacactaaggaaattccacattttcccaagttacgtaacgtttggcgataattatcaatatagtggtctcgttgatccgttcccgctttaatggcatcatgaatagcgacactttcaattcctaaaagtgctaatccttcttgttccaccgattgtttaagtgcctgaatttcggctactgtccaaacatcacctggtagtttatttaacaaggtaccgacaacaccagtaattcctggaatctgtcgaatatgttttaacggaatggcatcgcctgccgctccgtaccatctaaatccccatttcattggctttcaccctttactaacattcttaaaaatcatcgtcctcatcctcttcgtcctcaaaggaagtcatagaaatatcccatgcntgcacactttctttgccttgcgcaa

SEQ ID NO: 178 - DNA, 1887 bp; double-stranded, linear
ccatccattaaccagatttttgccacgancttgnctgttaaacgctcaagtcgcmttttcccgaatgtgggtaaaatgtgttttttcatacgtcgttcagtagctatgaatgtggattccctaactgtttttttgtattcgtccaaccacatataataaacttcttcaaaagtggttaaacgagtatgctcgttagctagatttccattatcaaaatctaattttttttgattaagcttgagctgtgcttctttttttgtattacagtttctgatagtgacattaatttgttttccagttaaataatctacgcctaaataggcagttactttccagtattttttccctttttttgtatattgtttaaaagttgccattgcttatcctttccacttgggcaagcgaatagaaggaatgacaaatttctagcacctccttattagattttaaagcccctagcatgaatcgaacacgctagaactcaccagagagggggataataaagcatatttttttgttaagcagtgcgcgttactttttattctctaattttctaatagctttttctaaatcatttattttttttattagcatatctattttttcatctttttcatcattgttattagattcattacttttattaaaatattcagtaatagtagaagttaacatgccaacaaacccaattcccacaatcatcaaaatgattgcagcaattcttcctaatggagtagttggagaaatatcaccatacccgacagttgttgttgttaccaaagcccaccaaaacgcatcaatgtatggaacgttttctgcatatgagtaaatcattgctgaaataacaatgagaaccgagcttaaataaatcacgtttaaaaatccgttagtatttaaaaatgatttagtgtttcttgttaatttgccaaccacacctatcgctcttgttagctttgctagtctagctattttagctattcgaaacaacctagcgattctaaagaaagaaaaaatagcatcaaaaggaattatcgcgatcagatcaaaaatattttctttaaaaaatttgattttattttttgaaataaaaaatctaacaatgtaatcaattgtaaatgtgattaagataatactatcaataacgttaaatggtggattactaatattaataacatttganaaatcaagaataactaacgcgattgagattaatgctaanacaacaatagagtaattatagaatttttgatttattttcaatgaagttctctcactctctaaatgrggyttamgtccgtgttcccagcacggacttttttatttcaaataaacttcttgtcccatttttaagttgtaatgagctataacatttgagtaattgtattgtccttcatatttttcgattaagcttctaaacatatattgttctgcttcagcttccatcttagaacgaaaaacaggaattttatacaatgccattatatccacatgttcttttacatgctttaattcgtgatatattgcttcttcttgttctgatggtgttaaattttgatttacaaatatgataccgtaggtagggtcgaaacatgcgcgtttgttcaaagtagtaaaaactaactccacattatattcttctaccaactctttgatacttttcatataagcacaacctttgacttatttcccgaatctaccctttaaatatgcacggataacttctctgtcatgatcatcaagcggttcaccgtcaaaactcatgacgttatccagtacatcatctaaatcgtcagatggtttagcaccagcttggtttggattttcagtacgacctaataaataatcaacagaaacattaaaataatkggctacagcttcaagtttatc

SEQ ID NO: 179 - DNA, 19024 bp; double-stranded, linear
tgtaaaaaggnacnacagccattggtaccttaaactacctggttagttcaacgattttatccatagtttaaaacatccaggatacatgcgtttcgtkgcgcattccaggccagctgtttaatatcgtagtttggatcagtaggttgcgcattgacgccgcgcttaattgtgaaaatcagttttgggaaaatagctgttcgtttttcaatccctaaaccattaattcggatttgtaaaatcgcccgttgaatttctcgctcaaaccagttggtacctaaaccaaatcccagagaagtaaaaggggtttgtccattggaagtaaataaggtattaatttcatactcaagactttgcatggcatcaaaaatatcttttttcgttttcttccgagcgaatgctttttggcgttcttctccttcaatccattcttgcgcatctgctaaatgtttttcataattacgttccgcaaaaggcgctaataattcatcaatccgatcggcagagcaaccaccatattgactggaagctacattggcaataatttgagaaatttgtgcagtggccgtttgaattgattttggtgattcgacatcagcgttcccaattttaaagccattgtttagcatgcctttaaaatcaattaaacagcagtttgtcatgggagtatatggatgataatctaaatcgtggtaatgaatgtcgcctttttgatgggcattagccacgtgtgaaggcaacatctttaaaccaattgattttccaacaatcccagcggttagatcacgttgcgtattaaaaacgtcactgtctttgttggcattttcgttcacgacagtctgatctttattaattaatttgccgatagatacattaatatcagttgctttactacgctcaaaatcacgttgggttctgtaatgaatgtattcttcggctaaggcatattcgttgttggatagcagagtatgttccacaatattttgaatttcataaatttttacgttattggtaaaacgttcggcaatttctcgattgacatcagcaacaatcgattggactttttgatgtgtcaaaggagtgacttggtcatgtattttttgctcagctttgatcaaagcgtcgtatattttttgatcatcgaaagtcactaaacgaccatctcgtttgacgactttaattgttgagagattaacatcctcggctttttcatcagtaatcttcatcattttatccagctccttatatctcgttagtaactatcctaatacaaaggtcggctaaattcaatcgatatattgcgtatttttagtaaaatatcactagacaaacactatatattgtgcttgcgctgttttgaaaaaatatgaaaacaaatgaagaaaaggattgagcaaatttttttgcgtgaaaaaaattctttgtccaaattaaaaaacagcaaagagttttttgccaaattgctaaaagcaacactaaaaaataacaattattaaataataattgtttgcggatttattcacgaaatgccaattattctttgactaccgaacgatattgtaagataaaacgatgttcattcagattttttcttggtaaaataagagtaataacaaaacgttggagcgagaaaaatgaaaaaaattgtagaagtaaaccatgtcagcaagacatatggtcgtttaaataataaaacagaagtattagataatatttcgtttaccgttgatgaaggcgaatttgtggggattatgggtcccagtggtgctgggaaatcgacactgttgaatgtcttatcctcgattattttgccaaccgcaggaatcgtgcgcatcgccggacaagatattttaaaaatgcgagataatcaattaagtgattttcgaagaaacgaaatggggtttatttttcaatcgtttaacctaattgatacgttaaatgtgaaggacaatattctgttgcctttagctgtagaaaaagtttcattagaagaaatggataaacgtttgttacatgtgacttcgattttggggattcaggagcttttatctgcttatccaccagagatatctgtgggacaaaaacaacgggtagcagctgctcgtgctttgattacgaaccctaaaattatttttgcagatgaaccaactggctcgctggattcaaaatcagcaacagaattgttgaaatatttagctgaaattaatctacatgatgatgccacaattttgatggtgacacatgacccgtacacggccagtttttgcaatcgcatcttattcattaaagacggtgcgattttctcagaagttgttcgtcaaggatcacgtaaggaattttttaatcgtgtgatagatatgcaagcaacgattggtggaggcgggcgcgcaaatgatttttaaactatcattaaaaaatttaaaagctcatgtacctaattatctggtttattacattagtatgacttttgcagcggtcgtttattattgtttccgtgcgattgcttacaaccagcctcttgtcgcaggtgcaggccgtgatatcgaaattaagcgatctttaggactcggtagtaccttagtcaccattattattttgggctttatgttggcagcaaatcgtttttttataggaaaacgtagccaagaaattggcttgtatcgattaattggcttgagaaagagccaagtttcactaatttttttagtagaaaatttagttttaggctttgtttcactaattaatggaattattttaggagtgattttcaccaagtkgttttcaatgattttagccaaagttatgtttttagaagtccccagtttcttctatatttcttggcgttccgttattgaaaccggtgtagcttttgcatttatgattktgattgtctgcttaagaagtatttggatgatttatcgttatccattgtcgcagcttatgcatcaagaaaaaattggtcaaattaattatagtcgtttaacgaaacggcggcagcttctaggtattttaggaccaatttgtttattagtaggttattttatcgcgtttgattttcgtaatttagcgacaggtattgtgtataaacaattaaatgattcattggatatttcgattccaatgattattacgttgacgccttttatcattttgggtctatgtgtggtgggaacttatttatttttccgttataccatgtattttatcattcgcttatttaatcatagaaaaaaatggtattaccaagatttacgcatgattactttaggcaatgccaaacgctacttatttaaaagtagcaaaacactcactggtttgaccttattaattgcgacagccttgagtgggatcggcgtgatggtttttgtgtatacgattagtatgcacacggtcaacagtgatggccccgtggactttttagtttcacaggaaagctatcctaaattgaagaaagttctcgatgaagcgaaggacaccaaaataaaaaatgaagtgacactttcttataaaattactggaattgaacgcagtttgcgaattggtcaagcgcaagaggaacaagaaacgattgaagcagttaatgttttatccttctccaactaccgcaactatcaaaaaattaatccttatttaaacgatttacatttaaaaaatgaccaaagtgttatctatatggatagctttaccaatattttaagtggtatgtctcgttatgaatcgaaactgcaatttgttgaaggggagaaggcacaactacaacaagtgctgcctaactatctaggcaattttttattgcaatattccttaccaacgattgtcgtttccgatgccctttatcagaaagtgacaaaaaattccattcagtatcagattaacgccgtaaatgttgacacgaaaagccgtgaaaaactttatgaagccgtaaataaacagattgccacagaatggcaagcgccaattttgtataagtatgaaaaaaataaccagcagttgagtggttttgccaaacaaatgcctaacgaagaggtaaagaatacgcaagatgatgtcacagaaacttggcggctaaatatgaatgatcgctacgcctctttacgctatgaacgaaaaattaacggcttgactttatatgtctccatgtttgtggcaattttagcgttgtttattacgggcagtattttgatgttacgacaactgttttcagctgtaagtgagcgtcaagattacgtgactttaaaacggatgggtgtttctagtaaagcgataactaagcaaatttatcgacagaatagtttgattttctttccgccgatggtcattgggattttgcataccacctttgctatttatttgttaagccaatttattaagagtccaggatatttgttagtatatctttcttgtggaatcttaataattgtttatctaattttttatattttaacgtctgccatttatgcgcggatgattcgacacatccatttttaaaaaactgtaaaagccgttgtgaagcggtttttacagtttctttatgcgaaaaaattatgagagttccgtttatgaaaatcatgaaaatctaagaagtgacgaaattgttagtttttttattaaattgtaagaaatttcaatggactttgctgaaatatagcataaaataatggatagcgattaaccttaggaggtgaatgataatgaaaacaacttttcagaaaattctcaataacgaaagtcttaaattcatcggtaaaacgttattttattctttcattgtcattgcattaatttatctttatcattacaagaatatcaatggaggaaccttcatttataacgagttttaaggaggcggctatacatggaaaaagtaattaatatgattcaaacgattgatgaatgggcacgtaaagaaccccaacgtcctgtttatttaaccgaagaaaaagtctctacgtatggagagttaaaagaaaagtcagacaatctagccgcttatttagctgagctgaaaacggacaagtcagcgattgtcgtatacggagaattagattttgaaatgattgtgagttttttaggcgcatcgaaagctggttttagctatatccccattgatgcacatacaccaaaagaacgcattgaactaattctaaacgtagccaaaccaaccgcagtgattgctgtgcatgaatggcctgaattagccaccgaagtgccagtaattacggcggaagaattaacagaaatgatgatgcatgcaccccggcatgcgcctgcgttgatgcctgtcacaggagcaagtaattactatatcattttcacttcagggacaactggcgtaccaaagggtgtgcaaatcagccatgataatttagttagctttacgaattggttgttgcaagattttggtttagaagaaggggcccgctttttagcacaggcaccttattcgtttgatttatcggtgatgtctatttatcccgcattggcgttaggtggctcattaactccgttacccaatgaaatcattaacgattttaaacaattatttacgcgtttgccacaattaacaatcgacgtctgggtttcaacaccgtcctttattgaattgtgtctaatggaaccaagcttcgatggtgaacatctaccagcactgcgcacgtttttattctgcggagaagaattaccaaaaccaacggctgagaaattagccgctcgtttcccaactgcgcatatttataatacgtatgggccgacagaagcgactgtagcgattagtgccattgaaatcactcaagaagttttaaaaagtgtccaacgtttaccaattgggtatgtgaaagaggatacgcaaatttatattatggaaggcatgtcaaaattacctgcaggtgaaattggtgaaatcgtcattgctggaccaagtgtttccaaaggctatctaaataatcctgcgaaaacagctgaarcttttttccaattagatggcgtaccagcttatcgcacaggcgatgctggaaagttagtcgataacctattgcagtatgagggacgcttagattttcaaattaaattgcatggctaccgcattgagttagaagaagtggatcatcacttaacgaatgtttcctacgtgaaacaagcagtcgttgtgccgaaatatcaaggaaataaagtccaacaattaattgcctatgtcgttccgcaagcacatgaattttcaagtgattttcaattaactaaggcaattaaacaagaattagccacgttgacaatggactatatgattccgcaaaaatttgtatatgttgaacaattacctttgacaagtaatggtaaaattgatcggaaagggttgatgaatgaggtgaatgccacatgatgaattntcctcatatgatyccctataatgcaccgtattactttgttctgctaattgcggcccttgttgccgatgattttaactttagccattaaagggacacgttggccttggtaccaaacactcgtgacactggtctttctatatatcagttttggtggcgaattttggcaacaaggagtcgctctgattgtatatgttatttatcaaacgttactaacgtggggctatgcggcttatcgaaaaaataaaaatgcaggttgggtcttttatctggctgtctttttagctatattaccgcttgtttgggtgaaagtttctcccttcatgacaggcaaaacaaccttacttggctttttagggatttcttatttaacctttaaagcggtccaagtggtcatggatttacgggatggcgtaatgaaagaatatcatccgtttcgttacattcagtttctcttgtttttcccgactatttcttcaggacccatcgatcgttatcggcgctttgaaaaagatttgaaaaacccgccgagtgcggagaaatatttagactttttagaaaaaggaattttttatttatttctaggatttttatataagtttattatcagtcattatcttggtggtgtctttttaccacatgtggaaaaaatggccttggcacaaggtggtttatcctggtggacagtcggctatatgtataattacagtttgtatctattctttgatttcgcaggctatagtttactggccgttggcacaagttatttaatgggctatgatacaccaatgaactttaacaaaccgttcctaagttggaatattaaagaattctggaatcgttggcacatgaccttatctttttggttccgtgattacatttacatgcgcttaatgtttttcttaatgaaaaagaaagtctttaagagtcggattgtgacttctaatattggttactttgcgttgttcttaattatgggcatttggcatggattaacgtggttctacatcgcttatgggctctaccatgcaacactaatttgtgtaacagatgcttggctacgttttaagaaaaaacataaagacaagataccatcaaacaaatttacacatgcatttgcagtctttttaactttccaagcggtttgtgtcagcttcctgattttctcaggatttttagacaaactatggtttaaataaataaaaataaaaatataaaggggcaatttataatgaacattcaagaaacagtattaaacattttagaagatattacaggaacagacgaattgtgaacaatcaagacattcaattatttgaagaaggattattggactctttagcgacggttcaattattagtagaaattgaaggacaattaggaatccaagttcctgtatcagactttgaccgtgaagtatggggaacaccaaaacaaatcattcaacaagtggaagctttacaataatgtctagaaataaacgactaatcagaatcttaggtccagtgctttgttcagcggtcttggttgcagtgttcttttttgcaccgttcagaatcaatttaacttccgaaaaaacgttgaaggaagcatcaacgtcaatggcaccgaacgttttaaaaggcaatgtgattaaaaacaaagcagtggcttctggtaaatatgttcctttttttggctcttctgaattaagtcgatttagtgctttccaccctagtgtgctctctgaaaagtatcaacggaactaccgaccgtttttactaggagaagcgggcacacagtcattaacccaagcaatggtcattcattcgatgggcgatgcgattgccaataagaaagcggtctttattttatctccgcaatggtttgtcaaaaagggtgtacctaatgatagttttggtgcacactattcacaattacaaacctatcaatggttagctaatttaaccgaattaaccagcggtgaccaatatctagcacaacgtttgactaaatttccagttgttcaaaaagacaaagtcttaatggaaaccttggcaaatctgcaggcagggcaacttccccaacgctctcaacgagattattttataatgaatctccgtttcttgaatcgtgaagatgaattgtttagccaaattggcatggttagcagagaaccaattgttgaaaaagatatgaaacaattacctgctacttataattttaatgaattagatcagctagctggaaaaattgcggcaaaagccattaataataataaatttgaaattagtaacggtttttatcgccaacggattaaaccagttttaccgaaattagctcattcacaaaagaaatgggattaccgtttttctccagaatatggtgatttccaagctgcgttagaacagttagcagaaaaaaatgtcgatgttttatttgtaatcccacctgttaacaaacgttggtcggactatacgggcttgtcacaagatatgttgcaacaagtagcacgcaagctgaaatatcaacttcaagagcaagggtttactaacattgctgacttctcaacatgtagtaatgaacgctactttatggcggacacgattcatttaggttggcgtggttggctcgctgttgatcgtcaagtagatgaatttatgaaacaacctgcgtctaaaaagttagcgtatcaaattgatgatcgtttttatcagacagattggcaacaacaaaatccattggtcttacctcaattttaagaaggcaagatggatcaagtaccaattatctgaagcggactagaaacgcttcgtaacaatgaaaatagcctgtacctgccgttgaataacgagcgtgcaggctgttttttcgtttatttttagtggagaacgttgctcaatttatttttttgtaagtatttttttagttcgtggtataatggataaaattggtttttgaggggagttatttttatggatgcaaaagaagaaaaaatgttaattgatttaacaagtgctaaagggattgctgggaatgaagacgaagtacgttcgttatttaaaaagtatgcagcaccgtatgcggataaatttttatatgatggccttggcagtattattgcaaaaaatgttggtgataaagaaggaccaaaagtctacatttctgggcatatggatgaagtcggtttcatggttacccaaatcacagaaaaaggctttttaaaatttcaaaccgttggtggttggtgggggcaagtgatgttggcccaacaagttcagattaaaaccacgactggtaaggtttaccatggtgtcattgggtctaaaccaccgcatgtgttaacagcggaagttcgtaacaaaccctatgagattgcagatatgtttattgatattggtgcaagtaacgatcaacaagttgcagaatgggggattcatccaggggatatggtgacaccatatattgactatcgtcgcatgaatgatacaaaatttttattggcaaaagcgtgggataaccgaattggtacggccgtttcattaaaagttttagaaaatttagcgacagaagggcaccccaatattttatttgcaggcagtgatgtgcaagaagaagtcgggctacgcggtgcgcaaacaagtacgcatcttgtgaatccagacatagcgtttgctttagacacaggaacagctggtgacacaccaggaatgacacctaaagaagccgactctgttttaggtgaaggaccacaaattttgatttatgatgcatcgatgattccgcataaaaaattacgtgattttgttattcaagtggcggaagaaaataacattcccttccaatatacagtgattacagggggaggtacggatgctggtcgcatgcatttaacgcgcaacgggattccatcattagccatcacggtgcctgttagatatctgcattcacatacctcagttattcatgaagatgattatttcaacacagtcaaattagtcacagaagtggtgaaacgtctagataaagaaacagtcgctaaattgactagttattagtttcagaaaggatggaatgaatgaagagtttagtaacaaattcgcaacatcgtgccaatgctcgcagagctcttgatgggcaatgggggatcatggcttggttaactttcttaggagtggttttacagagcttcttaacatcgattgtgcaaaatttattttctggtgaaaatcaagtttttcaaagtagttttgccgcagtattactgcaaatttttgttttattcgcgttaagttatgcgctatattacgcagccttgaaggtgttacgtggtgaaaaggtgcgggtcaatattttaatgagtgtttttcaaggaaaatattatggtccgctatttgtggtcaacctacttcaaaaagtacttgaacgtgtaattggtttgttatttttgttaccaattttatttggggcagggacaaccttgtatttcaaattgatgtttaatacagttacaccagaggaaatccaagcctttttcttaaatgatttttcctttttcctagcatttggcgttgccactatcttgatctttttaattggtttatttgtgagtggcgtttttcaatttgctgtgtggctacgttttgataatccagaactgccaattatgatggcattgaaacaggcgttatatttaatgaaaaatcgtttttggcaatatttatgtttacaattttcttttattggttggtatattgtgggctttttagctattggtatcggtctattatgggtgattccttataactatgtagcgttactagtttttatcaaactgccttagaagaaaaaggtttagccgaagaataaaaaagaagcttgaatccttcgttatctcgacaaagggttcaggttttttctttggtctttttgtgaaaatttaagcgttttaacctcgtttttccgttattttatggtaacatggaagtatcgtattgaaggaggttgtccacacatgaaattgactgtcttaggctgtttaggtgcttatccatacaaaggagaaggaacgagttcctatttgttagaatctgaaggctttcatttgcttattgatgcaggcagtacgacattagtgcgtttagaaaactatctagatccattgaaattagatgctgtcattctgtcgcattaccatcatgaccatatcgcagatttaggtgttttacaatattatcgtcagctttatccaacgctggaaccgacgcctattttgccaatatatggccatacacaagatcaaatgcatttcaaagaactaacgcttcctaacgtttccgaagggaaagagtattttgaagcagaagagttggcagtaggaccatttttaattactttcatggaaacgattcatcctgtcacttgttacgcgatgcggattgttgaaaaagcgactggcaaagtctttgtctttacaggagactctggttacttagcaagttttgaagactttgcaaaagacgccgatttattcttagcggatacgtacttatttgaaggtaatgaacgacatcatgcacattttacgtcaagagaagcgggtgaaattgccaaagcagcacaagtcaaacaattgatgttgacccatttaccacagcatgggtcattggaacaactacgggaagaagcgcaaaactatgctggaacggaaattccagtgacattagcccaaccagatttaacagttgagatttaaaaaagtaactataccaagggagagaaccgattgtgatttttgtaccgaatgaaaataatgacccacgagtgaacttagcaattgaaacatatttgttaacagaaatgcctttagatgagcccattcttttattttacattaacgagccgtcaatcattattggccgtaaccaaaatacaattgaagaaattaacaaagaatatgtagatgagcacggcattcatgttgttcgtcgcttaagtggcggcggcgccgtttatcatgatcatggtaatttgaattttagttttattatgccagatgacggcaactctttccgtgattttgcgaaagttacccaaccaattattcaagcattgcacgacttaggcgttgaaggtgccgaattaaaagggcgcaatgacctagtgattaatgatatgaagttttcaggaaatgcgatgtacgctaccaacggccgcatgtttgcacatggaaccttaatgtttgatagtgatattgatgaagttgtaaatacattaaaagtacggaaagataaaatcgaatctaaaggtatcaagtctgttcgttcacgggtaacaaacattaaaccatttttatctgaagataaacaagagatgacaacggaagaattccgccaagaaattcttttgaaaattttcggcgtagattcgatcgaccaagttaaaacgtatgaattaactgatcaagactgggcggctattaacaaaatttcagagcaatactatcgcaattgggattggaattatggtaaatcacctgcatttaacttagaacgtcgccatcgttttccaattggttcaattgaaatgaaaatgaacgtggcggatggtgccattcaagaaattaaaatctttggggacttctttgggcttggtgaaattaaagatgttgaagatattttaaccggcgtgaaatatgataaagcttctttagaagaagccattgatcaaattgacgttaaaaaatactttggcaatatcgaaaaagaagatttgcttgggttaatttattaaaaaaaaaagacagccgtttcaaacggttgtcttttttctagctaaaaaataatttttagcttttagaaaggtagtgctatgtgcaaaatcgtcgaaacgatttttatcagggaactatcaaatagctcgcctgcatatgtacttgaaccaagtcaagtccgggaatttggttatgtgcttcactataaatcactatctgtaaagagtatacaagatttcctttcttttgtgatatcaaatttttacagacaaagtrgtaaaatttgacgtttcttattttrgcaaggttataggcttgttttggggcttgaantggcaaaaattaatagtgatttangggaaatattnacatatgtagaagtatttttataagaataacgagaaaaaatcaataggtatgttcttgagggctactttttgacgttttctaattaaamcttawtamaaaatagcggaaacaaagnaaaaatgtgcttacaagaagtaatccgcacttagctaggaagttaagaatgtgcatgttattttcaaacaaataataagaatcctatttcaatcctttacagaggaacaaggacttcgtataataaagaaacgaaaaggagcgaaagtgatgagaaacgaaatgatgcatcgaccagtcgttaaaccagaattggttgagtatatgcgtacaaaacaaaagaaacttcccggagaattaggtgcagtggaggcggaagccaatgaagcaggggtgccgattattccgcacgaaacagtagtttttctacaatttttgctaggacaactaaagcccaaaaatattttagaaatcggggcagcaattggtttttcttcaagcttgatggcccaatttgttggtgaagatggtcacgtgaccacgattgatcgttttgacgtaatgataaaaaaagcgaagaaaacctatcaacgcctagagttagaagaaaaggtcactcttttagaaggacaagcagctgagattctaccaacgttggaaggaccttatgactttatttttatggatagtgccaaatcaaaatacattgaatttttacctgaatgtttacggttgctaccagttggcggcgttttaatggtggatgatgtatttcaagctgggacaattttagaccctgctgaggaagtaccgaaaaaaaatcgagcgattcatcgtaaattaawccaatttttagatgtagtcatggctcaccctgatttaacttctactttagttcctcttggtgatggagttattttaattaccaaagagaaagaaacgattattttagatagttaaagaatgtcttcacaaaaagaaagcgaatcattaaaaagcaagttcttttaatgattcgctttcttttttatgttatttaaaaagttatctcgctatttctaattgagaatgataatcagaaaattctcaataggacagtattatgcgttaataaaacctcgtttgtttataattattatattgacggaataattataaactgttatccttaaagagtaaaaaaacagaggaggaacgacaatgaatttaattaatcaaaaactttttgactttgaatgtgatgcctatcacgatggtgaatttacacgagtatcaacagaagatattttaggaaaatggagtattttcttcttttatccagctgatttttctttcgtgtgtcctacggaattaggggatatgcaagagcattatgcgcatttacaggaattaaattgtgaggtttactctgtttcagaagatagtcattatgtgcataaagcatgggctgacgctacagaaacgattggaaaaattaaatatccaatgttagccgatcccaacggtcaacttgctcgtttctttggcgttttagatgaagcttctggaatggcttaccgtgcttcatttattgtgagtccagaaggggacatcaaatcttatgaaatcaacgacatgggtattggtcgtaatgctgaagaacttgttcgtaaattagaagcttctcaatttgtagcagaacatggtgataaagtttgtccagccaattggcaaccaggagaagaaacaattgcgccaagcttagatttagttggtaaaatttaaattcgctttgtaaatagaggtcaaagagttggataaaacagagaaaatgttttgttcagctctttttctgaaacacagaagaaagaggagaagcaagtgacagaagaaatctacgatttgattattattggtggcggctcagctgctttatctgcaggtatctatgcaggtcgcgcaatgatggataccttaattattgaaaaagacaaaattggcggacaggtaacgacgacttctgaaattgtgaactatccagcgattcgtcacacaacaggtccagaactaatggaagaaatgcgcattcaagcacaagacttcggtgtagcttttacaaacgacgagattattgatgttgattttagtcaaacgataaaaactgttcaatcggcgagtcaaacctatcaagcatatgcagtattgattgcgacaggggcctctgctcgtaaaattggtttccctggtgaaagtgaatttacaggacgcggcgtggcctnattgttctacttgtgatggggagtttttccaaggcctagatatttttgtgattggtggcggttatgcagcagcggaagargccgtttatttgacacgttacggtaaatcagtaacgatgattatccgagaacccgattttacatgtgcaaaattaactgcggaggcggctaaaaatcacccgaaaattaagattgtttataacatagaagtgaaagaaattacgggagatgattttgtccgaaaagctgtgtttgtcaataaccagacgggagaagaaacggtttatgaagcgccaaaagacagtacatttggtctgtttgtttttgctggaaataaaccaagtacagaaatttttgaaggaaaaattgccttagaccgtgggtatgtgccaacaactgagaatatggaaaccaatattcctggagtttatgcagcaggagatttacgaataaaagaattacgtcaaattgtgacggcggttgcagacggtgcaattgccgccactcatgcgcaacgttacgtgacagaacaaaaaacacaggcgggccaatcgattgtaacgaagcgaatgactgaacgattagctaatcaatctgcccctgaaacaagcagtcagcaaccaaaagaaaaacagccagcgaaagttactggtaagcatcagtggttcccagaaagtatgcgccaacaattaagcggtattttcgctaaactaaccaaaaaagtgacattgcttcagtttttggatgcaagtgatgaaaaatcattggaacttcagtcattcttaacagaatttgcaagtctggatcagaagattactttagaaacgattttgaaagatactgagccagccaaagaattgctgtatgggattgaaaaaatgcctagcgttgtgctcttagatgcggcaggaaactatacaggaattaaatttagtggtattcctagtggccatgaagtaaactcgttggttttggcggtttataatgtcggcagcgaggggcagccgttagaagcaagtctgcaaaagaacatacttgcattgccaaaaagaaaaatagaaatctttgtttcactaacatgtcatttctgtcccgatgtcgtggcggcttgccaacgtattgcatcaattaatcctcatgtggaagcagaaatggtggacattagtctatttccagagttgaaaaaagaaaagaaaattatgagcgttccagcaatgctgattgatggcgaacaaatgatttttggttcaaaaacaatgaccgaaattattgaagccttggcttaaaagaggcgggaaaagtaattagcctaaagaacctaagtcattcaaaaaagtgagaagtacgtcgagatgacgtatttctcacttttttcgcatagttagtcaagtctctcttttgattaggcgattgagtttcctaaaaagaattaaaaagacacaacagcaaatgaacaataggcttcctgttagtggtaaaaagataccttgcatgtagctatcgatatgcattaaaccaggtacctcgctgaaaaaatcatggataaactgttgaatgagcttattggctagaaaagcagctaaaggcaaaataaaaatcaaataatagatgggttgtaaggcatagttaattaaaaatttgtaattttgtcgtacctaaaagagctaagatcagtaagtcgttttttttgctctaaaaaagttaggaagaaagttcggcaaatataactaatcaggaagaaaaagagtgttccagcgctgattccagccaaacctctgaaaattttcaagggaggaatcactgcataattatcaagaagaatcatttgtgaaagccatcgagaaaacaacaaagtcaataatagagcagaaaaagtcagaaaactaataataaagataagaatcaacgtactaaattggttttttgagcgccacgcatttttgagagagtctgtgaataagtaaagaatcgaatacatcatcgcgtcctttctgaaaaatttttgttttaggggaaaagttatgtaaaagaaaagacgttatctcctgccaactagccactgaaagagataacgccttcgctggaaacaagaactggattatttcaccaatactaatttttttaaaggttcaaccccaaatcgttgttcttgctgtaaaagaatttcggcacaagctcggctatcttctaaagcatcatgatgattatttaaagtgatattgaggttttcacaaacggtatttaatttatgattaggaaattcaggaaacagtttgcgactcgttttgactgtacataaagaaaggtaattaggttgttctaagccatagtaatctaaacagccagccaaaacactacaatcaaaacttgcattgtgagcgaccactaaccgatttggttgaaaacaatgctgaatttgttgccagacttcagggaatttgggcgcattgacaacatctgattcatgaatgccgtgaatttgcgtatttcgccagaaaaaaggtgtttctggtttgattaacgtgtaaaattcatccacaatccgactattttctactttaacaattgcaatggaacaggcactatgtttatcataactagctgtttcaaagtcaaaagcgtaaaagttcattaaaaaaaactcctttncaacgcgttgagtamcacttaaaaatcaagtacaacttccactggacaatgatcactaccaagaatatctgtatggattttagcactgactaaacgttcattcaaggattctgacacaacgaaatagtcaatccgccaacctgsgttattttttcgtgcattaaagcgataactccaccatgagtagatgccctcagcttctggataaaaataacggaatgtatcagtgaaaccactgtctaataactcagtaaatttttgccgttcttcaggcgtgaaccccgcatttttttgattggttttccaattttttaaatcaatattttgatgagctacgtttaagtcaccgcaaagaatgacgggtttttcttgatttaattcgtttaaataggcacgaaacgcatcttcccatgtcattcgataagctaaacgctttagttcagcttgtgagtttggtgtgtagcaagtgaccatgaaaaattctggatattctaaagtgatcacgcggccttcttgatcgtgagcctcgatacctaagccatagcgaacacttaacgcttcttctttaggcgaaaaattgctgtgccagaatagccttttttntcggcgaactccantactganga

SEQ ID NO: 180 - DNA, 31517 bp; double-stranded, linear
gtgacaatgatttattttgataatagtgcactacaccgatttacccccaggctttagatacatatgtaaaaaccagtcagcggattattggcaatccgtctagcctacatgacttaggcagccaagcgaatcggctcttacaacaagcacggaagcagattgcggagctaatcaatgtttcagcaaatgaaatctattttacaagtggcggaactgaaggagataactgggttttaaaaggaacggcaatcgaaaaacgagaatttggtaatcatattattatttctgcagtggaacatccagcagttacagaaacagcggaacaattagtcgaactaggttttgaactttcttatgcgccagtggataaagaaggtcgtgtaaaagtcgaggaactacagaaattaattagaaaagaaacgattttggtttctgttatggcagtgaacaatgaagtgggaacgattcaaccaattaaagaaatcagcgaggttttagcggagtttcctaaaattcattttcatgtagacgcggttcaagcaattgggaaagttaattactcagagtggttaacggatcgggtggattttgcaacgttttctgcacataaatttcatggaccacgaggcattggttttatgtattggaaacaaggaaaacgtttagcgccgcttttaacaggaggcgggcaagaaaacaaccaacgcagtgggacagaaaacgtaccagcaattgtggcaatggccaaagcgttgcgtttgcatttagagaacgaacaacaacggccgcaacatgtggcgacattacggagttatttattaaaggcgctagaagaatttcaaaatgtgactgttttttcacaagataatgaacattttgcgccacacattttatgttttgctttgaaagggatccgcggcgaagtgctagtccatgcattggaagaaaaacagatttatatttcgaccacgagtgcttgttctagccggaaaaaaatggctagcagcaccttatatgccatgcatgtgccaggggaattagcgacttccgctgtgcgcattagtttagatgaaagcaatacaatggcagaaattgaacaatttatgattgttttcaaccaactttatcaaaaattttctcgtgtaaattaataaaaaataagttggagcctagaaataggctccaacttatttttgctctctttatcgattgaagcggtagccacttccccagagcgtttcaattggagagtcagaaagattggctttttttaatttttcccgaatccgtttaatgtgaacaacgacagtcgaaacctcagtatctaaggcatcaaacccccagacactttcaaaaagttcttctttattccacacacggttaggatgttccatcaagaaaaccagcaatttgtattctttgcttgtaaaaataacttcattttctaaaacaaacactttgtgggcggcagtgtcgacagcgatttcattgatttttagtaattgtggtggttgttctgctttgcttaacaattgataacggttcatatgggcttttgctcgagcgactaattcattgggactaaacggcttgattatataatcatccgcacctaagccaagcccacgaattttatcaatatcttcttttttagccgaaacaatcatgatcggcgtttgctttttttttcgaattgcacgacagatttcaaaaccatccatagttggcagcatcacatctaaaataattaaatcaaagggctcatttaaagctgcttccaatcctttttttccatcatgttcaattgtgacagtcatatcgttaatttctaaataatctttttgcaaatcagcaatgcttggatcatcttcaataattaatacatgtggtttcatttttcatcctccaacaacggcagcgtaattatcacgttggtgccgtctccttttttacttgtgacagtgattgttccctgatgatagtcaataatttgtttgacaatacttaatcccaagccgcttcctttaactgttggggttcgagatttgtctacacgatagaagcgttcgaataaataaggtaattcttttttatcgataccaatgccgttatctgtaatggttaaaactaagtctgtttgattatgcgttaaagaaatcgtaaaggctagttgttctttagtgggatccgcaaatttaatgctattttgaattagattggtaatcacgcgattcatctgcgtgggatccatttgaacgtataaagcttcggtgggaagtacagaagtgattacgagttcttgttccaaacggtattcttcaagaatatgtgcaataaaacgagtgaaattggtcttttccattgtaaagacagcacggtctaggtctaatttagaatacaaaaataattcttcaattaaatcattgaggcctaaacttttttcatgaatgaccgttaaatagcgctgttttttttcttcagtattggcaacgccatccatcaaaccttcaacataaccaataatagaagtaattggtgtttttaagtcatgagaaatatttgcaattaattctttccgattagcttcatatttttcgcgttccgcattggcttcttctaaatcttgccacatttgttcaaaactaagttggagctgtttgacttctgttgagacggtttggtggctagttggcgtaaatggattttctttttgggcatccttacccaatgttttagtcgctttttctaatgcttctaatggctcgatagtggttttggttaagcgcttattaatgagccaagctgccgcaattgctacaaggataattaacaaaatcatccagataatccagcgtgtgaagaattcaaaaaggctgctttcgcgtttcaagacaataaagctcccgttagaaccatctaaataatgaaaatcggatttgacataatgatatagacgccctgcattatccagtgtgccagttggcataatattattcatttcgtagtttggaatatgtacagacaaagatttttctactaaattatccgaataataaggaaaccgtgcattctttcgaataatcacacttaatccttttgcttcaattgtttgaatcgtttcctttaattctttactcaaaggtgtatctagtaatttcggtgatttttttagcagttgatctaaggccaaataactttcttcttcgttagcggtcaatggtcgttgcttattcatcattcggtaagcttggggcaaactggggacagttcctaatgtgatgtaagaagctaaggataaaacagctaaaacagaggctaaagtaataatgatggcactaatataagaaataaaaaagcggcgtttaatggtcaaaagcgtccctcctagtggttttaatctatttcttacttatagtgtattacaagtgaacaaaaaaaagctagtattgttattaactttttttcatttgtttataatttgttcatttttcggcaagtaggagtttataaggctttgctattctaaatatatcaaaaagaaaaaaggggattaccaaccatgaaaaagaaaaaagtttttagtgcgcttaccttattaacctttagtacgttgttgattgcaggctgtgctggcggagccaactctgcaacagataaatcaagtgcagctagctcaagcactgcagtctctagttcagcagaagcagctaaagagcaatcaaaaggacaagaattaacagaaattttatccagtactgattggcaaggcacaaaagtttacgacaaaaatmataataatttaacagcagaaaatgctaattttattggtttagcaaaatatgatggtgaaacaggtttttatgaatttttcgacaaagaaacaggtgaaacccgtggcgatgaaggcacattctttgtgacagacgatggcgaaaagcgtatcttaatttcggatacacaaaactatcaagcggtggtcgatttaacggaagtgacgaaagataaatttacctataagcgaatgggtaaagataaagacgggaaagatgtagaagtctttgtagaacatatcccttattctgacgagaaattaacctttacgaacggccgtaaagatttagaaacagaaactggcaagattgttaccaatgaacctggggatgacattttaggggccacattatggaatggcacgaaagttttagatgaagacggtaacgatgttactgaagcaaataaaatgtttattagtttagcgaaatttgataataaaacaagtaaatatgaattctttgatttagaaacgggtaaaacacgtggagattttggttacttccaagtaattgataataacaaaatccgtgctcacgtttcaattggtgacaataaatatggagctgcattagaattaacagaattaaatgataaacgttttacgtatacacgaatgggtaaagacaacaatggcaaagaaattaaagtctttgtagaacatgaaccatatgaaggagactttacgccagacttcacgttctaattagtcaatcacgagtggatgaagcggtcaaaaggaagtaaaggattcttttgaccgcttcatttttaacaaaaaaatagtttatagttgtttttaatcgtttataaattgttcatttttctgacagtggtagtttagaatcgtttgttaagataggtttatcaaagaaaaggagcgatgctttatgaaaaagaaagtattaagttcgattactttagtaacattaagtacgttacttatagcaggttatgcaagtccagcatttgcagatcatgcagccaatccaaatagtgctacagcaaatttaggcaaacatcaaaacaatggccaaacaagaggcgacaaggcgactaagattttatctggcacggactggcaaggaacccgtgtttatgatgctgctggtaatgatttaacggcagaaaatgctaattttattggtttagcaaaatatgatggtgaaaccggtttttacgagtttttcgacaaaaatactggggaaacccgtggtgacgaaggaacattttttgtgacaggtgatggcacaaaacgaattttaatttcgcggacacaaaattatcaagccgtagtggatttaaccgaagtgagtaaagacmaatttacttacaagcgtttagggaaagataaactggggaatgatgttgaagtttacgtggaacacatcccttatcatgggaaaaaattagcttttacaaatggacgtgaagcattaaccaatcaaactggcaaaattgtgacaaataaatcaggggataaaattttaggaacaaccttgtggaatggcacaaaagtcgtagataaaaacggtaatgatgtgacagcggccaatcaaaatttcattagtttagcgaaatttgatccaaacacaagtaaatatgaatttttcaatttacaaacaggtgaaacccgcggcgactttgggtacttccaagtggtggacaataacaagattcgggcccatgtatctattggtacgaatcgttacggcgcggcgctagaattaacggaactaaacaatgatcgatttacgtatactcgaatgggtaaagataatgctggtaatgatattcaagtgttcgtggaacatgaaccttaccaaggcacatatcatccagcctttactttctaaaagtctcttgtcttctctcttatttaacaaaagaacgtcccccaacgttcttttgttttctcttcctctataaataaattgttattagttataattaaatattattattaagataattatgatgattattatttaataatttgttcatattgtggacaggtggagttaataactacttgctatccttaaattatcaaaaggaaagggagtagtcgtttatgaagaaaaaaatcgttggtacaattacgttgttggctttaagtgcgttattagttggtggagcaggaggggctttgacggcagaagcatacgttcctcaaagcgtagacaatcccaataatttaggggatttacctgagtatttacgttcagttggtattagacaagatgaaggattatcagaaaaagattgggctggaacacgcgtttatgatcgaaatgggaatgacttaacagatgaaaatcaaaacctattacatgcaatcaaatttgatgcaaccactagtttctatgaattttttgataaagagactggagaatcaacaggagatgaaggaaccttctttatgaccgctggtattacagatgtttcccgtcttgtaattatttctgaaaccaaaaattatcaaggtgtatacccacttagaactttataccaagatacttttacgtatagacagatggggaaagataaaaacggaaatgatattgaagttttcgtagaaaacaaagcaacctcaggaccagtttatggtcgtccgcagccataccccaataatcgtcccagaacactagaattcacgaatggacgccgtgccatgacagaacaaacaggccagattgatgtaaatcgacaaggggatgaaattattggtaaaacttcctttgatgggacaccgcaacttctttggaatggcacaaaagtagtggataaagatggcaatgacgtaacttcggccaaccaaaactttatcagcttagcgaaatttgaccaagatagcagcaaatatgaatttttcaatttacaaactggtgaaactcgtggcgactatggctactttaaagtaggaaatcaaaataaattccgtgcccatgtttccattggaaccaatcgctatggcgctgtcttagagttaacagaattgaatgataatcgttttacgtacacacgaatgggtaaagataacgaaggaaacgatatccaagtctatgtggaacatgaaccataccaaggaacttttaatcctgaatttaccttttaagaacaaaacatacgaatggaaaccaaaaaaagtttcgacttcttttggtttctctctttttaaaatagaaaaacagagaaagcgttttaatcgacaaataaaaaaagattcgttagattagaaccactggagaaaaatctcatatttctctcgaggaaaggaagttgagcacaatgaacaaaaaaattttaatggggctattaagtgtcgtgaccattccattacttgctgcgtgtcaaggaggagaaacaccttccgcagcgtcaaaaaatagtcaaacggtgactactcaaagtagtgcaaaaactgaaagcaccagtacaacccgttcggtagctcaaacaacatcaaaagaggaagtgaaagaaccgatgaagacctatgaagtgggtgcgcttttagaagcagccaatcaacgagatacgaagaaggtcaaggaaattttacaagatactacttatcaagtggatgaagtcgacacagaaggcaacacaccgctcaatatcgctgttcacaataatgacattgagattgcaaaagcgttgattgatcggggtgccgatattaatctgcaaaacagcattagtgatagtccctatctttatgcgggagcgcaaggacgtacggagattttagcgtatatgttaaaacatgcgaccccagatttaaataagcataaccgttacggtggcaatgcgttaattccggcagctgaaaaaggacatattgacaatgtgaagctcttgttagaagatggacgagaagacatagatttccaaaatgactttggctatacagcattgattgaggcagtggggttacgtgaagggaaccaactttaccaagatattgtaaaattgttaatggaaaatggtgcggatcaatccattaaagacaattctggtcgaacagcaatggactatgccaatcaaaaaggttatacggaaattagtaaaattttagcacagtacaactaagtattgtgtcctttcgggaaggaataaatacaggtaggagtgaaggaaagcatgaattattggttaaaaaatgttcgaattgaaacagagtatcaaaaagaaggtgactggttatctgggacagtaaccaaagaagtggcaattgaaataacagatggagtatttacgaaaatcatccccaatgaagaattggtagaagaacctgggttgacaattattgatggtcaccatcaattgattttaccaggtttgattgaaaaacattgtcactttgataaaagtaaactaggtgttccgtggtatccggtgacgccagcgaagtcaattgtggaacgtgtcgaagcagaaatcccttatttagatagtttagaactttctttaacagaacgcgccaaccatttaattgacttagaattaccacatggcgcgacagccttcagaacacatgtcgacgtggaaccgatgacagacttacgttattttgatgaagtccaagcgttggcccaaacgaaaccatttgcggtagaaattgtcgtctttccacagcacggcttactgcgttcagattccgttgaattagttgatcaagcattggcaaaaggcgccgattttattggtggcgtggatccttattcactagatggtgattacaaaaaatcattggctgaaacattccgcttagcagataaacatggtgtcggtgtggatattcatttacatgaccgtcacgaagctgggacaacaacgattaaagaaattatccgtttaacgaaagaatatggcctacaagacaaagtatttatcagccatgccttcgggttaaatgatttcattggtgaagaacgtgccgaagtttatgatgctttagcagcagaaaaaattcatattaattccagcgtgccaatcacacctaatacgattccgccaattatggaattgttacgtcatggagtcaatgtccatcttggttgtgacaatatctacgattgctggtctccctatggtgatggttcattacaagaaaaattggctcgtttaggtgaactttttaacgtgaaagatcaagatgctttaacccaattattaggcttagtgacagatggtgtcacaactttagacgaacaagggcaagtaaattggccgcaagttgatgctgaagcaacttacttactcactgaagcagaatgtgcggcggcttttgtcgctcgtcagacaccggtggaaatcagtgtggtaaaaggaaccacactttatcaaaaataacaaaaagaagcgagatttctcgcttctttttttgttattaaatttatttggattagacgcttaattttacaattgaaaacgacatccatcttatatttcattgatgaaattagtgagaagaagtatgatttaatttagctctgattacttttgatacatcgtttttcaactgatcaaaatctgatctataagtagcaataaaaaccaataaatcaacgccttcttgcgtatctaattggaaatcataaccgtttaattgtaaaaataagtcggttgccattacagctgtccgtttatttgcattgtaaaaacaatgctttgttgcaatgttaatcattaaaatagctgctttttcttcaattgttgggtacaggtcaacgtcaaagacgaattgtgctggttggttgctagccatttctaatgcattacgatctttgatgccaatttgttctgcgggagaatacgtttggatcaagaaagtattcatttgaaatagatcatccgctgataaataataaatacttttcatttagtaaccaattctttgtacagctcattatgtttttgttttgagttctccatcatttgttgtaattttttttgatgttctgacatattttttttaacaataatatcttttaatttttcytcgtctacataaacggtgtctgtcgcagtcgcaccaatgctttctagaaactcttttgacaatgtcataacaacagaattcccaacttttctaagttttctttctttgatttccactagtaacccacctttcgtatatattgtatatacagtatatcatggatcataaaaaagtttctatcacaagtctaatactttaataaaatttcttgattgcttatcgttccttcaaccagctatccaattgctcaaataaagtgatgaccgaaggatctttggtttgttttaaaaaatcatgttctaaatagtaaaccgctttaaaggtactctcaggaatggtccgtccgatttttttgctatagcggaacggcacttcttcgtctgagctgctagctgtactgaaacaaggtggaaaagtttttaatgtttcgtctgacagtgcgtaagcagaccagtccccgttttctggtaatccgtaaaagtgcggcaatagcgcttgctgaatactgtaatgatacagcagatagcgagaaagaaaaggatcatcccaaacaggcttcgtttggtcgatagcagctatttctttagcggaaatggcttgctttaataatttccgtggctctttaataaattctaaatctgtatagccgtaaaaattgactaaaaattgtggcgtcaaatttagtgtttgtaattgtttggttaactgtaacattaaataaccgccagcggaacgcccgcacaaaccaaaggactggttttgaataatctcttcgtttaacaattggaaggtttccgttagcgtccttaagatgtgatcgatttttgtatttggagccaacaaatagtccagtgctaaaacggtatagccattgcttgtaaacagctccttcagttcttctggtaaatcacttttggttccataaatcatcccgccaccgtgtaaatagacgacatagttcgttggttcagtcgtagtggggtagatagtaactgttgcgccattagcgagtgtttgattgtttttcaagtgcacgtctcctcatctttataatgtatgtggcaatttcataatttaacaattgcaagggattggctaagtcaatatcaagaagttgttccactttgtttaaacgataacgaatcgtttttgaatgaaggaacatcgcttcagaggtctgtttatagttgcgattattttggaaaaaactgtacaaggtttcaaacaaatcgtagttattttcggctaattgataaagtgcgcgaggaattaattcgtctaaattttccaattggtcttcgcggataaaatttttaaataccccaatatcggctaaggtgacaattggtccgttataaaaagtttcattaaagcgcagaatgtccagacattcaatcagtagctctttaatcccttctcgtgattttaaactgctgacggcaacggtaagcgtgtcgttttcttctaaaagttcagctaataaacgacttaattgcagctttgtaatttttccatcactttcattgaagttaaaaaggaccgccgaataatttagctgatcaaagaagatggatttcacacgcagggtacgaagtaaggcaataattcgttctttcatgagttgtgtattggtgtctttggtagaaaaagcaatcgcttggtaagaatctagctcttgcatttgcacttcacgaagcaaactgtttagctcgtcaggattttgcggtgtattttgtaaaatagcatccgctaagttgttcaaacgagtataccgttctttttttaacaaattttcggtattgaatttttcttgtaagacatcaatcgcattttcgataatcactaaatccgtttctttaaccttttcatcttgtaaataaaccagaagtaaacaattagtggaataactattgaaaatagaaacttctagtgccaactgttttttggggttggcatgagagtaaagtgttaaaagagagtaatcgtttttagtgaattcactgttttttagtttttctcttgagagcacaatcgcatcatggggtaagtcgccatcgctaatttccagatgtttatccaacatttttaaagcgaagggtaatttaatgatgtcataaaattcttgcataatcgtctcaaccgttgggtagtggcgctctaatttggtgaaacgttggcgcacatcgtaatacgtacgtaagacatgcgactgataattcaacaaaggctcgtaaatcgtaaatagaattttttcatagctaatgtcttgtgtgattttaattaaaggaatttcataattgaaacataattcgataaaccactctggaatcattttaatgaatcgatctgttttcaaaattaagccgctgatgccaattcggcgcatctttacgaaaaaattttccaactctttttcgggtagatcatgcaatgcgtagaaagaagtcaaaattaactgattctttctactccagttctcaatgtcaatcgcttctaagaccattgccgagtcaacttcattgtctaaaccaatctctttcgtcaaaattttacctttttttaagtcacctatcgataataactctcttaatttcatcattttctccttttttcctcttatggataaaaattataccatttttttagaattatgtccgatgaaaacactttctcgtttcgatacaatagcattgtaaggaatagataggaggatgaacaatgttacacacagtaattttgaaaaacaattaccaagactccatcaacttaatgttattgaccaataaaatcaatgcattagatggtgtaaccatgagtcaaatcatgatgggaacagatgccaacaaagacatccttaacaacacgaacttgttaacggatgaggccaatagtgcatctgcaaacgacatgatgattgtggttgacagtgaaaaagaaaacatcatggaagaagttatgccagcgattgatgaattcttagatgatttatcagcaaagggaactagtgaagaagcacaagcagcaacttcttggtcagaagcgtttgatcttttaccagaggcgaatgtagcgctattcagtattcctggtgaatatggtgcgccagaaatggaacgtgccttaaaaaatgatttacacgtgttctctttcacggataatgtgtcaattgaagatgaagtacgtttgaaaaaattagcgcatgaaaaaggcttactaatgatggggcctgactgtggaactggtattatctcaagtattccaatcgcctttacaaatgttgtttctccaggaaacattggcgttgttggtgcttcaggaacagggattcaagaagttacaacgattattgaccgcttaggtggcggagttgttcacgccattggtactggtggtcgtgacctaagcgacaaagtaggcgctatcacagtgaaagatgctattgtggccttagaaaatcacgaaccaaccgatgtgattacagttatttctaaaccacctgcaaaagaagttcgtgatgaagtggttgaattattacaaagcatttcaaaaccagtcgttgcgattttcttaggagaaaaaccaacaagtcacgaaggcaaagtttatctagctcatacattagaagaaacagctaaaattgctgttgatttagcaaatgatgtggccgtgaagaaaaattactttgaagcattagcaaaaccagctgtaccaacattaccagaagataaagttgtaaaaggcttatattcaggtggtacattagcttctgaagcaggtatgttaatttcagaagctttagatcttggcggtttagtgaaagcagaaggttatgtcttgaaatctcacggttatgaagtcattgacttaggcgatgatatgtatacacaaggtcgtccgcacccaatgattgacccagatgttcgtatcgaaaaaattcgtgaatacgcacaggatgaaaaaacggggattatcttattcgatgtggtgttaggctatggtgctcatgaagacatggttggtgcattgttaccagcaattgaagaagcgcgtgccacagccaaagaagcaggacgtgatctttactttgttgcaactgtctgtgggacgacgaaagatccgcaaaattaccaatcgtctgttgatcgtttgaaagaaggcggcgttttagtagcagaaagcaatactaaagctgttcaattagctttattactaaaaggaatcgaaatttcagaagacgataaagaagtggttgcttacaacggaccmactgtcgatgtrccraaaccaggcgaaaaagtaatggaactattaacaaccaaaccaagaatcattaacgttgggttgcaaagctttacagaatcaatcgttgattacggtggcgaaactgttcaatttaactggcgtccacgtgctaacggcaataaaaaaatgattaaaattttggatgctttggaagattacagtgaacaaatcgaagctgaaaatcacaaagtaacagacaaaattaaaaatgcacaaccattcttagtagatgtggtacctgcgaaatcagtgattccagaattaaatgatgacgcacaaaaaacattacttcatgctggaccaccaatccaatggtctgaaatgactggaccaatgaaaggtgcttgtatcggagctgcattattcgaacgttgggcagacaatgaagaagatgctttgaagatttttgaagctggcgaagtacgtttcattccttgtcaccatgtaaaagcagtaggaccaatgggcggtattacttctggtaatatgccagtctttgttgtggaaaatcgcttagaaggtaacgaagcatactgtatcttgaatgaaggtatcggtaaagtattgcgttttggtgcttattcacaagaagtggttgatcgtttagattggattaaagatgttttaggaccaactattgcgaaagccttgaaactttctgaagaaggcttgaacttaaacgtattgattgcgcgctctattacaatgggtgacgagttccaccaaagaaatattgccgcatctttgaacttcttaaaagaattgtctccattaattatcaaaacagatattccagaagatcaaaaatacgartaatcaaattcttagctgacacagatcaattcttcttaaatgtcatgatggcaactggaaaagcaattgttgatggtgcccgtaaagataccaacggaacaattgtcacaacgatgactcgtaacggcgtgaactttggggtccggattgcagaaacaggcgatcaatggcataccgcaccagtaaatacaccaaaaggtctttacttcactggtttcagcgaagaagacggaaatcctgatgtcggggatagtgcaattactgaaacagtaggtgttggagcaatggctatggtagctgcacctggcgtaacacggtttgttggtgcaggtggctttgaagatgcgttagcaacctcaaatgaaatggcaaaaatctgtgaaggaaacaacccaacattctcaattccaacttgggatttccaaggaacttgtttaggaattgatatccgtaaagtggtggaattaggaattacaccaatcatcaatacagggattgcacacaaaaatgccggtgttggtcaaattggtgcagggacagttagagcacctctaggctgttttgaaaaagccctagaagcgtatgctgagaaactaggcattacggttgaataaccaactagtcattagtgactacatttttcctatccaccaatatggcaagatgggaaccattcacagtgtttttgaacgttcatttaatctgaaagtccaggatcaattaatcaatgttgcaaacttccataattatttatcaagctttggtatgtttttgccagatcaattgtttcaagaaatctttccgtatgtacaacaaggtaataaagtcaaaatcacagaaaatcagttgaccttttacagtacagtcggcgtgaaaacgatccaactcacacctgctgaggtcgtttctttaaacattactcatttcaagttagaaaaagaccaattacgcttgttgcgagaccgcttattagcgagaaacttagaacgtagaattggcctgcctttagacgaacgagcgaagcatattttcaaaaaaatgagccaaaaacaaaaagtttggacactatcggaatggcaagaagtaacgaattatctgattggtcggggcaaagggttaaccccgagtggtgatgacattttagtggcgtatcaaacaattctgttcatacttgctgatgaaagagctgcggcgttagccgctactctttcggcagcaaatttatccacaacagatgttagtaaaggctatattgcaagctcggctaaaggatatgtaaattcattgttgtatcagttactcttggatttggagaaccatcgggataatagagttgacgaaaatattgacagaattatacaaatcggacattcctctggtaaagatatgtcatttggaatgttactagctttacaatctgtagagttagatgagaagtgaggagaagacatggagaatagtaaaaaaaatcaagcagtgcaagtgagcaatagttactggattaaagtcgtagccattttcttcgtaggctggattttaatgtacgcaacacgaactatttttaatccagtgatgggggtcattggagaacaatttggtctaagtaacacacaacttggtttagccaatagtatcttctttctaacctatgctgttgcacagattccttttgggatgattggcgataaaattgggcggaaattagtcattgctgttgggtttatcgttcttgctatttctacttattttagtggattagcgacaacctttgttatgtttttagtcattcgtgcaattgctggtattggtcaaggagcttactatggcccgcaatatgcgctatcgacagaagcgattccagcaagtaaacggaccatcggtaatgccatcatcaatagtgggatggccttcggtacatcaggtgggtacttactttcaagtaagttggttttagaaaatggtgaacattggagcaaaccattctttatcatggcgattccaacgtttatcgtaggaattcttttctatacaattttgaaagaaaaagtgattcgtcctggtgaagaagctgcacgagcagctgctgaagaaggaccgcaagaaaagatctcattaaaagaaattttctcaaatcgtaatttattagccgcatttattttatgtttcacaagtatttatgcaaactttgtcattattacttggttgccacaatttttaattgctgaacgtggctttacaggagcgagcgttggtttcatttcatcacttgtaccatgggcctctattccaggcgccttaatcttcgctcgtttgaatgataaaacaggtgcgacgaaaaaattagtctttacattagtacctttagcaatcctatctgtctttgcgattgcttttgtaacaaatcggacattgttaatttctgttttaattctttatgggttaacagggaaattagcgttagatccaattatggtgacttttgttaccaaacatgcaccaaaagcggccttaggaacaacgttaagtgcctataattttatcgggatgtcagggtcaatcctagcaccgtatgtcacaggatatttagcagatacagcaggctcaatgcaagttggcttctatctttcttgtgtactattagttattggtttactagcttttgctttcttagctaaagatgagagtaaaccgaaattaggttaattatcccttcgataatgactgaaacaatcaaaatgrgcaagacaaaatctttcatttcgtaaacaaattatttcttatccgtcgatactgaaaagattttgtctttgctttactaaaaaggagcgaatcaatcaatgagtttaaacgtaattgccctaggtgggaatgctattttagatacggatccaacagatgaaggccaaaaagccgtcgttaatcacgcggccaaatatattgcagaatttgttgctaaaggggaacaagtcattgtctgtcacggaaacggaccacaagtagggaatttgcttttacaacaaaaagcaggcgaaagtgaaaaaaatccagcgttgaaattggatacttgtgttgcgatgacacaaggaagcatcggttactggttacaaaatgctttaactaatgagtttgaaaaacgtaacattgctaaaccagttatctctgtagttacgcaagtacgtgtggacaaagaagatccttcgtttaaaaaaccatccaaaccaattggtccattctatacaaaagaagaagctgacgcagaagcagccaaagatggctctacgtatgtggaagatgctggccgtggctaccgaaaagttgttccatcaccaatgcctaaagaaattgttgaaaaagaggcggttcgtgctttagtagaggcggacgttttaactatctgttctggtggcgggggcattccggtcgtagcagaagacggacaatacgtaggtgtggaagcggttaacgacaaagatttctctgcacgtgttttagctgaaaacgttgatgcagaccgtttgattattttgacaggcgttgataacatctacattaattacaatcaaccagatcaaaaagcattagaacaaatcagtgtagccgaagcagaagaatacattaaagaaggtcactttgctgctggtagtatgctaccaaaaatcgaagctgccttagacttcgtaaaaggtgatgacaaacggaaagcaatcattacttctatcgaaaacttagaaaacatcgataaagaagcaggaactgtgatcagtcaaaaggggtagtttaccatgaaaaaaccgtccatgatcacccaaattgcaattgctgttgtcgtaggaatcctcgtaggactcttgattcctgctagcggcaattacttgaaaatagttggagatgtctttttgcgactgatgcaaatggctattcctatcttgatcttagggcaaattgtccaagcagttggcagtattaatccaaaagaattaacgagccttgggggtagaacaatcgctgttttcgggatttcctccttagctgccgctttatggggcgtcctaatggcagtcatttttaatccaggatacggtgttaaaatgactggcttccaagatgcttctattaaagcgcaagaaatctcaatcactgatacgattttaaatttcgttccgaaaaatatttttgattcactgactcaaggatcgattattcaaattattgtctttgcattattttttggtttagcactgaataaatacttacaaagccatccagagacacaactcttccaaataattgtggactttaatgaagttatcattacagtcattcgatacgtcatgtatctagcacctctggggatttttgctttaattgcttcaacaattagtcacttaggccttcaaattattttaccgttagtgaagtatctattggtctatggattaggaactattttatttttgggcatctggattttggttatcacattgtactgtaaagtaagtccactacgtttaattacaaacatgaaaaatatgtctgtgatggccttggcgacaacttcttcagcaattactttaccagtagctttggaagaaacagaagcaaaattaggtttaagtaagcgaattactaacttagtgttgccgktaggtatgtcattaaacagtaacggttcagcgatgcatatggcttttactgtaatgactatcgctcagatgtatcagctagagtttgatattacgaaaatgatttacttagcaattacagcaacgtttgtctcactagcaaacgcagttgttcccggtgcgggcttagtctcactggcagtgattgtyccgcaatgggtttacccattgagagtattgcaattttgcaggcgtcgaatggtttgttggcatgttacgaacaattttaaatgtcaattcagatgtttactctgctattctagttgcaaaatcagtggatgaaattgactatactgtctttaacagtagcaataagtagtgaaaaaaggggaggaaatgcaaggacgaagaagaaaatcacttgttttctttcccttttttaagattaatgataaaggagcaagcgcaatggaagaaatggttgtcgttacaccggaaaaattagaaaagctgatgaaacaaaaattagaagctgctggtttacattctgaacatgccgaagaagttgctcgacatttaacttttgcagatgctagcggtattcattcacacggggcggttcgtatggattattatgcggaacggattgcaaaaggcgggatcacgattgaccccgaattatcatttgaaaaaactggaccgtccactgccatttttcatggcgataatggcgtgggtcaatttgtttgtaacgaagcattagctgctgcagttgacctagccaaagaatcaggggtagcatatgttggcgtttctcaaacgagtcatagcgggacgttatcgtattatgttaaaaaagcagcggaacaaggcatggttgctctttcgatgtgtcaatctgatccaatggtggtaccgtttggtggtacaagcaattattttgggacaaatccaatcgcttttgcagcacctagagcaggtcatgaaccagtcgtgtttgatatggctacgacagtacaggcgtgggggaaaattttagatgcacgttcaagagatgttgaaattcccgacacatgggcagtagacgaaaaaggccagccaacgactgatccttatgaagtacgaggtttattgccgatttcaggaccaaaaggatatggactaatgatgatggtcgatgtcttagctggttcgttgttaggcttaccttttggcaaacatgttagctccatgtatgcggatttaacggagaaacggaatctgggtcagatgtttttagtcattgatccaagccgctttacagattctgaacgatttaaagaaaatattaatcaaatggtggaagaacttcattgtgtgcctacagcagaagggtttcaacaagtttactatccaggagaaattggtcagctaaactatcaaaaagccatgtcagaaggcattgaaattccacaaagtatttatgattatttagttagtgagattgtacattacgataaatatggcgggcaaggtgcctttgccaaataatgaggagcgcagagagtattcgctactgcgttgctctcgccttctttctattggaggaaagtaagatgaaaaaatcgtcaaaagtagcacttatttttgcattcttagttagtatttttgtgccagttgcggcctttgctgatgagattggggatgtagttgccccgacaggaatcatggcattagttgtgattattccattgattgttgttttggttctattgtttatgaaagtcgatatgattatcgctggtttaattggtggcgtcttagcgatgctgattggtggtattggactagaagaagcgaataaacagatgttggaagctatcccgatgatgttaggaattaccgttcccatcattaattcagctgttgcgatggcggtctttaaagcaggtagttattcagctgcattaactttagccaaacgaggcacaaaaggaaaagtcgagtatgtttcagcttttattgttatcttattagccgcagccacatatatgtcaggaattggtggcggaagtgcgatggttattgcgccattggcctttgctgcagttggcgttgttcctgaattaattgcagcaatgtctttagctgctgcggtatcatttacaacatcacccgcttcattagaatcaagtattgtttcaaaattaggcgatatcagtgtcggttcatatgtttcaaccatgcgaccttactggttattcttcgtagcattagcgattgtgttagccttttggggaacgaaacatagaaatgttggctttaaagagtcggcagatgatgaatttgataaaaagagcaatggtgaactatttaaaattaccttgccagccattttcttattgtttgctgtaatttttggaccaattgtgaatgatttaattggttttgccttctttacgccacttgtatacatgattttaacattagttttaattttcttatgtacagatttctcaatgaacaaatctgtcgaagcgatggtagatgggtctacatatattttgactcgtttattccaagtagggattttcttagcctttattaatgttattgcacaaacaggaacgtttgctgtaatcgcaggtgttgctgaaaatgcaccagcctttattgtcgtgccagttgccattttaacagggattttaattgggattccagctggggcctacgtaggttctgttttaactttagtgctaccagttgctgtatcgttgaacttcccgccgttagcattaggttttgtagcaatgggtgttggtttaggtagtcaaatgagtttcgttaatattactatgcaagctttatcttcaggcttccaaattccaattttggatgttgttaaaggaaacgtgaaatggttaagtattgcctctgtactattattagttatcggtttaatctttggataaaaaacaatttagggagtggaaaacatggatttattaattaaacaagttcgtcttcaagacggtgaagcattacaagatgtagctattaaagaaggtaaaatcattgaaatcgccccagttattactggcgatgccaaagaagtcatcgaagcagatggtcgtgttttaatcccaggttttgtagaaagccatttacatttggacaaggcattaatcgctgatcgtaaaccaaataaatcaggtacgttgaaagaagcaattgaagtaaccgcagaattaaaaccaacatttaccgaagaagacatttacgaccgtgccaaacgtgctttagaaatgttaatcgttcatgggaccacggcgttaagaacgcatgcagaatttgacccagcgcaaggttttactggcttcaaaacaattatgcgtttgaaagaagaatacaaagagttaattgacatgcaagtagttgcgtttccgcaagaaggaatttttaaagccccaggaacagaacaaatgatgtatgaagtaatggatatgggcgcagacgttgtcggcggtattccttataatgatgcaccagcgaaagaacatattgatttagtgtttgaaattgctaaaaaatatgataaagatgtagatttacaccaagattttgccgatgaagctgatgatatgagtattgaatatttatgtgaaaaaaccatcgctgaaggctaccaaggccgtgtttcagtgggccacttaacggcattgcatgccttacctgaagcagaattggcgcctattattgcaaaaatggcggaagcaaatattagcgtgatggctttaccagcaacggatttacatttaggggctcgtggtgatcagtacaatgttcgacgtgcggttacgccaatccgtaaattacgcgatggtggcgtgaatgtctgtattgctacgaataatattcgcaatgcttttacaccatatggcacaggggatattgttcaaacagcgatgttagccattcctgttgggcacctaggtggagcggatgacttaaaaacagtgctaccaatggtaacaacaagtcctgctcgtgcgatgggactagaaggatacggtgtcgcagttgggaataaagcagatttagtcttattagacacaaaagtggttgaacatgcgattattgatattccagaacggttatatgttattaaaaacggccgtgttacagtcaagacagacaaaaaagtcgaaatcattcgttaagaaaaaaaacaaaaagctaggaaggtgaaaatatgattaatttatcctgttttagctatgattctctattgaaaagtttatttttagtttatctttggtcgattttccttgatatatatataatcttcaggaaatgctcctgtctgtttaaaattcggaatttcagaaattattcttttttgctaaactagttataactggttagtaaaaagaagtattggacgaatagtgctgaaacaagtgaatgatccaaagtataaagaaaaatgaaaccgataccacaagacaagactgttgctgaaaatggtaagtgatcattctgctaagtttagtgtcttaatgtttagttaactaagaattgttggattgttctttagaaagaagggacaatatgaagcgaagtaaatggaaagaattgatagtaacgggcatctgccatatattagtattccccatactaatacagacaactgtttttgcagaaacattaccaagtacaaaacaagtaagagaaggaaccaatcattcattaacagcagaaaaagccgaaagtgaacaaccacagacaaaggataaactacatgatgaagaaacactggcattgtcaaaaagtgagttaatcgataatgaggctaatgttacaagtcaaacgattagagaaagaattgagacgcctaacctaacttatcgttatggatttattaatgaagaggggcagccagtaaacgccaatgagatccttctacagtatcatagttggcaaggcaattccccagatggcataaatgtgtgggaaggtgaaagtcaaccagtgacagcatctacagtggctaatttaaaagaagtggtaattccaagtgagaaagtagccgtctattccgacatgtcaacggtgcttgcagcgagtaatcaaacattttttttaccaagatattatacttctttaagcttatacaataagaaaggggaaattgatcccaattatccgctgccaactatttccgacgcatcaggaaaccaatatccaacaacaatttcgcaatttgaattggaaaaaatgtctgcacaacaatatagtcagaaaacaggagtaacgtttaacattagcgagagtcaaaaactaatcgttcctttgtacaaccaagtgaaggttgattcatcgaatcaatctgggctattgaattactttaaattttcagggccggtttattatcatgttaccaatcgcaaagtgacagaacattttgtggatactcaagggaaaccaatccctccaccaccggggtttagacaaggaaagcaaacacttattgagcgtgacccttacacctttaaacagaaagatcttttgccaagtagctatgaaattgactcaaaaacgtatcaatttcaaggatggtataaagggaaaacgaaacctgaaaatttagaaaaaagcgtaacgcccagttatgatattacctatgacgacaatgatgatttaactgttgtctataaggagatacctcaaaaaaattatacatttgaggatgtcaatggtgttgaaattgcaccaccatctgattttattcaggatcaccaacaaccaataactacggatggctttcgctatttagctggaaaaaaactgccacaacaatacagcgttaacggtaaaacttatttatatcaaggttggtatcaagataaaacmaaacaagagagcttagaaaaaacgaagcgacccataaactcccctgtttttaatgaaatgaacgctattacagcagtgtataaggaaataactgcaaaagctgaaatgcaaatagaaggactagtcaaagtcatgccaagtggttatatacaaatttggcagattatgcttacaaatgtgggagaagtaccgttaaaaaaaataaacttaaagccagcaagtggttggtcaccaggtctagctcggccaatccaagtcacgattcgtgttggatctgaaccaaacaaaattgttcctattactgatgaaaattggcgagttggcattactttaaatacggaagtgcctattggtcagacagcaactattatgatgacaacaattgctacaggtgaaccagatcaagtgttacaagcggctgttgaaatgaatggaaatttttctgctgttcacgcagctgatactgtcagaatccaacctaaaaatcaagaaattgtggcaccagatgaggaaggttttatcagcacaccaacttttgattttggcaaagtcgccatttctagcaacacgcagcaacatggtttaaagcaggcagcagattattatgaaaatggtcaggaaaatccatatttacgtttgaaaaaatcacaacccaattgggcactaactgcagaactatccccctttgaaggaagagtggatcaactatcatcaatgacaaagttattgttaggaacaaccaatgtttcaggttttattcagtacaatcaaccaacggaaactaaagttgctcttggcaaaacaaccgctattcaattagttgccaacggtgtagctagccatattgttgccaatggtcagtttgacgaaagtgatgtttatcaatttgatttttcttttgatcaaatcaaattagaaattccagcaaatcaaggtagaaaagatcaaacttatcaagcaatggtgacttggaatttagtgacaggcccataagtccataaaaaataagttgaatagtttgatcaaaaacattgcatagaaataataaaaggcggctcaacgaagcggcctttttcttgattcgttaccaaaatataacgaattttgtaacaaaaacgtttaataaaaagaaggaaaaatgattaattttacgaaaaaaagcatatatcgacaaaaaagaagcaaaatttgaataaaaaaagaaaaaatatgaaaaaaaatcgaagaattgtttaacaattgaaaacacgtgaaaactagtcgtaacaaggtgtaaaagccttacaaaaggtaagtttacctattatggagaaagaaggagtgatctgaaatgtttttgtaacatttctattgcttaattgaaatatgggtgtggtagaatgtttttgtcgtaagaaaagattaagatattttaaataaactttagaaattaattcggaggaatgacaagtgaagaaacgtctatttgcatcagtattactatgttcattaacgctatcagcaattgctaccccaagcatcgctttggcggacaatgttgataaaaaaattgaagaaaaaaatcaagaaatttcatcattaaaagcaaaacaaggggatttagcttcacaagtatcttctttagaagcagaagtatcttcagtatttgatgaaagcatggctttacgtgaacaaaagcaaacactaaaagcaaaatcagaacaattacaacaagaaattacaaacttgaatcaacgtattgaaaaacgtaacgaagcaatcaaaaatcaagcacgtgatgttcaagttaatggacaaagcacaacaatgctagatgcagttttagatgcggactcagttgcagatgcaatcagccgtgttcaagctgtttcaacaatcgtaagtgccaacaacgacttaatgcaacaacaaaaagaagacaaacaagccgttgttgataaaaaagctgaaaacgagaaaaaagtgaaacaacttgaagcaacagaagctgaattagaaacaaaacgtcaagatttactttctaaacaatctgaattaaacgtaatgaaagcttcattagcattagaacaatcatcagctgaaagttctaaagctggcttagaaaaacaaaaagcagctgctgaagcagagcaagcacgcttagctgctgaacaaaaagctgcagctgaaaaagccaaacaagctgctgcaaaaccagctaaagctgaagtgaaagcagaagcaccagttgcctcttcatcaacaacagaagcacaagcaccagcaagctcaagctcagcaactgaatcaagcacgcaacaaacaactgaaacaactacaccaagtacagataatagtgcaacagaaaatactggctcttcttcatcagaacaaccagtacaacctacaacaccaagcgataatggaaataatggtggccaaactggtggtggaacagttacaccaacaccagaaccaacaccagcgccttctgctgatccaacaatcaatgcattgaacgttctacgtcaatcattaggtttacgtccagtagtatgggatgcaggtttggcagcttctgcaactgctcgtgcagcacaagttgaagcaggtggcattccaaatgatcactggtctcgtggagatgaagttatcgcaattatgtgggcgccaggtaactcagtaatcatggcgtggtacaatgaaacaaacatggtaacagcttcaggaagcggtcaccgtgattgggaaattaacccaggtattacgcgtgtcggttttggttactcaggtagcacaatcgtaggacactcagcctaatcagcaatgataaaaatagacgtaagcagcttctgaaaagaagctgcttttttcattactatttcatccgtctccgttgacaaatttgctaaacgtggtattctaattataatctaataatttccgttgaataggaaagtaagtacaagacagctggtagagagactttggttggtgaaaaaagttagatgtctgtatcgaaaaatggcctaggaggaatttttgtcgaaacgtaggcaaaaacgtaatgtctttcgttaacaagaccgctgattatgattgtcagttgaagggaaagagtcatctttccgaaaaaaggtggtaccgcgataataatcgcccttttactagttacggctagtaaaagggcgtttttttataaataaaaataggaaagagtgaggcaaatgagtagtcagattccttttacagttgatcatgtgggaagttttttacgtccggaaacaattaagaaagcacggaaaaaggtccaagcaggtgctttatctcaagcagagctacgtcttattgaagatgaggaaatcaaagcattagtagcaaaacaaaaagctggcggcttacggggaatcacagatggtgaatttcgtcgcggtttttggcatattgatttcttagaaggattaaatggtgtgacaggctatatcccagaaacggggtataaccaaacctttcatggaaaagcagctccggcctataatatccgcgtagtggataaaatatcttttcctacgcaacatccatttttagaggacttttcatttttaaaagaggtggtggaagttggtgatggcacggtagccaaagcaacgatccctagtccgaccatgattttacgtcaagaaattttatctaacgatggcacctcgcgcattcaaacaatttatccagagattggtgctttttataaggatttagcacaaacatataaagacgcaattgcggccttttacgagagaggttgccgttatttgcaatttgatgatacaaattgggcgtttctagcggatcagacaaaacaagaagaattacgagcaaaaggaatacagccagaggaaattgcacaagtgtgcaccacgattattaatgaagccttagctggcaagccagaagatttaacggtaaccacacacatttgccgtgggaaccatgcttcgtcttggttattttcaggtggttatgaaccgatagcaaaagaattatttgctacgaattatgatggtttcttcttggaatatgactcagatcgtgcaggggacttttcaccattaagacattggcaaaataatggcagcaaagtcgttttaggtttagttacttctaagtttcctgaattagaagagactgaacaagtgaaagcacgaattgaagaagcccaacagtttgttcctttagaaaacttaagtattagtccgcaatgcggttttgcttcaacggaagaaggaaatcgtttgacggagaaagaacaatggcgcaaagttcaattacttcaagaaattgctagagaagtatggtaaaaaaactgggacataagtctaaacggcttatgtcccagttttttcattgtattattttaaatattgatctttagtaaaattcgtgtgttcatactcgccgttgtcaccataaaagcggttatagcgttgtttgaatttgcggaataaataaatgactgtcactttaactaggcaatacattggaatcccaaaaataacgcccattaaaccaaacagttcacccataactaacaagacaagtaaaatagtaatcggatggacttttaatttatcgcccatcacacgaggaataacaaaatcaccatgaatcaattggatggcaaaccagacgataacgaattttactaccataaatgtggaatcctgaaaggcaataatcaatcctggaataaaggcaataaatggcccgatataaggaataatacataaaatacccgcagctaaagctaaaatgctaccaaattgtaaaccaattaatagaaaagctggccaatacataatccctaaaaccaacgaagcaatgacttgaccttttagataatcgccaatttgaatgttggcaatttggctatattcgtcaaaatcaggacgaaaagctgggggaatgatgccttttacaaagcgataaaacttttctttgtcttttaaaaggaaaaaggcgatgataggtcctgtaaacaaggttaggaaagtagaagagactgcagaaaagacgcttcccagaccttgtgcgcctgtttgtaggtaatcccctgcaaagtctttaaaggagtttgcaagtttgccccagagctgattaatcgactcattagcagattctaaatcttttgcaaaaggtgttttagccataaattcttgtactgtttggagcgtgcttttccaaaaacttgggaattgtttgattaattcttccgtttggtcttggataattgggaaaagttgcagtccagctaacactagtaatgcaataattaagacatagagaatgcgcaatcgcccaaacacggggaatttttttctcaaggcgtttcaccattggattaagcaaataaawtagaataataccaaaaagtacagggcctaagacggcactaaaaataacaaaaattggtttaaagataaatgaaacagtgttgaataaaaagatagttacagcaattagacaaaggatagttaatgtgtaaagtaaatttttcccacctaaaaagcggatccacttggtactttctttatccataagttgctcctttcgttaagctttatttctaaaatgaccaataatttcaatgacacccatgaaaatcaggataaatccaaagacttgcatcaaaactaagagacttttgaagggattaaaaactaaaacggctccagcgattaaaaccagaatactgtagataagcgcgcctgtttgacgagtatttaaagcaaaagtsaattgaacgaggccgtttataacaatgctaatccctaataaaaacggcagaatcgaaacgatcactggtgcaaaaaataaaaaggctactgctaagacgacaaagattaaacctgttacgaaaccaagtccccagctacccgtttgtttttttattttgtagtcatcataaatattaattaaccctaaaagcatcaaataaccagcaattaaataaccgacgaactggaagaaagcaccgggattaaagacaatggcacttccgataacgataaagacgg

SEQ ID NO: 181 - DNA, 11879 bp; double-stranded, linear
aggtaatagacagtgcaaaaacaatgattagaaaggtaaattccatcctatcattcccttctatattaaatttttattgacttaccgatcaaaacatttaagtaattttttctttttaagaataattttcttttcaacttcttctaactcagaactgcgttcgcaaagttccaattgagcgcgtcgtgcttctaaacgaagaagttctcctttaattaattcaatttttttgtagcgtaagaaatttttmttttgcatacgttctgcaaagtgttgtcgtttttcttcagggattgcttgatatttcnttttcaagtcagcgacacacttttcaaattcttcactcaccgaaacaacttccttccmaaatttaatckgctawttatwacaaattttaccaaaagtacaagcaaaattgctttcttttttcaaaagaaattcagacaaaacttaacgcgggaaaagctgatttataggagctgaacatggttaatcttcattaacaataatacaatttctgcccttcattcatccgtgttgaaagaaaaagaaccatttcttctagtggcgcagaaaagcgtaaaaccacccctcttctgcctttttttaaataccctaaacgaataccgttcggcttttgaacaaggacaatcttttcgatatctttaaaggccgtgccccgattgtcaaaaggatgcgtaataatacagtcctccgcaaaacctcttgcatcgtaaagaaaactgaagataatcaaaatatataacacacttcgaatcatttcaattttatctcctgccgaaaatgcattggccagaatcattaaactaaaaaaagcaactaaatattttgttgtaggatgttttgcagccggaattacaatacttttacgtacgaagtaaaagtaaccatacataacgacgacaaataaaaatagcaataacgtaaatccatcgataatcacaaacgactcctttatttctttttcttttgaatatctgttaatatatcatttatttctttaatttcttttttkgattcgttaatcttttkgataaccgcctcacggttttttccaggcggtaagtcaattgattcttggtagtagtttgctaaagcttgaacttttttcattttttcgctttgcaacaaggctatatttcttttcatttaaccgcctcctcttccttagtatacattactttgtaaggaattgcttaatttgcaagatattttctaataaaaaggagtaattttacattttcttataaacaaaaagtgttcggctgagtaacaccagcgaacgataaaataatagaataaaagatgagacagaagtagtttacttttgtctcatcttttattattgagctgaaatcgctaaaccaattgctttttcccctaggtgggtcccgataactggaccaaaatgaccaatttcaatttctgcatttgggtatagcttttgtaattttgcttgttctttttcagcaacgatgcggttattggcatgaatcacatacagtttaactggtgcttcaatccctgcgtttcgttcaccaataatcttttctgcacgagcaaaagctttctttgttgaacggattttttcaaataatacaatctttccatcttcaaaagtcaagataggtttaatcttcaatagtccagcgatcaaggntgcgccattcgttaagcgaccgccacgaactaagttgttcagatcttctacaattagatatgcatacgtattgtcacgaattaaatctaatttggcaaaaatttcttctaagctggctttttcttctgttaaatctaaagcagcttctaccatgtgtcccattggcatacttgtaatttttgagtcatatggatacaaagcaacgcctgggatttcatcggtaagtccgtgcaatgtatgaacaaaaccmgagattcctgaagaaagatgaatgctgatgatggtgtcgtaccctkgttcagcgattgatttgtaaagctctaacacttctcctaaagcaggttgtgaagtcgtcggaaattctttactattatttagcaatgcataatattcatctgcttcaatgtcaatgccttcgttgtatatttttccatctaaaatgactgggatgggaattacaaaaagattcggatgatctttaatgcgctcgggtaaataagctgtactatctgtcacaatagcaattttcattttgtaacctcgtttcactaattttccacgttgtttctaatatagcataaaaaaggatattttaaaakgctttccttattcgttcaggaatttttcgatggcgtcagcatttttttgttcatctacttctaaaatactgcctgcataagaggattcaccaaaattccaagaatctggtaccggaaccgataatgactcaacccctgcttttcctttaatcaacaatgatggtccattcgttaacatgaaactaacaggcacatctgtcgacatatagccgactaatttcccaagtgattctggggttcttaataaagtcattgggtttttcatttggctcattacagctgacataacttgttgttggcgacgaacccgaccaaagtcgccttcttcatccatcctaaagcgagcgtattgaagtaagacatgtccatccatgacctgttgccctttttcaatatcaacaccatctaaattcagtgatttttctgcatcgattttgacaccttttggaaacatagagtcaacaattttttcaaatgattggaaatctaccttagcataatatttcgtatctaaattaaagttttgttttaacgtttcacgaaccaattcagcaccgccataagcgtatgcggcattaattttattcggcccgacaccaggaatgtccacgaatgtatcacgcataaatgaaattaatttcggtttttttgatggtccatttagttggagaaccattattgtgtcggctcgtccagcatcttccccacgtgtatcgctgccaagaattaaaatattcttagccccgttgctacttttgacaccattaaatgtttctactttttcttgaggcaacgagtcatcatgttctgctgcagattttccttttaaaaacatgactgtactataggcaaataacagaatcaataggatcactagccatttgaaaaagcgttttgtttttgattttttacgtttcttttttggtttcttgtctttttttccgcggggtggttggtcagaaccgttgccaccacctgaatctgtttgatgtcgcctctcacttctgcgactgtcctcagtatagctgtcttcgtaaactggckcttgaaggctttcagctagttcttctggttcttcttctctatgttcacccattgattttcggggattaaaggtctttttatgctctgctggtctcgattttkcatgaatatgtttataacgatctacacgactcatcgtgtcactcctttacctctgtgttttatcacctttcttaggatacctcatttcacaggaaattcctattacaaatatgtaatttaataaaaaatgaaactcactttatctaataagtaagcttcattttcatttttaactctttaaagtgtggacaaaacatagatcgggtaatcccctaaaatttttatttctgcaccaatgagttccagttctgttaaggctgcttcaattaatttttctggttgatctttcactaagtccattaaaaagaagtactctcctagctttgttttcaacggccgcgattctattttgctaagattaatccctcgccaactaaacacgcttaatactttgtgtaaagagccaggaacattacttggcatcgtaatcgccagtgttatttttttctcagatagcgggaaagaaatcgctaaattttcagaaccaagaacccaaaatcgggtttgatttaccgataaatcttgtatatttttttcaacaatggtcaaatcatacatttccgcagaaagttttggtgcaatagctgcaaaaggtaattctggatgttctgcaatgtatttggcggcgtaanctgttgaaggtgttgcttctaaaatcgcttctggaaagtttttctctagaaacatctgcgattgagctaatgcttgcggatgtgataaaattttctgactttgttgccagatcgcttgattctcttttgccaccattaattgttgttgaatcggtaaaactaactctgcttggacaggtaactgcgcttgatgatacaaataatctatcgatgcgttaacagttccttcaatcgtgttttctattgggataatgctccatgccacttcttgctgttcaattgctttcaagcaagctggaatcgatgcgtacggcatcaacgtagcttcaggaaaagcagccaacgttgcactgtacgtaaaggaaccaatcggacctaaataaccaactttcatcgtttctctactcctttaattgttgcagaatttcattgataatttcttctggcgagcgattggtcgtatcaattgtcatcttcgcacattcttcataaaaatttttacgagactcaaacaaagtaatgatttcttttgaagaacgttctatagctaagggccgttggttttcagtatcttctgtgattctttttaacagctcttctggtgtcgcatgtaaataaatcacttgctgaaaagattttaataagctacgattttctggtccgacaacaatcccgcccccagttgaaaggacggctgtattttttgacagctcctttaaaagttgggtttcctgttctcggaaagctgcttcaccatatttttcgaaatagtcaggaattgagcgtcctattttttcaattaacgctgtatctaaatcaagatgaggcatcttcagtttattggccaaactttggccgatagttgttttacccgcacccatgaaaccaattaaaacaatgctttccatggttcgttatcctccttcgttaacaacttaaacgttctaagtcgtcaaaaaatgctggataagaaactgaaactgcttcagccttatctaattcaacagtgccttcttttacaagtaatgcagcaatttgtaacatcatcccgatacgatgatccccataactggtaactcttccaccatgtaaagaagttggtccatgtataattaagccatcatcagtaggcgtgatgtcggcgcctaaaattgttaattctttcgctactgcatcaatccgattggtttctttgactttcaattcttctgcatctcgaatgattgtcgtgccagtagcctgagtagctaacaaagcaataatcggtaactcatcaattaaacgtgggataatagcgccaccaatctctgtagctgttaattgactcgtttttacaagtaaatcgccagaatgattggcctcatcttcatttaaaatagtgacggaaccgcccatgtttttaatcacatctaaaatacctgtccgcgtttgatttaagccaacatttttcagaagtatctcgctatctgggactactaaacccgcaactaaaaagaaagctgcagaagagatatcaccaggaactaccacattttgacctgttaattgttgcggtccagttaacataatttttttaccgtctacttcaagtgtcccaccaaattgtcgaatcatctcttctgtatgatcacgtgtcttttctttctcaaccactacagaagtgccctcggcttgcaaagcggcgaataaaatagccgatttaacttgagcacttgcaacaggcattgtgtagtcaatcggttgcaaattttgagtcccgcgaatagaaattggcggaaactccgtttgctgaaccccttgacattccgctcccatttggtttaaaggaagcattacacgattcattggtcgtttggcaatagacgcatcaccagctaggcgcgtttcaaagggacagccagctaaaatgcccagcatcagacgaattgttgtccctgaatttccaacatcaattgtattcttcgccttttttaagcctgcaaatcctcgcccctcaacggtgattgtcgtcccgtcatcttcaatgttcacacctaaagaacgaaacgccgctaaggtacttaaacaatcttcgcctcttagaaaatttgtaatcgtcgtttttccagaagaaatcgctccaaacataatacttctatgggaaatcgatttgtcgctaggaaccatcagagtcccttgtaaatgcttcacatttgtacgtagttgcaccctcatcacctcttatttttcgtaacacgtatagttcgtttttttagataaaatttgttttgcagcttggcagtctggttgatttttaaaagacaattgaagaatcccatagatttcttctctcgtttctaaaattttaatatttgtaagagaaaggtccgcttcgcctaaaatttgcgtaatttcagcaatgattcctggttgatctggtacatcaacaaacagatcatagaaagctgggattgcgccttctttatgaataggcaattgagcacgtgtttctttggccttatcaaaaaaattacgaatagctggggcatttttttctgttaaccattggcaaacagtagtcatctctttttgccaattttctagtaagtccaataatactaagcgattgcttaataaaatatccgtccacatcgttgcatcagaggaagcaattcgagtaatatctctgaatcctccagccgctagctgctgcgctctagggtaagtggtattcagttgctgactttcgttcactaacgctgcggcaacaatatgtggcaagtgacttagagcaccagtaatttcatcatgttcctgtgcaggcatcgtaataaacttcgcatgcgttccttttagtaacgtttgtaactcctgaatctgtttgtttttttcgccatggtcatcggtaaaaatatagtaggcattttcaaacaaacgttcatcagcggctgttacgccggatttatgtgaaccagccattggatgaccaccaataaaatttttcatgttaagctttgttgctaactgattaatttccaccttggtactacccacatctgtgatcagagcagtttctagtgataattggtttaattcttctagttgtactaaagttgctttaactggggaacaaagaaaaataatctctgctcgtcttgccccacttgttaaagattcagctatctcatcaattagacccgttttcttagcaaattcagttgcctccgcttgattatcgaaaccgataatctcactgtttggatgcccttttttgatacacaaagccagtgaactcccgattagccctaatcctacgattaaaatacgtttcttcattttttccctccatatacttgcgactttcttccattaaaagttttgagtatatagacgataacgtttcactgcttctttcatttgttcaaatgagtcactatcaaatttttcgagcatagcctttgctacttccgttgcaacaacggcttcacaaacaacgctagcggccggtaccgccgtgctatcagagcgctcaacactggccttataaggctcttttgtatcaatattcacgctttgtaatggtttataaagggttggaataggtttcatgacaccacgaacgatgattggcattccgttggtcattcctccttcaaaaccgcctaaattgttggaagttctggtataaccagtactttcgtcccaaacaatctcgtccatcacttgactaccagggcgttgtgccatttcaaatccaatgccaaactcagcacctttaaaagcgttgatgcttacaactgcttgcgcaattttggcatctagtttacgatcccattggacatagctacctaagccagctggaacgccacccacaagtacttctactaccccaccaattgtatcgccatttttcttggtttggtcaattagttctttcattttttcttctacggaaggatctaatacgcgaacggcagattgttcagatcgttcttgaatttcacgaatcgttaaattttcagggatcgtagcttcaatcccacctaataccgcgacatgcccagcgacttggatatccagttcagctaagagttttttagcaaccgcaccaatcgccacacgcatcgttgtttctcgtgccgaagaccgttctaaaacattccgtaaatcatcatgttgatatttcatgccaccgactaaatcagcatgtcctggacgtggtttgctgacgcggcggattttcttttgtttttcaggaactggctctactgacatcacggaggtccaatttttccagtctttgttttcgacaatcaacgttactggtgagccaagtgttttaccatgccgaatacccgaagtaatacgtacttggtctttttcaattttcatccgtcccccacgaccgtaaccgccttgacgtcttgctaattctcggttaatctcttcgctacttaaaggcaagccggctggtaagccttcaataatagcagttaattcaggtccatgtgattcgcctgctgtaataaagcgcatcttaaattcctccttctctgtttaaaaatgctcgaatttcttccgttggtaaagagacaattttcgcttgaccaattttttctaagacaatgattttaatctgtcccccacgtgtttttttatcatgtgtaattgcttgatagagacgttcttctgaccaacgatctgtggttactggtaaatggaacttttctagcatggtgaccaactcttgggtagtcccaagtggggaaagcccttgttgttctgcgacttgagttatttgaatcattcctaaagaaacgccttcaccgtgagcaatcaccccgtaaccagctgtattttctaatgcgtggccgatcgtatgcccaaaattcagaatcaaacgtaagcccaaatctaattcatcttcttcgacgacatcacgtttaatcttgcaacaggccgtgataatttcttctgcatgtgccactaaatcttgttcattttccaaagaggataaacggtgccacaattcaacatcagcgatagctgctgattttacaatttctgcaattccttcacgcacacgtctaggttctaatgttttaagtgtattaggatcaattaaaaccccatctggttgggcaaaagtaccgacaagatttttggcttttttagtattaaccgctgttttacctccaatgctactatctacttgtgccagtaaggttgttggtacttgcaaaaagtgaataccgcgcatataggttgaagcgacaaatccagctagatctcccacaacgcctccacctaaagcaattagaccatcacttcgagtcaattgctgttccgctaaaaaatcataaagcagttgagctatttcgaggctcttactttgttcacctgccgctacagcaatcaatgatgtttcaaaaccagcagcttgcaattctttctcaacagctgcgccatataatttattcaccgtttcatcggtaataatcgctacccgttgtggctgccacaggctacgtacccaggtgccaattttatctaaggcacctgtttcgatggttaaatcatatgaatgtgtaggtaacgttacggttaatttcatgtcctctactcctctgtctttactaatcttctaaagcattaatttctttcattgctttttcgatgatatgaacttctttcatcatacgtaggtaagttttttcattcaaggattgtggcccatctgaccacgcattcgctggatctggatgaatttctacaatcaagccgtccgcacctgaagcaacacctgctcgggccattggcggtactaaatcccagataccaacaccatgactcggatcaacaataattggaaaatgacttaattttttaattaaaggcaccgcacttaaatcaagtgtattgcgcgtagcggtttcgtacgtacgaatcccacgttcaatgaagatcacattgaaatttccttgcgcacaatgtattcagctgcgtttagccattcatcaatcgtaccagcaatcccgcgttttaagccaataggttttccagttttaccaaccgcttgtaataacttgaaattttgcatgttgcgcgcaccgatttgtaaaatgtcactgtattttgcgacaagttctaaattcgcttcatccatcacttctgtaatgacttgcatatctaattcatcagccgcttggcgaatgtattttagtccttcttcttctagtccttggaaagcgtatggcgacgttctaggtttgaatgcaccacctcgtaaaattgttgcacctccagctttagcaattcgcgcacattcgcgaatctgatctaagctttcgattgaacaagggcccgccatcatggtcatactgccgtcaccgattttaacaccgttcacatcaaccactgtattctctggatgaaataaacgactcgttagtttgtaagacaacgaaatgcggacacttttctccacgccttctaatgctgttaactctgcttcaactaatttttctgtatcaccaatcaagcctatcactgtttttccattatcttgacttgtttgagtagttaagcctgcacctgttactaaatcaatgacttgtttcatttgcttttcggttgcattttctttcataattacgatcattatattctctcctcatgcctttaaacggcgctctttttatctattttcaattttacgttttacgactgatacaggcattttttgtcctgtccattgttcaaaagcagcagcgccttgataaagtagcatgtccaagccgttgcttgtttctgcaccacgtaaacgggcttcttttaataactgtgkttcyctgggattataaatagcatcatacmcaaataacttcggttgaatcattgcataattttctataggactactatgcgcatgtggatgcatacccacactcgttgcattaactaacaagacgctttcagcaacatcttttgctagtttttcagtatccgctaaatcgtttaaatgaattacacagttggttcgttcagtgaaatttgccagttttttttgactgtcgttaaagcccgcgcttttcctgttgtaaacggcgatttctttcacgccatctaaagcagcttgggcaatgattgataaggctgcaccacctgttcctaagatggtcattttattctgaaaaacgtcaacctttttctctttcaaactccacataaaaccagtaccatccgtgctgtctccgtaaagttttccatctttgttgacaatcgtattaattgcgccaaccagttgagcggtaggacttagttcatccatataacttacagccgccactttattgggcattgataagttggcccctaacatgtgaaacgttcgaatcgcttcaattgcttgtggcaatgtctcttgtccaacgtcaaacgccagataccgagcatcaactcctaaattttgaaatgctgtattatgaatcaacggtgaaatactgtgttggctgggtttcgcgaatagcccagctaaacgagtggctccagttatttctttcatcctgtgtgctcctttacgaaatttttttagtaagtttctgaaatcctaatttttggccaaacaaaaaggatattcacagtaaattttaagaaaaatctacagtgaataccctacaaaaaagcaatataaaagccactatagattttcttaaatctacatggctgaaagtcatcttaaatttccctagccattatagatacaaacgtttgttgtctgtacccataatgttatgaatacaaacctatctaaaatagctaaagtaaaagttattcagttgt

SEQ ID NO: 182 - DNA, 1187 bp; double-stranded, linear
catggcaaattttagtatatagtcctaaggacattttacaaaaagaattnaaaacgaaacncatgacggggtatgacccmattgaagtagacgratttttagacaatgttattaaagactacgaagcttataataaagaattattaagcttgcaagaagaaaacagccgcttaatggcaaaattagaccaattatcaaaagcccaaccaacgcctcgtgttgctcaagaagtaccaaaaagtgcagcagtgaccaactttgatattttaaaacgtttatcaaacttagagcgtgaagtttttggtaaaaagttagatgaaacaccttcaacacctgtaacgccttctgcaccgtcaatgcctgcagaaccagcgaatcatgatgttgataatgcacaaacacgtcaattttaacaagacaatttaagtcaagttttcacgaggaacaaaaagcatttattagaatagcggacacttgttgtagtgtgtaaatttttgctgttcgtctaaacagatttgtwattttcgggtgatcgcggtttgcttttgcaagctgaggaaagtccatgctcgcacaagctgagatgcttgtagtgttcgtgcttagcgaaatcataagctaaggtactcttttagagtaacggcaggaaaaatgactaaggtttcgactatgtcaaagtatccttgaaagtgccacagtgacgaagcgatgtgggaaactccatcggtggaacgcggtaaacccctcgagcgagcaacccaaacaatggtaggggcgctcttctaaaggaaatgaacgagtagaagaggcagagtttactctgcagatagatgatgaccgtcaccaatttttcctgaagaattggtgatacagaacatggcttatagaaaattacaagtaattcaggaagaccttccaacgtagttgtgaaggctttttttacgaaaagaataaaaaaatgttaaaataaagaaactgagwtaaaagtagtaagctgtctgttctaaagaggccggaacaggaccgtttagtcagagaaagcggacaattwtaaaaamcaagcggaccagtagtcsgcaggactgttagctccagacmatwaaaaagrgtcmagaaggagttttatgacgaaagaaaaamcatycaacytgttgcacggctgctagtggcttagaagcatagttggn

SEQ ID NO: 183 - DNA, 4178 bp; double-stranded, linear
aaataactaaaacagttagaaataatgaatttcctcgttgctgttggcgttttgctaaacgagaaccaccaccattttgatcaggttcataaattgattgttcccatggctcacgagcttggtttttctttttgtcctttttactcactgctaatttcctcctaaacttctctcgcttgttattatatcatagcttttgccaactgccgactaaaaaaatgaattaatcacgttctttaaataattttagaaatttagaacgccaaccttcttcattttgattgctggtcttgttcgattttactattgaatcttggtaaatgtcaaagaataacgcacaattatcacaacaagtttccggtgattgtttgacaatcggttcttgaaaataagtttgaatcaacgttcttcgacaggttgtggtttcaatatacgtcagcatccctcttaattgtgcttggcgatctttttctttctcctctaaacgatgctctagctcttcaaaagaataatccttggctaaatagccttggacccatttttgttgtaactcggtggcattttctagcaaacctgcttgttcttctccttcaatcagcgattttaaggtcgctcgattcgctcttgtctcttctaagaaaaaccgatgaataaattcatccccttttttatacaataatagcgcccaacttttttgaccatcacgtccagctcgcccgatttcttgcaggtaattttctaagctatcaggcaaatcaaaatgaatcactccacgaacatcaggtttgtcgattcccatcccaaaagcattcgttgcacaaagaatatcgatttgattatcaataaattgttcttgcaagcgactacgttcactagcctccaagcccccatgataataggctaccttaaaactggtttttgcctgaataagttgactgatttgttctgttttgttgcgcgtggcgcaatagataatgattttaccagccgttttagataagtaatctagtaacacttcttctttttctgacgtttccttcacgaacaagccaatattttttcgattcactgaagaaagaacttcttgatagctgccatgagaaaataattgttttataattgcgtgctgtacaacgggtgtcgctgtggcagttaacgccaaggtcaaaggaaagtctagctgtttttggaccagatctaatttactatattcagggcgaaaatcgacgccccactgataaacacaatgggcttcatccaccacaaataatgcaattttttggcgttgtaacacactaagtacttcttgctgcaaaagcatttctgggcttaaaaacagataatcgtattggaacattttcgctaaaatataacgcttttctgaatactgtaacgtactgtttaaggcaaccgcacctttaattccttgtctttgtaattgacgcatctgatcttccattaacgaaagtaagggagaaacaattaccgttagtccctctaacttctggcccacaaattgataacacaatgattttccagtccctgttggcaaaacagccaatgtattcataccgtcaagtaagtttgtaatcacttctttttgaccaggcttaaacgctgcgtaaccaaattgagtgaataattcttgttctaatgtcaacaacactcactccttttcttgccaaatttgttggatttgatataaccgaaaatctaaataagaaagcgtcgcttcttgcgctcgccaatcccgatacacccacagccgcggatcttgttctgtttgagccaagttttggagcattgcctccttttcaaggtaaacagacgcctgcagctgcccttgaatagccaactctaatagatggtcgtgaatggtactcggttttatttttcgctgctcagcaatttcttgaagtgtcttaccttccgttaacaatcgttgggtttcttgcatactttggtttagatttttttctagatacggccatacaagcgtttgtaaagcaggataatttcctccgtacattatcaactgcagtaaatgatgaaccgcttgcgtgtgccacaaacgctgttcaagagctgtcttatggcttgttaattgctgaggaactttgccagtttgctgataaccagaaagttgcgcaaccaaatagtcgctttctgcttcaggtagtaactcaaaccctcgcaacagttcttctttgattgattgaacgcgctgctctttcttgtcttgttgtaaccatcgtttcaaatatagttgcggaatcggtgttgataaaagtggaatatactgtttttcctcaaatgataaatatgaagtcacttgcacggcaaattgaatgagttgccaactttctcgatcacttctgccaaaacgataaagatcaattgcaggataatccagcaacgaaaaatggtgctcctttaaaaatagttgcccttcttttgttagttgaatctcatttgtctcttcgtgatactgaatttgtttcgccttcgaaagtttttcaagaaattgaaaataggcttgttcggaaatcgttggccaccagccaatgaaccgtaaacaatcatataaaaaaccataaatcaaaacagagctagtccgtttgccttttaaaagatgatacaaagttgatgcacgtaccttgtatccatgagataataacgctaaaataaaagttgcttccatagtaaacctcttttagataggatgtgtcactgtttatgcaatcacgtttagttcctgaaaaatgtattgcttgtggactttgtcaagtttatgcgcctaatatatttgattatgatgatcatgggattgtcctttttaaagacgagccgcatgctcgacaacaatttattccagaaaacgaacgcgagaatgtgttaaaagcgtaccgcaaatgtcccacgcgtgcaatagaaataagcaaaaatgagtgctaaataatttagcactcatttttgcttagagtatcttttcgagccaagcaagtgtttgttcatctatcgaaacaaactgtaattgtccttcttttaacggttctttgactaaatgaatttgatcatttaggccattgatccattcataacgaagaccattttcttttgctttagaatttttggcttctaaataataattgacatggtaattttctttaccatccaattgtagcgtattaatggtcacttcaaaatctggtgaaccatcggtcgatttcttttcacgtaatcgttcaagtgcttctataaaagaaggaaattgaggattattttccccaccaacgagatattttttagcaaattctgtactatccgtatgacttttcacttgtttggcaaatgcttgataaaaggtttctagcgctttgcgggcatcatagtcgctagctaacggaaaattcaattgtagcgttggattatcggagagcgcttcgacaaaatcattttcaccaatcgtttcttttgatgtttgaatttcttctccattaatcgtctttttaagttgaatcgtcatccctttggaccagaacaaagggccaatcgttttgcttccattcgttagcgtaccactttccgatcattaatataaatatctgcgtctggcagattgctttccacaacaaaattcattcgtttaaaatctaaaggaatactagaaatataattttcctcttctaataaacggtactcttctgtgataacaggttcgccggtgctatctttcactgtggctgtaaaagtatattgtcctggcgctaaggggcccaattccttttgataagtggttgagtcggaagtgcccacttcccgcccgttcattgccagcgtcacaccgcgctgattcgtcgttaactgaacagaaacaggcgttaaaatgaattgataacggtgaaagaaaaatgctgtttgacttgtttcacgaatagttaaaccatgtaactttttatcctttaatagcgctttttctaatttttttagctcagttggatttttttgataataagtgattaaaggcttaatgctttgcggattcacttgaaattcagactcgttcgtcctcatttttttacttaattcttgggcatcaccattctcaatcgcttcaataaaataagaaatttgttgttccttagaaaaataatgcgtcccgagaaaatagctacccg

SEQ ID NO: 184 - DNA, 1014 bp; double-stranded, linear
gattttaatgggcggtatccttttaagtgcttccgcggttttacttactgcctgtggtggcgcagaaaaaacgaaagctgaaaatgaaagcggttcagcaaataaagcagctggtgacgtaaaattatgggttgatactgaatatatgggcgtctttaaaaaagttgtcgccgattttgaaaaagaaaaccccgatattaaagttaacttaactgctggaaattcggcagatgctaaaaaagacattgcaaaagatcctaaagctgccgcagatgttttcatgatgccacatgatcaaattggtcaaatggcagaagctggtctgatttaccctaacacaaaatatgaaaaagaagtcaaagaaaacaatatcgactcggcagtcgcaggagtcacttggaaagacaaagtctatgcctacccttatgccgtagagtcacaagttctttattataacmaagatacgtattctccagaggaaattaaaacttggaagtctttaactggaaaaggcaaaatcggtaccaattttggcgaagatggcgcaaattatatcttcggtcctctatttatgagtaacggcgattacttatatggtgaaaatggcgaagatccgaaaggtaccaactttaacaaccaacaaggtatagaagtattacaatggattgccgatcaaaaaaataatcctggtgtgatccaatcaaatacagaagcattgtctaatctaggttctggcaaaacggatgccttcctttctggtccttggtctaaaaacgatgtagaaaaagctcttggcgacaaaatgggggccgctgcctacccaaccattgattttggcaatggagaaaaacaaatgaaagctttcttgggcgttcgtagttttgctgtcaaccaacaaacacaagcaccattggccgcaatgacattagcaaactatttaacaagtgaaaaagcacaaatgacttacttcmaagaaatcggttttgtccctccaaccaaaaattaccaancaac

SEQ ID NO: 185 - DNA, 3614 bp; double-stranded, linear
cgttccatggccgttgttaatttatccatatcggacgcataactaattcggacgtatccttctgcttctgggccaaaagaaatacctggaatcaacgctactgcttctttttgcgctaaatcaatacaaaatttcatagaatcttgttcataaccagtaggaatcttagcaaaaatataaaaggccccatttggacgcgcaacctcaaaccccaattgagtcatctgttcataaacaaaatcgcgccgtttccgatactcttctttcataatttcagcatcatgcattccttcgattagggcacgaacagccgctttttgagacacagttgcagccgcagtaactaaatactgatgaactttaatgatctccgctgttaaaatcgctggtgcaaaaataaagccaatccgccagcctgtcatggcatgtgatttcgacaaaccgktaattaaaatcgtttggtcacgtaacatttcagcaatcgaaacatgactctcatcataagttaactcactataaatttcatcactaatcacaaaaatgtcgtatttttttagaacatcagcaattgcttgcaactcttggcggttataggtgacaccagttgggttgctaggataatttaaaataattgctttgacttgttccccatgctcggccattgccgcttcaatcatttcaggggtcaagacaaaatcgttgtctcgtgtatccaaatataccggttccgcccccgccaatgtaataattggttcataccctgggtaaataggtgctggcaatagcactttgtcaccttgttctaaaattgctaataacgaagctgaaatcgcttctgtkgctccaactgttactaaaatttctgtcgcaggctggtaagtcaaatggtacttttctttcataaaataagcggctgcttcacggacatctaataaaccagacatccctgtataatgagaaaaattcgcatcaattgcttctttggctgcttttttgacatgctcaggtgtgttaaaatccggctctcctagcgttaattttaaaataccttcaattcctgagacttgttcgtcaaattgacgaattaaagaaacagcaattttatttacttgacgattaaaacgattggttaaatccatttagcttcactccttcagttgacgttatagtagcacaaattgaccgtaaaatgaatgattttctcattgtttcgctagatttttattataaatatctcaaaaaaacgacagaaaagaaaataggagaactttgtccttttcaacaaagttctcctatttatttatttttcgaaacgccatgtccgaatttcaaacggacgtaatggtgcatcaacttctatcgctggtgtcaacggttcttctaatacatttgttaaacaagtcgctggttgtgtctctttgtgaagttcacaaggaatattttgcgctgttagattaaagccacgaacgactaaatgatttgtttgctcttgacgtttaacggctgtccaaccaattggtccttctgccgttgtcaagtagacatggttcggtgctagtttaccttcatgacgcgcagtagtagctgcagtaaaaggaatttgtgcactataggcttgttgatacgtagcaaagcgttcttctggttttccatgcaatgacaaaccatatttaaaggtatattctccttggcattgtgcttctggtgtcgcaaaatagccccaatcacctagttcgccaacacaacgaattaatgtgaccgcaatggttccatctgctaagacttcatactcatttaagccttcattgaagatagtcacgcctttgttttggtcatgaacattcacaaacgcttgttggtgctgcgggtttgttggattttcccatgtgtcgcttacttgatttggtcgtgtcacgacttcataaatactatccgcttcgtgtgtttctgtgaccatgccagttgggaaaagcacgcgtaaacgatgatctttgatttgattattaatggttgtttcaaagaacaattggttactttcttkgatcattgtaaccattgtcgttatttcgaacgggcgaagcgtcgttgaacgttgtgcaaggcgttctctaaactcacgaacagccttttgttcttcttctaatcgttcatctgccgcaactggtaacatgacggtttgtttaatttgataacttgcttttacaggggaattttctttattcgtgatttcagccgttacattttcggttgtaattccttggtcttcggtcggtttgaaaaagatatattcattcccaatgtcgccagtatcttcaaatgttaacaattttgaaaatgtttctcctgtttttttgtcagcaatggttaagctaccattgttttcaattttcacttgaataaattcgttttccatttcatttgttgctggttgagccaaaagacttccttcaaaagctttcgtttctccttgaatcaatgcaaagctatcccaagagaatggcgccatttctttgacagataattcgaccgttaagtatttggccatgtacggttgacggaaagcatctttaggtaaatcgtaaccaaaacgaacatcttctttgacaatacggcttgcaacggcttttccagttggatcaatcacttgataatctggggtggctttttgttttaattcatgataaagatcttcaggtttcctgtataaaatggcaatcgttcaatctccacttccacagtgacaacctccgttttctgatagccactagtattaaataaaacaaacgggtgcgctttttctgggaaaacacttgtatcaattgcttctgttaattgtcgtgttgcttcatctgctaagaaatgcccgacatcattggcattttcaaagcgagtcatcatgcctcggtgaacctcgtcgacagaacagccacaaatactatcgtgcggatggttttgaagcaatgttttccaagcataatcaaattggtcatgtgggtagtcgccagttacttcgtaagccattgctgctaaaggttctgcgatattttctaattggcgttggacttttgtgttccactgttttaaatagacgcgagcagaagaagtattggctaatgtgtaccagccatccgtttcttgactcgttaattcacctgttactgttcctaaatcttctggtaactcctcttgaacagctttcaaatagtcatcgaaattggaatgaataaattcatattctgggaatagttcattggctaaagcgatggccttagtaatatctctttgtacaggttggtggtcgaccccattcatcatcaataaatggtttgtggaagcgtaacgttccacatcagccaatttttgtttccaaaaagcgattgccgcttctttttctgaaggaatttcgttcccattactataccagttagcaaaaagcaagccgaaaattttcgtttgatcaggaccttcccaccacatttcagaatattgtgagctatagtcgctttctaagacttggttatcaaagccaatcggtttcaccccgcgtccaaaggcagccgcaggagatttgctaattgcatcatttgaggcgtttgacccatattcccaaatgn

SEQ ID NO: 186 - DNA, 2199 bp; double-stranded, linear
cttacattccactaaaacgtcaaaccgtatccaaagaagcgatttatattgccattggtatacgagaagacggcactaaagaagtactgagttatgcgattgctccaactgaatcaacatacgtttggaatgagctgctacaggatattaactccagaggagttcaagaagtcttgctttttattacggacggcttaaaaggcatgaaagatactatccatcaaatttatcctaaagcaaaatatcagcattgttgtatccatgtatctcgtaatatcgctcataaagtacgtgtcaaagaccgaaaagaaatctgtgatgactttaaggctgtttatcaagctaactcaaaagaagaagcgaataccttcttatccggcatgattgagaaatggaagaaaaactatcctaaagtgacgcagtcactcatagaaaaccaagacttattaactttttatgattttccacctagcattcgtagaaccatttactcaaccaatctaatcgagtctttcaataagcaaattaaaagatacagccgtagaaaagagcagtttcaaaatgaagaatcactagaacgctttctagtcagcatttttgatacatacaatcaaaaatttctaaacagaagccataaaggttttcaacaggtaaccgatacattagtttcaatgtttactgagtaactaattattttgcaggaggacaatttatttacacaaaattattgacgctcccaagaatgtttttaaataatataaataatagtgtttttcaaagttttgttaatttttcattcggaatcgcaattgaagaaatcacgtggtatacttttaagaagaracaatgacacgaaagtagccattggaaaaaggagattatttcgtgggaaaaaaacatacatcctcttatgaagttgcctactatgacggcgattttactggtgcaatgaagataccggctttgctagcggttgtcattaaagtatcagaagaacaaacagaattactaggaagagatgcggcttatgtcgctcaatttggtctaggctgggtcatcaccaattatgaaatagagattcaccgcttaccaaaagttggtgaaaaagtagcaattacaacgcaagctatgagttataacaaatatttttgttatcgtaacttttgggttcatgatgaagaaggcaaagaatgtgtctttgtgaaatcaacctttgtcttaatggatcaaaaaaatcggaaaatcagtagtgtgttaccagaaattattgcaccttttgattctgaaaaaatcactaaaatttatcgccatgaaaaaattgaaaaggtcacagaggggaactttttaccttatcgtgtgcgtttttttgatattgatggcaatcaacacgttaataatgcgatttactttaattggttattggatgtgttagggtatgactttttaacaacgcatcaaccgaaaaaaattcttgtgaaatttgataaagaagtagaatatggccaagaagtcgaaagtcattacgaaattgtcgaacaagaaaatcagttgaaaacacgccatgagattcggattgatggtcaaacctattgtgaagcgaatatcgattggaccaactaagttgagatgacggtttagaaaaataaaaagttacgcagaggaggaaggacatgattcgcttaggattaacatcttttagtgaacacgactatttaactggaaaaaaacggtccacgctttatgaatatgccagtcatttaccgctagttgaaatggacacggcgtattacgggattcctcccaaagaacgagtagctgaatgggtcaaagcagttcccgaaaactttcgctttgtcatgaaagtttatagtggaatcagttgtcaaggtgagtggcagacctattatgcaagtgaagaagaaatgatcaccgcctttttagaaagtatggccccattaattgaaagtaaaaaattatttgcctttctggtacaattttcaggaacatttggttgtacraaagaaaatgtcgcttactgcaaaaaattcgtcactggttaaagactaccatcgccattgaatacaaataatccaggtatcaaccaaacttgtaaacaatttgcaattataaaaaatcattcatgtatgtgataacgaaatctcatcanccttactattacatctaccngtcccgtcnnga

SEQ ID NO: 187 - DNA, 2594 bp; double-stranded, linear
tnctcagggtttttcttcccttcttgtgaatgcgggattgtaccaattgtgcatcaatttgtaaaaaaagatgtaccaacacataccgcttttgcttttatgttaacggcaccaatcattaatccaattgtgctattctcaacatacgtagcttttagtggcgcaacaaaatttgtgatttggcgagttttaggtagtatgattgtcgcgtgggttatcggcatttggttagcttattttcgaaaagaatcaattttaacagaaaaagagttggcgcagattaaagaagagcaggttgctcatacgcatgaacacgttgatgaagttcgttcattttggaaaaacggctggtcagcgttaacccatagtattgatgaattttttgatacaggtcgctatttaatttttggttctttgttggcagcaatcatgcaaacgtatatcccaactggtgcacttatgcaattaggccattcaaagattttagcgattctagtcatgctagtcatcgctgccactctatcactttgttcagaagcggatgcatttattggttcttctcttttgagtttatttggcacaggaccaattgtcgccttcttagtttttggtccaatggtagatattaaaaatttattgatgatgaaacgttatnttaagatgtcatccattgtacaatttgttttgatagtggcgctkgtcgtamcwatttatgcggcagtagtttagaaaggaggcctacaatcgatgatacgatttattattttaattggatatatggggttgatgatgtatcttcaaatttcaggtgaactgaaccaatatatcaatattcattataattacttagctgttttatcaatggttttagcttttattatggcgattgtccaattgattttgtggaaccaagcagatccatcaatacaaaaaaaacatgaagacatgcaccaacatgggggacatgaacatcatggccatcagcataatttggaaaaacccagccaaagagggcttgcctatttactactttctttaccgttgattgttggcttattatttccgacagttagtttagacacaacaattgttgaagcaaaaggatttaactttccagtaagtaaagaatcagtaggggatcctgatatgcaaacgcaatatttgaaacctgatacaagtatgtatttcaataagacggattatgacaagcagatggcaaaagccatgaaacaatatgatggccaatctgtgatttcaattacggatgaaaactatttggaaattatgggaactaatctataattatccargtcaatttgcagggaaaaggatttcttataaaggctttgtctataattccaaaacgagaagaaagtgttgaccagttkgtcttccgttttgggattatycatkgtgtcgctgattctggtgtttttggcytgttggttcatttycctgaacatactcaatttcaaaacamtgattgggtaacgattaccggcacgttgagttgtcctattatccaccgtttaaacgacaaataccaactgtgcaagtggagaaagtcaaagcagatcaagcaccaaaaaatcaatatgtctatcgttccttttaaaaaaagttggttgcttccttatcaaatggaagcaaccaacttttttgctgtctattttttaattttgttgcgtttacgacgaataaaacccaaagattctcttttttctcgaaagctgcggatattctgattgaaaacctcagaagcgactaagcctaacgcaattgccccagcaatcattacagcttgcacggtaaaataggcacctttttcataattgccaattacgatattccgaacagcttgataagctaagccaccaggtaccaatggaacaataccaggratattaaaaatcgtgacaggcattttcaatatttttgagaataggtagcttactgccgcaacaccgacagcaccgatgagggaacctaatgctgcatttccactaaaaacttcaacgattacccaataaagcatccagctcacactaccagttagaccacaagccaccagtgatcgtcgaggaacattaataataatcgcaaacgccgcagaagctaaaaaactaaagataaattgtaccaaaacgattcctagcaagtaagtcactccttttaatagaaaagttgaaagacaaaagcaatgccaaaaccaatcattcctgaagtcattaatgcttcagtcccacgagaaacacccgataagtagtgtccagctagcaaatcgcgaagagcattggtaatttgcacaccaggcactaaaggcatgacacaaccaatgatgattaaatcttgtgattgtccgagtcccaatttgactgaaagaatagcggctgcaccaatgaacaacgaagctaaaaattcagataaaaatttaatcttgagaaactttaaactraaataataaagactatagccgcaaccaccaatcagagaagtcaagaataaatcggaccagacaccaccaaaaagaatcataattgtagcgctgacaacggccgcactaacaatgcgtgcgctaattggaaaatgtcggt

SEQ ID NO: 188 - DNA, 4176 bp; double-stranded, linear
aatcctttcgcaaggaggacttactcagcaaaatccgttccaatcgaatgtaccaaggctttaacgtttcagcagccaataaaaatgaaggatggggatcagaccgatgacaagaaaagccaaaacggcagaagagattaaacatattgcagaagaggaaaacgtacgttttttacgactaatgtttaccgacattatgggaacaattaaaaatgttgaagttcctgtgagtcagctagataaagtattagataataaaatgatgtttgatgggtcatccattgaaggattcgttcgtatcgaagaaagtgacatgtatttataccctgacctatctacatggatgatttttccgtgggaaagcgaccatggaaaagttgcgcgcttaatttgtgatatttacaatcctgatggtaccccttttgccggagatccccgcggtaatttaaaacgcgccttagcagatatgaaagaattaggctttacttcttttaacttaggaccagaaccagaatttttcctatttaaattagatgagaatggtgaaattaccactgacttgaatgataaaggtggctattttgattttgcaccaaccgatttaggtgaaaattgtcgccgtgatattgttttagagttagaaagtttaggctttgaagtggaagcttcacatcatgaagtagcacctggtcaacatgaaattgactttaaatatgctgatgtagttgatgcttgtgacaatattcaaacgttcaaattagttgtgaaaactattgcgcgtaaacatggcttgcatgcaacatttatgccaaaacctttgtttggaattaatggttctggtatgcactgcaatatgtcattatttaatgaagaaggtaatgttttttatgacgagtcaggagagatgggcttaagccaaactgcgtatcatttcttaggtggtttattaaaacatgcccgtgcctatactgcggtatgtaacccaacagtgaactcttataaacgcttggtaccaggttatgaagcacctgtttatgtagcttggagcggcagaaatcgttcaccactcattcgagttcctgaatctcgtggkttatcgactcgtttagaattacgttctgtcgatccttcagcgaatccgtatttaacaatggctgtcttattacaagcaggtttggatggtattcgtaatgaacttacaccaccgccagcagttgatcgtaacatttatgtgatgaatgaggaagaacgtcaacatgcacaaattgaagatttgccatcaaccttacacaatgccatcaaagaattacgtaaagatcaagtaatgattgatgcattaggtcgtcatatttttgccaattttgtagaagcgaaacgaatggaatgggcagccttccgtcaaaccgtttctgaatgggaaagagaacaatatttggagttgtactaaaagccgttacttttaataatcttaatgtttagaaagaggaagataagtcgaaacgcttatcttcctctttcgttctttagtttgtgaatgaatagataatttctatttcacaaaataaagtaattttaattcagtgaaatagtttgtttataggggaaaaagggggtttttctcaatttctcttttatttttaagcaaaaaaattgacaaaatctttcaaaatttgtgaaattccgctataataaacaagaatatgcgtgcaactattctattttttagatataaaggatgagaaaaacatgcggaaaatgaaaacaatggatgggaatgcagcagcagcttatatttcctatgcttttacagaattagcagccatttatccaataacaccaagttcaacgatggctgaacttgttgatcagtggtcggccgaagtaagaaaaatatctttggtcaacctgtgaaagtagtcgaaatgcaatcggaagctggtgctgccggcgtggtccatggctctttaaaaacaggcgcgcttaccacgacctatacggcttcacaagggttacttttaatgattcctaatatgtacaaaatagctggagaactattaccatctgtttttcatgtggcgagccgagctttaactacgaatgctttaaatatttttggtgatcaaggagacgtaatggccgcacgccaaacaggctttgctatgttgtcagaaagcagtgtgcaagaagtgatggatttggcaccagtggctcacttggcttcgattgaagcgagtgttccatttatgaacttttttgatggctttagaacaagtcatgaaattcaaaaagtggcagttcttgactatgaagaattagcacccttagtaaatcaagagaaattagccgaattccatcgtcggagcatgaatccgaatcacccttccgttagtggaatgaaccaaaatccagatattcactttcaacaacgagaaacaataaatccttattatgaaaaattacctggtattgttcaaaaatatatgacagaaattaaccggttacggggaaccaattatgatttagtgacgtattatggcgcagaagatgcagaagaagtgatcgttacaatgggttcagttgcgcaaacaattgaacagactgttgattatttacaacaacaaggaagaaaagttggctttcttaatgtccatctctatcgaccatttccaattgaaacatttctcgaaaaagtacctcaatcagttaaagcaattgctgtcttggatcggacgaaagagcccggtgctggtggtgaaccgttattattggatgtccaaagtgcgatgtatgaagcggacattcgcccaacaattattggtgggcgctatgggttaggttctaaagatgtactgccaaatcaaattgttgcggtttttgatgaattaatgaaagaacgttctgccatgaagaagcgctttacaattgggattgatgatgatttaacttatacttcattagaagttggcaaaccacttgatttgacgaatccgaaaacctatcaagctaaattttggggctttggttctgatgggacagtaggggcgaacaagtcagcgattaagattatcggtgatcatacagacaagtatgctcaaggctttttctattatgattcaaaaaaatcaggcgggttgaccgtttctcatttacgttttggcgagacacccattcgttcaacgtacctcattgaacattctgattttgtggcctgtcatacagccgcttatttgcatacctatgatttagtaaaagggttaaaaaagggcggtactttcctcttaaataccatttggaatgatgaacaactagcacgatttttaccaaatcaattaaaacggtatctagctgaaaatgagattcagttttatacaatcaatgcagtgaaattagctagtgaagtcggactaggtgggcgaattaataccgcgatggaaacagctttcttcaaattagcggaaattatgccttttgagcaagtgttgccaattttaaaagaagaagcactgaaaagttatggtcataagtccatgaaagttgtcgaaaaaaatattcaagcaatcgataagaccgttgaattgttgcatcaggtacctgttccagcagagtggagaacgcttgaagttcaaccgcgaaaacgttcagaaaatgttagtgattttgttcatgaaattgttgaaccgattaatcgtcaagaagggaatgcgttatctgttgcaacactagcgaaaaatgggatgacagatgggcggatgcctttgggaactgcggcagttgaaaaacgtggagttgcattagaagtacctgagtggattagcgatcgatgtactatgtgtaatgagtgtgcctttgtatgtcctcatgcggcgatacgaccattcttagccgatgaagaagaaatgactgaagcgccagaaggattcattgtgcgtgatttacgtggtgccgacggcttgaagtatcgtatccaagtctcagtcaaagattgtactggctgtggtctttgtgttgaagcctgtccagctaaagggaaagctttagtaatgaaaccttatgaagaagaaaaagagcaggctatgaactgggcgtttgctatgacgttacgtcaaaaggaaaacccagcaaaaccgaatactgttttagttcgcaatttaataaaccttattagagttttctggt

SEQ ID NO: 189 - DNA, 3528 bp; double-stranded, linear
ctatatgatatatcatttaaaacaaaggagcnactttcatgaatattcaagcgattgatacgcgacacggaactgccaaccaacatagtttttcaaatggaaattgtctaccctatactggcgtgccatttgggatgaacttttacgccccgcaaacaactgaccaaaaaggcagctggtggtttcatccagaagatcgaacatttcaaggctatcgagtaacgcatcaaccaagtccttggatgggtgattttagtcatttattaatgacccctgtcagtggttcattgtcggaactttctttattccatgcccaaagttcttatcgtccagaagaaagccttttttctcctgtcgaaattaacttaactcaattacgctatcaaataacttctcaattaatcccaagcatgtatggtggtatcttaaccattgattatcaacaaaaagataatcacttactactaactctgcctggacgttatcaagtaaaacaattagatgaccatcaagtggctgtaaaagtcatcaactattctggttgtgaagatccagattttagtttttattttgtgcttcattttgaacagcctttaaccaaatggtttgccccttcttcaggtgaagatggcaaaatccttctttcttttggaaatattgctcaacaagttgttcattttagtagttcatttatttctgaaaaacaagcgcagttaaatttagcgcgagaaatctctttgcgttctactgagatgctgcaacaaggaatcgcagattggcataattatttcgatcgccttaaagtaacgcatgaaaaccctgaacatactaaaacgttttatcatacactgtatcgaacattcctatttccgcaaaccttttatgaattggacgaaaatcagcagccgattcattatgatacgttctcgcaaacggttcgtcctggtgtactatataccaataatggcttttgggatacttataaaacggtctacccattgttctcactaattgctcaagaaaaatacgaagagatgctagaaggctttttaaatagttacaacgaaacaggtttcttgccaaaatggttatctccagatgagcgtggtttaatgcccggcaccttgattgacgctgtcattgctgatgccgccgtgaaaaagattcgtcctgacttgatgcctcagttcctagaagcgatgaaaaaaggcgctacacaacaaagcgaacgagaaaattatggacgtcaaggaactctggattatctaaaatatggctatgttccttcaacctatcatgaatctgtcaatcataccttagattatgcgtacagcgatttctgtatttcgcaagttgcaaaaacattgaatgattcagagaccgcaacgttttatcgtcaacaagccttgaattatcaacaactttttaatcctgaaactggctttatgcaagcaaaggatactgaaggcaatttccgtcctgactttttagatattcgttggggcaaagattacgccgaaggaagtgcttggcaatcaagttttgcggtttatcaagattttgcaggtttgattaagctatatggtagcgagttagctttcgaaaaaaaattaattcagctatgcaatcaagcgcctaactttaacgttgaaggctatggttttgaaattcatgaaatgagtgaaatggcggcaattgattttggtcaattagccatctcaaatcaaccaagtttccattatccgtttctattcagctacatcggcaaaccagagatggctcaaccacttttaaaacaactaatgcaaacatttgatgcttcaccaactggctatccaggtgatgaagacaatggcagcatgtctgcttggtatatttttaatagcttaggcttttatcccgtcacaccaggaactggtgaatatgtaatcgggatgcctttagtccagacggcggaagtaaaactatcaaatggtaaacagttaaccattcagacatcaccaaacaaagtccaacaacaatttattcatgaaattcagttaaaccaagaaaaacatactgcgccttattttactcatcaagaactattaaatggcgggactttagattatcaattagggatcgtcccgaatccacaaaacacagcagaacgaccgttttcattaagtacggaaaaataataaaaagaaagatgttcataaaaattgaacatctttctttttattcttcgacacctgcgtaatttgattggtattgctctcgaaattcttttggcgtaattccatttaattttttaaacatttttgaaaaatagttggtattgttaaatcctactttttctgaaatttcgttgattgtatcatccgtgtacaataataatttctgggcatgcttggtacgcacttgattcaaatattgagaaaaactccgcttggtttcttttttaaaaatttggcctaaataactagggttcaaatgaagctcatccgccaccgtttttaagtttaattcttctaaatagccttgttcaattctttctacagcttggctaacactttctgaatatttttttattytaggtttatttttcacttctgccaagacttgctgcattaacgcatacagtgtattaagattgttgctggctcgaatttcttccacgattttttcatagttttcttctaacacagttggatactgacgggaaatatctgaaaaaagtaagaagactacatagcgtacatattctggcgtagcgtgttgttgacttaactgattgaaaatagcatctaattcccgttgaatggtctgcatatccccaatcatcaaggcttggttaaacgctaggaaagtaaaatcttctgccgaacgattcatttgttctttttgattatttggcagaaattcttgataaaacgtttcaattgcttgcaactgttttactttctcataactttcataaaccgtttcccattcattgacagattcccctacaaaaatctgaccttgaccagctagaatcgcttcaatttcacgaataaataagaacgcttcttgtctggcccctttatagataagtaacaattggtggtacgtactcatccaactttcaatgaataacagttggccttttttcataaatagttccttgattgtttctaaaaatgacatctcagcttcaaccaataaaacggtaaaatcacctggttttatagtcgcaaattgctgcattaactcttcgtattccccttcgctgatttcatcattaagccaacgcatcaagccattttctagatatagacgcacgcgggcatgggattttttttgttggtccaattctattttaattctctggatattggctaatagttcttgtttattgactggtttcaaaagataatcttggacctgcaaagccatgccttttttgacgtaatcaaactcttgataacctgataaaattaaactaataaattgawgtccttttktctttgcttgctcaattaattcgatcccgctcattctgga

SEQ ID NO: 190 - DNA, 11410 bp; double-stranded, linear
tggatcctacnaaaggcctttacntacccgntttcccaaattcccttaacccatatcntgataggctctagaggaagtatatcccccagccgagaaaagtagtgttagtagaaagattctcgctaatatattttaaaatttgatatacagaacttacctcttgttctggtgtctttccagtagttaaaataagtctgccatagctttcagatacttgcttaatttcatcttctagatttggatattctacaaaaacatcttgaatatactcataaataacaggagtgctatctatatattcaacaaacattttaatgatagaattaacttcactgtaatgagcattaagaactctagaagctaattgtctaaatttcctacttgccttttttaaatcttttttattgatattaatctccatcttgcatctccccacagaacggacaatatccgccttccatttttaagcttggactaatttttgcttctttatgacagcagtcataaatttgaagttccaagttatctagttttgaaataatcggatcaacaggatctttcttaatttttgaacctgatttgaattttacgcttccattctttgatgatttactcaaattcttaccaaaatcattaagtaaatcagatacatgattatttacaattttcattgctaattctattacttcatcagtaaacaaactatctggagttagaccacacttaggacaccaaacatgcaattgagattcatcttccaagtccttaggcgttagcttaaaatactcaccacacaaagtgcattgtaagaaaataaatccatctgaatctgatgggattgaaatattaaaagtagtgtcagctgtcatagatacatctccttttgggaatacttaatttacctaattactatagtaattttatcacaaaaagaaggcgaaaatcttttttatgttatatttctttaatataaattagatatttatattattttgcacaatggttttggtagattccaaaaaatcataccccttcggaactaaaggcgtgtaaaactcactaacaacacccccacctgtatctacatagcctcgccccttgatttgtttcataaaaaaaattttatcaacctcaccaaacatcatagaataccccagttcactcatacgacccaaagccacacggaagttgaattgatcccgtattccgtctcctaaatatttcgcatccggtctttgacaagccagaatcagaaagaaaccggactgccgacctaacatgacgatttgtttgagcttattcaaaattaccgcgctttccttagtcgttaacatctccatataagccacatattcatcaaaaactaaaaaatttggtgaaagaccaagatacgcataattctctcctgttttgtagtttggcatttctttcatcaacctactacgaaccatcatacgttcatagaaatcttctacacaagcggaaatttgttctttttgggaatatacgtgagtcattattgtgcctaaatctgctagatccgcatttttgggatcaaggataaatagttctgcatcagatttcagtaaagcctcgatgatggtgagtaaaaagtaagtcttcccaccacctgtaccacctgcgattaacatatgaggcaagaaatcatacgcccatacttgatttttcatcaatcgcaaagctccattttctaccactgcttcttctatcccaattcgattggcaatcatatcgtaaagcaaggtataatccacataggagtctttgagttccttttctactaactcacaatacagtccgctttctaacttcttttctagctttaatagttgatcttgatattttcccagtgaaattgaacgcgaatagaragtaagccatccttcatcgataataaatttggggragtaactgatactttctttggtccgactaccatcaaatctttgaaaaaccttcactttgagtttgtttcacttcataccaatggttttctagaatcatccgagctagcttttgtcgatgccataaactgcgccaatgatcctgaaaaaagtgaatataaagcaatatcatacctcctgaaagagcaaaacttcctagtaaacagattaaatctttcgtggaccaatcaatttcactagtggagaatgatagcttagaaatctcaaattgtctaagctcttgaaaataaaagacgctcatacaaccaatgaacaaagcaagtagccagccaagaacaaagtgataaattaaatgctgatttcttgcgcgtatgcgatgtcctttgtacatctgatggtttccacctccaatcaaaaattgcccaataggatttatcgggcaatttcaaaaagttatgctagtcatttactactacgggaagctgtttcgtttcaaccaattgttttaaaaagctttcaatgacatccggcatctccacaccgatttcttctaaaatagactcagcttttcgacataagttttcatttatttccacaatcataaagaaggattcctcttcccctaaccaatccagaacattgaactcttcttcactatcggtatttcccccaagtagcccctgatgcataatcagaaacattttctcatcatcggtcacccctttagtgagttgcttttcggttagctctccttttccatagcgatctagacaatcaaaaatatgttcaacatcaatctccatactcttcacctatttctttccttcattttgatgggtatttccttgattcgattgccgtttcaagactaaatcatccgccttaataaaccaattgacggtagttccttctcgaaaagcataatttgcgaccgtgtccacgattggattgaccaactctacttctgtatcgtaggcaaactctcgtaatggcacatttgctggaatactgacttgaatcattcgaccttgtgctgaggatttcaaattataggttcgttctttgacctcattactaaccgttccatcctcattttgtttccgaacttctcggcgtaatgcagaaaaacgcaacttgccaaacgttagtcctgaatctactacaataccttctgtcaatctcatatttttatcctcctatgctttcactaaatcatcgacatacaacacataatcggtaaaaccgcggttttcaatcgcataccctttggcaactaaatggggattcacagctttcagcggttgatcttggtcaaaatctttttcgccggcttccgctgctaccaccacttcaatatcatctgctcgttgtttactggaatatagatgatagctacgaccaatcaccacagtatttcggccatatccttctgttaaaatttctccttcaccagcataacctaactttccaaaggtttcggccatatccggcacgacaaatttcaattccatattcttttcctcttttcattgttagttttggatacaaaaatagcgcgaccacttttttaggaggcggtcgcacaagtcggttcctactattcacttgtttcatctcatcaccttaattgcggcgattccagaaataatacccagcagtcgaaaaaatcaagataaagccaactaacagtagaacgttggaatttttctccccagtttgcgggaatgtcttcactgtgggactagattcttgagaattacttggaacagctggtgtttccggttgttttggcgtactcggtatggttggcacttcttttggtgttaaggtttgagatttttctttcaaatcttcattgtgttttccattcacgtttccatctttttcgtaattgatttccgtaaaagtaaacttagttccttctggatactttccggtatctactttttccgcaagtacggttttggtaaattctttatcattcacttcatgctcaattttgccagatttccaaatttctttgttcgtaccatctggtagtaaagcatacagaattgtttcgaaagcttcttttgagccatccagtacatcatgggtaaccgacacatcatcaaacatatccatcacgtcaccatgagtaaaagtttgcgaaccatcttctaggtgggcttttgtttggatggaaacatggcgttcaatcgtacaattgacggtttgtgcttgattgttcaagctagcatccttcgctactggctcattgcctgcttcaaaggctaccttgttttcatacacataattgaacaagacgatgcttttatccaaaacttgttcagcggttaatttatgcagaattttccaagttccagttttctctttgttcgccaacgttgcggttgtttcggcaatcaccaccggtttggctttttcgtctttttcttgggcagcttttgtggcttccacatcaatggcttgagctacgacataccagtcttctttgatttcatgcaagttatatctcaatttatcaactagctcggtaaaatcaagggtattcaattttttatttccgtctttccaagtcgcaagagaagtcaaactatcttctttctcgggcaaatcataaagcatcaaacggttcagactaacagaaaactcgttgttagttagtttctcgtaaggaacggtcaccatcttaattggttgtttttgtccttcttcggtaatggtaaagacatactcactcttcgcatagtcgtctttgttttccttaaatgtagaacggatttctagtggtgtaatcttttgaaatccttctggagcctctatttcttcaagtaaataatccccataaggaagattttcaaacttaccatagccatcaaaacctaattgctcgttacaagctgtggtcgctttatcttcagcacctgtgatttcmttggtcccttccaatggcgacactttaaaagataagtcgttaaatccagtttcggcagtgccatcagccgatccagcaaatttaaagaaatcaaagccaaagcgaataacttgttcttttgccgtaacatctcgagtaattacggcatttttttcgttattatcaacttttttgatggatacaggatacttcgtttcatccaaagtatatccttcaggtgctttggtttcttgccagaaatactcgttaattgctaggtgtttaacggcaacttggttcttttcatctaaagccaaagtcactgtttcatcagaagctttcgttcccttcactaattctgttttaaaagcttcactccatttaacagcttgaccatcttttgcagtaaagagagtatattcagctcctttaaactcagctttcccttgactctcattaccggtatctttgtcttcttttgtcaaagtggtttccccagtaatttcttggttttgcccttttacgttactggtaacaagagccacggtttgattggcatattttaactcgacttttgttggtttgaaggtattcacgaaaccattactagatttagtttctgtcacgtaataggttcccagttccaaagcattagcaagctcttttggtgtttccgcacgacctttttcatccgttgttatttcttggacaatttcaccagctgggctgtctttacgaatggcaaatgtatttccagctagagaataattgtcattccaaagatcagtacctgtttctaccccagtcttctctaaaagaatttgacctttttgtcgcatatttttcgaagtcatggaaatggtctcgcccgctttaatggtggcagccatgggtgtggtatcaatcatataaggatctggcaccgatttttcagtaatagttacctttgtaccatggggaattccatccaaaatagaaatcccatctttatctgttgtcacatcttttgaaggtaaagctttcccaaaatctaaatggaaaaccgtttctggtacaatatcacctgattctttatcgatttttttgatctttaaagaacccttagtttccacattaattttaatagcgtaggtattgggcttatcaagcgcaccagccatcacagtttgaagtcctgcttttttataagcgactggagttccagtaccagctgattttttcaatgttaatgttcctgatttggaattagagtttggagtaagcactaattgattcccaattacacggtaatctatattcgccgtattttggacgactttatcaaactcagataaatttaattcatttttatctattaaagttgtcgattgacctaaaattgtttttacagtggtattatgaaaacttggttttttttgatactcctcaattgccttattaatttttccttcaatagattttatatcaactgaagcaccacctaatctttttatggaatggagtttataaccgttcacttcttcccaaatcatcttttgtgcaaccatatttgtatcaatatctgttccagccttttcccaaagaaccgatactagtttcgctttatcagacattgatggcaaagggtttttctgataaccgtgcgtcacttctgttggaatactaacacctggttcaatacaaaatactgtttgttttgcaccattgtattctgcatataatgacgtagtacgttctgagagcgtgctgccatcgctaaaagttccgtcaacttcatacagtttacttacgtcataatgaattgttacctcttgagggtgagtaatttcatcggcaaaagcaatcgtaggaccaatcgttccgccaattgtttgacttaatagagccaaagtcgcaaataacgaccaatttttaaatgttgtttttttcatataattaatcccctttcgtttttgagtaataaaaaagagacattcacctctgaatgtctcaaatgtttaaaactatttttttcaaagattatcagataccatatatcaaaaactccaaagagacttttcctatatgggcatactgaataatgcgagccgtattcggaatatcttttccgtcttcgtatttatccatcttacatttattcataaagcccgcctttctttttgaacataaaaaaagaccctcaatttttgacggtctcatcgtaaaaatttacgttattcattcacccaagcttccactaaatccacagtatcactttgtggacgtaaagttttatcacttataaaatcaacattcacaatcattggtaaggacaaagctgtcccagtgataatacagataccttgtgataaacctggaagcattgatttagaaactctatctagagttgataatgaattatcaattatttgaagatctcgctcattcactagcttgtgtagaaagaaattatgaacttgtgagagaagtgtgggtgaaatatccgctggtctttgacttgataaagtaaggaaaaaaccaaatttccgaccttctttaatgatttcctcaaaagtagaaagtctataatccttccatgacgtattgtcgtttcttgattgatcagacaaaatattatgtgcttcatcgataataagatggaaactaaccttatctttactcgtcttctgctcatcgaaaaacatttttgaagttaacatcgctacaatttgtttagcttcttgattcaaatcacgtaaagaaattatctcaagaaatttgacattgtcgatctgtcccactatctctatatacttctggaaatcttcaatacggctatcgattcgctttagaagcgggtctatatgatccgatatgacatttcgatatagtaagtctttgactaattgtaatttacatctaagttcaaactctttgaatatatttaatttttccgttagaatcacattttcaacttgttcaagattaactgcctgcatatgtttagattcccaatttccatcaaaaaaagtaccgtttacaataaattttgcagggtcatccttactgtatatctgtgcctgtttgattggctccaaagcttcactagaatcataaaattcacccaggatacttacaaatctattttttaaatccatattgggaaaagtcgtaaatatctctctaagtatagaacttatccatctttgcagtgactcttcaccaaaaccaaacttatttatccctttaagaacacgttccaaaaaaggtttttgagttkgtkgagtcgctgraaaaagratwgacmagatctcagaactaaaaaagatatcccttttaatctgtaacctcttatttgaaacggttctagtggataattcatatatatttttttcgctcttaggtacaccaaatgagttatcatgcacatactcaccgttaaagtctatgacaacaaatctacttttctctcttagcaatgggaacgattgtttaaatagctcaaaatacaatttatgaagtgtatttgacttgccactaccagtatttccaaaaataccaatatgtgacgcaaaaaaagaacttattggtaagttaacctcaatttgctcatttaagcttttcccgattttaatagtttgatctccattaaaatgatcgaagctatttacatagatagtttgtgtctcttcagttgtcggtattgaacaaatatttccaatcattggaatatatgttgtaccagtagtgaaacagccttctgaaatatatccaataatttggatatcaagaattctttttatggtattcttactgaatctgttatccaactgatagttctgcttattattttgagtatcccaaattgattcagaattgattctgcctattattttaataaagttctgacgaataactacaaaactatttacacttaagttttttatcacttcaccattattaatatatgtcgcttggttcatatcatcaaaagtgatagctttacacctgattccgttcacttcaacaactaaagcaacctctatattagaattattcgtcatcatctactacctccgtatattgactatcaatatacttttcagaaagatttccttcgataatcctgttaaaagcttcaaaatctataaccgcatctttattatcgtaaactgatacttcctcagaataagtgacaatagtactatcatttgatctaatckgatttgtttctaacggtaggggcgtctcttcttcgttttcagcttgttccataataaaatctgaaggtgttataaacacaatattggatggaactgcattggctccaaaactaaattgatttattatttcacctttagtaccatctttataacagaaaatgaataccaataaatttggattatttaaagatctttggacaatatctgttatatgctcatctaaaaatgaaaaaccaaatgctattaaaaccgattgttccttctcaagctcgtaagacaagaatctaagcatattaaaatactgctcttcaattaaggtagactgaaatttcctttttgtgggtaaaacaatctgtatttcactaattttctcacttatgccttgtaattgattataatactttttaccaaaataattgattacttcagtaggactatcaataaatccatcaacaggtttgcctagtatgacatctttcaatatctcaatggtaaatgaccgttgaaaatttgtatcatgaactatatcgttttggagttctgaccaaacttcttctgctttttcagcagttttaatagtgtccaaaaggctgttatcaacaagcactctatctctcccgataaagttttgctcattcagccaattcacagatccatgacatttcaccaaattaattgttggtaattcgttggcataattatcaaaggccccggcatacaacattgtcttattaaaattttcagtgctgagatatcttttcatataaccattcgtcccgtcattaaagaaaattttgggatttgattctatatttttttcgacagctatttcaagaaacaaatcataattcgtagtaaagatattagttcttcttggggaaacacgactatttctcagttttaggaactccacgcaattaaaaataaatctagaatattgattcatcacagaagacccagaatccaagtggttttccgattcacctttttttatatattcaaccaatattgaattatctttgattgctatataataaaaagcaaacataactagtcttttaccttcttcagttatatctttgctagtcatatattcctcaatttttcctaagcttgaaaaaaatggtaccgaagcacctgctccaaataagaatgtcgttcttttctctgaaagaacagctctaagagcttttacctttgaaattgtcataatagttccctccaaaattggaattcactgttattttaccacaatttaataacaaacgatgattctcctcaaaattgtttttaagatatttttttttaaactaattaacgccatatatcaaaaaattcaaagagacttttcctatataggcatactgaataatacgatccgtatttgggatatcttttccgttctcgtatttgtccattgaccattttgtaataggcggtgaaaaaaactttccaaagtcttctctttctaagcgataatcccttcgaatcttccgaagtcttagccccattcggaaggaatctaacttttcaaacttgctaatcctacttcccttcttcaacatcttactaaaagtctctccatacaaaatataagggacggccactttcccaagataggcaacattcattaatctttcgatatcaggaatattcgtacccttttcccatctattcacaacattcttacccgctggtcgagtaaagttcttaccaaatttttccagtgtctcacctcgatttttccgaatctcttggattcgttttcccatcgctattttatcgatgatgggtaatttaaacgaaccatcctcttgttttatatccatcaaaatttctttaccctcgttagacaataactgagtgattttcacaattgcattttttgataatggtcgactttgatttaagaatttatttagaagagatatttcgattcctaacttcttagataaatcctcacgagaaaaaatatttttagtttgatatttttctaaatcaatcaagacttgttgttttctttgaatcatatctttaataaatgattcagcgccgagaacgtcactcaaaattctatcgttctttttagatatgctgcgtaatccattttcatattttacgattgtagcttgtgatatatttgataaccttgccagttcttcttgagttaattgcttagataacctagcttcttttaaatgatttcccattttgattaactcatctttatttatttgcatgaaaaaagcacctccytatgagagrtgctttcatcatacgctgacaagtaaaaatcctcaaggaaattattccttttttgtccttttttgttaagttgtgacaaccgtatgacagttgaaactttt

SEQ ID NO: 191 - DNA, 1316 bp; double-stranded, linear
aattaaatttagattgttatcgatcattctaaactcattgttttctaatgtcaataaaataatgagatttagattaaaataaaatgaatttcgaattttatgagcttttttaataaatcagtaaattccatgacatgtgagatacttctcatttacaaacattcttaaaaaaggtatgatagtaaagaggcaacttgcaaaggagtagaagacgaatgagtgaacaacctcaacaacgttcaaccgaagaagttgaagcaattaaagaagatattttaactgcattagaaacagtgattgaccctgaattaggcatcgatattgttaatttaggactaatttatgaagttgaatttgcagaagaaactggtgatactgtcatcaaaatgaccttaaccacaatgggttgtccgttagcagatgttttaacagaacaaatccatggtgttttaaaagatattcctgaagtgaataatatcgaagtaaaattagtctggtaccctgcttggacaacggataaaatgagccgttacgcacgaattgctttgggtattcgctagttatttcgagactaatgataaaaaacatatgaaagaaccgattggtccgttctttcatatgtttttttgtttgtttaatttacttatttgaaaaaaactacctgatgccatcaatacttggctttttccaaatttttgctactggatggaagtctaataaaaactgtagctgcgttccaccgaagcctgacgctccagcaaacatgatatgaaaagtgagccctctatccataatcagataccctgtatccagcacgccatttctttcataaaactgataacgttttctctttgggcttcatcgctgcatttttgccaatttcttcactctccaaaagaacccccttaggataacgtgtcttcaataacgctaacacgggtgaacctaaatcgnttgttcggtggtgctgatcaattgcaaagaaaaagacataggntgcttcaggkgcaattggactatttaacaaaatccccacgttctcatccgcctcytgaataacmaacmaatgaaattttcctgscttgagaagacatcaataattgatcaaacggcagtctctcttcttctggaaaagcttctatgtaggttgcttcccaatagggcttgattttcttgatttaataatgtgaattgcataaaagctcctttctaaaattgatgctcgtactaataacttttggtacttacataagacctaaaagtattaaacatgcgactgggntatcctatacgcaattatntttggatactaaatc

SEQ ID NO: 192 - DNA, 2001 bp; double-stranded, linear
ttatggnggatnaaataggttcttactggttatggctaatatataataattttactttactaattttcaaatttcaacanaaaacgaccaccttatcgggaaaaggtagtctgcatgaaaaataagaattttaatatgtatcaatattacaatatctgttttktgagttcattaatttttatgtaaaaagatgccgcctcattggggaaaggcggcaagatgtactaaaaatgaaaaataaaaattaattggtaaagacatttaccgccttctttattaaaatacaagttttcattttacaaaataattgtattttatttaaattcaaatatacaattatattaaaatactcctatcttggacttgggataagataggagcnctcttctcgaaagaagatcatatatgagtgtattaaaaaggtaactatattttaaatcatctttttttatatttcaactatttttataaaaaatccctactyctcatttcattgcgagaggtagggatttactagtacmtaatgtagctaaagtttgataagtcatactaatttaaacagatagttctagggtaaccagatgaaacatttacccatagattaatttcccaacactttctgtgtacaaccaaataaattcatctgggaattgaacatgcgagattgttttcccatttaaagagtattgttcggtaatgatccctacagaagatggttgaaaagcaaaatagtctccgacttttaattcttgatctggcatattctctcctgttgccggatcgatcttatcaatataagcaacattaattccgttttctgtccaatcaaagtccggctgccccaatacatcatttcttacttgccaaataccgtttacaaattgtaaatcgtctactctatatccgtaacggcgcttaggtttaggaggaactggaggagcgggtgttggattacttttgggattagcgtatttgtcccacatgcttctatcaccaaagaatacgtttaaatctaatcgaccattccagccaggcaattgaccatttgacgtatattgatacattgaaataaaattccaataagggactggtggcggagtaggttgggaatatccttgtggattatttgctccgtaatcagctaaccacaaaccataatcagcttttgcaatagagctaaaattatatgattgtaaaacattggtataagtataaaacataggttttacccctgttttaccttgaacataatctaaccaacgtttagcccaagcaacgtctcctttattagtactttcccagtctaaaaccaagacggccttaccgatataacctttaatattttttaaaaagaactcagcttcttgttccgctgtcccttcaagtcctacctcattcgcaaaatgatatacagctacttttttcccactgctaatggcttgttggaatgctctatcacagtcaggatttatatatcctgttcctcctgtagctttaactataacaaaatctgcagggacaccttctttacctacgttaatatttgattgccaactagaaatatcaattccgttcaatgtcatttttatcatctcctataaaatttttaaaagattgatgtaagccagtgcttgctaatccacttaaagccccatatattgtattttcaggtgtgattttaccttgtatccaccatgagattaatatacctaaaatgaatacaattaaaggaataaactgattatatttatcttttaatatattagtawtttyaataacaaacccgacagctaaacaccctagcaccactaatggcatcaattcaattttagaaaagtccattatttgcccctccgttctaaatctcgtattctttcgttattttcttttaaattgttccataaagattttatttgttcatttaattntattacttcatcctctactaagccttgtttttcnttagtttgatcaattaataaattaagcttatntactgtg

SEQ ID NO: 193 - DNA, 4683 bp; double-stranded, linear
aatgattgtacgcttctttaaaggttactgttgtgtcttcttttcgataaaggatatattcgtcatctagcatatccatttgcagctcctgtttaaatccatttctggcaacaatagcagaaactagatgagcaacagtcaagccatctaacggaatatccactccattcattgctaatgtgtagacggtatcttccactaaaccacaggcgttgcaaccaccactggttaaatctactgtacttgttataattgcctcttgcatcgtttcttcccccatattgttttttaaagttattctttcatttgttatttacgaacgtaattcacatcataatcgtcaacttcaatatagatatagatttttttatcaggcattttacttcgaatgtctcgttcaatcgcattcacaacatcaggtgcatcttcttccattggttctaccacatcaatttttgccgctactaaaatttcagttggacctaaatgaacggtctttacatcaattagtttttcaacatccgcccgatcaaatgcggttttaatttttgctaaatctgtagcggtcacactttctcctataatcaaactataaaattctttcgctaagaaaatggctgcacacattaatagtaaaccaatcagtaaaccactgatagcatcaaatgcagcaatcccagttaccattgttaaaagggttcccaccaaagctaaacacaaaccaataaccgcacaaaagtcttccgtaaaaataattaaaatttcactgtgacgactttctcgcaaaaattttaagagcgataacttctctgtattcaattctttgatttctttcatcgctacacgcaacgagctaccttccacaagcaaaccaaaaattaaaataccaatgacaatagccacattttctacttcatgagagggatgcagtaacttctgaatagcctccattacgcctaacgcgcccccaccaaaaaagagcatcgttgcaacaattgtactaaaaaagtattttgcacggccttctccaaattgatgtaacgcactttgtccacgagaagcgcgcttattcccaaaaagtaataacacctgattactacagtccacgacactgtggatactttcattcatcatagcggtactaccacttaaagcaaaaccaacaaatttactaatcgctactaaaatattcgcaatcagtgcggcaataactgcaaacatgccactcgatttttttgtctccataattacctcctatatgtaacgtaaaactaagataaaccacccgtttattcatccatcattttaccacttctgaggtatttgtaaaaaagagttctcttaaaattcaaaaagaaatgtactgactgttttagttggccctcatttatcggtgtccatcccactcttgataaaattcctccagataaagttccataaattgatgacgcttttccgccaataagcgaccataatttgtattcatttgttcctttaactttaaaagtttctcataaaaatgcataatagcagtatcttccccattccggtattcttcttgggttaactgttcacgaggttgtttgtgaggatcgtgaattaaacggcctttatttcccgaataagccatcacccgtgcaattccaatcgcaccgatggcatctaatcgatccgcatcctggaccacttttccttctaatgtagtgactgttttcccagtatttcctcctttaaaggacatattagcaataatggaaaggatgtgattcgtttgctctgttgatacgttatttgcttccaaccattgttgcacctttagcaagccagcctcttcactttcgttaaatttttcatcgccaatatcatgtaacaatgctgttaatatacataaaaataaatttgcttgttctttctctgcaattgtttttgctaattgtgtcacccgataaatatgccaccagtcatggccacttgcttcgttggctaattcttgttgaacataacgctctgctgcttgaataattgtttgttcttcaaaactaagagattcattttcaaacatcctaacactcctttattctggatttaaaatttccacttggataatcccgctagctttcagaaacatattggtgacaatcggacctacaaaagaaaatcctcttttttttaagtcttttgctacgttatctgataaaagctgtgtgcgtgggacttggtatgcttcttcataaatagataaaacggggacgttttttacaaattgccatagataattggcaaaactgccaaattcttcttgtacttttaaaattgcttgcgcatttttaatggttgcttcaattttgcgccgattgcgaatcatatctggatcagctactattcgatcgacttcgtcaggcaacagcgcggcaactttttccggcttcatttggcaaaaatttttcatgaatgctacttttttccctgctgctgctttccaacttaaaccaacttgaaaaacacccaccgtcaacaataaaaacagcaaatcatcctctcttgtaggttttccccattgttctgtataccattgatagttgttcatcgccgcctccttttaagactgttcaaatgttaataatgcttgtttcattgctaaaccaccacggtaaccggttaattgtcccttgctgccgatgactcgatggcaaggaatgaccattaataaaggatttttcccaatcgctgtgccaactgctcgaaccgcacgtggacgcccaattttttctgaaatttcctgataggtcattgtcacaccataagggatttcttgcaacgcttgccaaacttctttttgaaagggcgttccttcgatgtctatggggcaagcaaacgttgtcgagtgttggttaagataacttattagtgcttctttataaggcgcagttttcttttcagaagcttctaattgtgcttgagggtaccagtttttcagctcttctatcgattgattggctgaacctacaaaagctagtccagcatctgtcacaccaagataatagtgatcgttctgccattcttgttgcgcataataaattttttttgccatatttctacacttctttctcgtattttcttatcttcattataattcttttggctttcaaaatcttgcgctcccatcactttttacttgtttttattagggattcttttacaatgaagaaaatgggaggtgtgcttacaatgaaaataacgtatcgacttactcagaaacgttgggaagccattcaaaataataatacgcaatttgatggtgattttttttatggtgtgaccacaactaaaattttttgtcgtccttcgtgcccttcccgtgtgcccaataagaaccacgttctgattttcaaaacggctcaggaagctttaacacttggttttcgtccatgtaaaagatgtcaaccaaccgggcaagtcgttcctaacgaggaatgggttgctcaaattaagcaatttattgatcggcattcagcggaaccattaagtttagactatttagcgcaagcctgccacggtagtccctttcatttgcagcgaacctttaaggaacagacaaaacaaaccccgtcagcttatttaacaagtgtccgaattaggcaagcccaagaattgcttctccattcaccccttacgattcaacaaatcgcgaaaaaagttggcttccaaaccgcagcatattttgccaccacttttaaaaaagaaacaggcgtaaccccctctgtttatcgcagtaaaaatgagccgaaaaaataacatttcggctcatcggattatttattggggcgtgattgtagccatgctacaatcaattgactgatttctgtttgctgttgctcattagaaattgtcgctttgctatctcctttttggacaccgtaattaccaaaccctgcatgattcccaccttcgatagatacatactgcgtatcttttggcaaaaactgtttggctttttggtagctagtccaatttaaaacaccatcgtttgtggctgttattgacagaaccggcagatttttcttgtttagtgcacctttttcgtcaggatagctagctaaataaatcatgcctttgattcgttgctcattttccgctacaaaacggctagccatcacaccacccagagaatgtccagccaaaacgaagttttgttgtggatgatcctttataatttgttctgcagcatttggtgcaagaaccgctaaattcaaaggaaaatgaacaacatagacatcataacctttcgtagcaacttcttgcgcccattcactataactagcgggcgcaaccaatgcacctggataaaaaatcagtgctgtatcatttttttgcccgtttgtataataatcatagtttttttcttgcgtggcactttggcttatttttaaggctgaatcggttgcttgatacgtactatttttaataaaaatagtcagaccgatgactaataccgctaaaaaaagcccgattcctaggacaatttttttccaacgtgatttkgttctatttttcatctcatttcctcccaatgaaaaaattcttctttctgattctacctttaataaaaaaagracacaacaataggagtyggtgaagcaacccgtctgttgctccaccaactcctaactagaccgtttctcg

SEQ ID NO: 194 - DNA, 9235 bp; double-stranded, linear
cgcattgaaatttgttgctctcttgatcgtgatnggtngccttaatagtgacggcttttactgtcgggcttggtttgacatcaatgctagaaacactaggaacaacctttgtgaataatcgaggcatggctatctttattattatyatgttagcaacaggaacgttagaaagaaatggcttgaaagagtcagcagctacgttgattaaacgattcaaaaaggtatctgctggtgtgattattgacatttatggtgtctttcggattatcttcgccgcttttaacgtaagtttcggtggggtagcaggttttgtgcgtccgattattttgccaatggcgttaggaacaattgaatcaaaaaatttaccaatggtgccagagtatgaagaagaactaaaagggatggcttcagccatggaaaatatctgttggttctttggtcaagttttgtttgttggtggggctggggcattgcttgttcaatcaacattgaaagatttaggctatgaagtgacattaggtaaactggctttagtggaagtaccagtcgccttagttgccttaatttcggcaagtatttactttactttaaaagaaaaaagattacgtaaaaaatattatggacaggagggactgaaatgagttttttcacagatccaagtattgatttgagtgcaaagttattggaagtcctttacatttttatggggattatcttgttatatacgagttttcgtagttttcgtgataaaaccaatcaacatgcgtatgggactagtttattctggggaattttaggaatcttaatcggttttggtcggtttattccaccagttgcctgtggcgtacttatttttgtgatgacaattccggcaattcttcaaaaagtgacaaaaggagaaagtcgcttaccttcgaaagaatacatggaaaaaatgtctcaaaaattaggaatgaagatttttattcccgcactaagtatcggggtttttgcaattctttttgccacattgactactttaggagctttagtcggtgtcggtgttggtgtctttgtagcgattttcatcatgatgttcttttctaaaaataatacgccgaaagtattttttgatgatgcggcggaaatgttagaaacagtcggtcctcttagtacgttgccaatgctgttagcttgtttaggtgctgtttttactagcgctggtgttggtgagattatttcaaaaggggttagtgccgtagtaccagcaggaaatgtcaatgtagggattattatttatgctgtgggaatggttatttttacggctatcatgggcaatgcctttgcagcaataaccgtgatgacagtcggaattggtgtgccgtttgtcttttctttaggtgcagatcccgcattagttgggatggttgccttaacatgtggtttttgtggtacactgttaacaccgatggctgcgaactttaatatcgtacctgtagccatgttggaaatgaaagataagtacggcgtcattaaaaatcaattgccgattgcacttttcatgttaattttccaaattgtttatatgattctattcaaataagaaaggatgatcgaaatgaaagttgtcgttactggctttgatccatttggaggagaagcaatcaatcctgcctttgaagcagtcaaaaaattacctgctgaaattgcaggagctgaaattattaaagttgaggtgccaactgtttttggcactagtggtgaaaaagtggctgaagcaattgaaacccatcaaccagatatggtgatttgtgttggacaagcaggcggccgcgaaacagtcactgttgaaaaagtggcgattaatttagcggaacgcgtatcccggataatgcaggacaacaaccaagcgatgtgccgttggttgaagatggagcaacagcctattttacaaatttaccgattaaagcgatggtaaaaaattgtcatgaccatcaattacctgcmgcgatttcttatacagcaggaacctttgtatgtaatgatattatgtatcacttactacacttaattaacactaaatatccaactattcgtggcggatttattcatgttccgttcctaccagaacaaacaattgataaaccaacgtttgcttctatgtcattagaagcaatcacagattctttgttctatatgattgaagcagcagtaaaaacgcaagaagatattcaactacaaggtggcacaacccattaattaacaggagcgtggaacaaaaatcactttggatttttgttccacgctcaaaaactgataaacggcgggaacagaagcaactccttcggaaataagccgaaattctccaaaaattaaagaacaattttcggaaattccttcttatttctcggagttaaacgctgctgtcccgacctctttctatttttacaaaaagaaaaagtaatttttgttggcgtgtgaaaaaaattttttatactattttcgttgacaagtcggtttcttcttggtatattgagattcataaattattagcccagtaggaaatagatgttttgttcagaaagtcgatggttgctgcgaatcgatcaagtctatttgtgaattacactaataagtagtaacaattacataatacataagcgagaagcaagtaagcttctaattaaggtggtaccgcggagagattcgtccttattctttaaggatgaatctctctttttatgtagctttaggaggcgttttcaatgagttgtggaggggttattcgttatcataagatcctttaatgtcagagtattcagaaaaaagattagaggagagtaacgaaatgaaagaaaaacagaaaaagaagaccgtgagtgttcgagaagcaagtatcgtattattaattattgtggcagctattgcaacaggagtaattggcttaaagatatcgccaaatattactattttgtttgtgattgcattgattttaggctacgcaatgtttcgtaaagtaccatttgatcaaatgcataaagggattgttgatggcttgaagccaggaattattccaatttttattttcattttagtgggggcattgattgccgtttggattcaagctggaattattccaacgattatggtttttggttttaaaatgattagtgttaaatggtttgtgccgtcagtttttattgtctgtgcgattgtcggcagtgcagtaggtagtgcttttacagtgatgtcaacaattggaattgcctttttcggtattggcagtaccttagggttaaatcctgctttagttgtgggtgcgattgtttctggttcagtttttggtgataaaatgtcacctttatcagaatcaacaaacttagccgcagcgattgttgaagcggatttgtttaaacatataaaaaacttgatgtggtcgactgtaccagcatttatcgtctctttaatcttgtttatgattttaggacaaacgtacgcgaatacaagtctgacagaagtagttcaagttattcaagtattggaagaccactttaccatttcaatttggtcattgttaccattagccttaatgttaatctgtgcctggcgcaaaattccagcgattatcacgattttgttaaacattattgtggcagtaattatgattattattcaaaatccgaaagtatcgttgcaggcattaggaaacacgttggaaaatgggtttgtttctcaaacggggaacgcacaaattgatcaattattaagtcgtggcgggattatgagtatgatgccgactgtggcacttattattctaacgttgtctctaggtggcttattaatggaattaggattgatttctgcggtcatggaagttgtttcgcagaaaatgagcagtacaccgaaattgattttatcaacgttattaacaggaattggcgtaaatatttttattggtgaacaattcctatcggttattttaccagggaatgcctttaaagaagtttacaaaaaagaaggcttggatccgactgttttaggcagaaccttggaggatggtgggacggttattaactacctcattccttgggggattgcaggtagcttcgtagcggggacctttggcgtaccaacgttgacttacttaccatttgttttctttagcttattatcgcctgtcttctcaatggtcagtgcatttactggtttaggaattaagcggctatcagcagaacctgttaccgaaaaatagattgattaaaatagaacagttgatggggaatactgtagtttctccctgtcaattgttctatttttcttgtaaaaaaggttgcatttttagaaagaaacagttatagttgactagtcaattgttgacgagtcatctttttaaggaggaaactatgtcgttatcattacgggaagtcagccaattattatgtcagttaaaggtattagatcaaaaaattaccaaagtttttgaagagcaagttggcttgagtttgactcgttatgagttgctgatgattttaaaagaacgtcagccgtgtcttcaaacggagattcaagaacacttaaaaatcgatagtggtgcggtcactcgccatttgaaaattttagaagagaaacagtatgtgacacgacagcgaaatccagaaaataatcgggaagtgctagtgcatttaacagaaaaagcacaacaagaactacagcaatgtacagccaagcaacaaacggtaacagaaattattcccagtacatttacaaaggacgactgtcgccagttaaaagaacttttgacaaaactagatcaaagcattacaacgaaagaggtatgatagaatgacaacatatacaacgaatgatttttcagagattgtttttggccgcaaatcggttcgggtgtacgatgaaacccataaaatttctcatgaagaaatgttaacaatgattcaagaagcgaccaccgccccttcttctgttaacatgcagccatggcgttttgtcgtagtggaaagtgaagcaggcaaagaaaaattaaaacccttaattcgctttaatacgcgtcaaaatgaaacatcttctgcaatgctcttaatttttggtgatttaaactgccatgagcgaggagaggagatttacaatcaagcctatgctagtggtaaaatgcctaaggaagtgcgggaccaacaattagcagccattattccccattatgaaagtttaagtagagaacaaatgaatgacatcgtaaaaattgatgcgagtttagcagctatgcaatttatgttagtggcccgagctcacggatatgaaacaaatccaatcggtggttttgaagcggaaaaattagccgaaacatttggtttagatcaagagcgctatgtcccagtaatgattttatctgtgggtaagggcatggaaactggttatgaatctgttcgtttagcaccagaaaaaatcacgacatttgaataggcaataaaaaatgacggcgtacgcttgcattaaccaactttcttaaagaaagttggttaatgcmacagcgatgccgtcattgtcgttggataaagtgacttccgttgcgatgcttttaagctcgtcaacggcgttttccatagcaatccccgtgccggcccattccaacatagtatagtcgttgtgaccatcaccaaaagcaattacttcttcagcagctatacctaactgtagggttagtttttctaaagaacgcgctttatcaatatttttagcggtaaattcaaaatagaaaggagcggaaaaagcagcggtgacggtttctttgaaaggcgcgtagatggcctcatgatatttttgtaaataggcgggttcaccagcaattaaaattttgttcaagggaaagtttagtctggcggctaaatcacgccactcacataattgaaagttgccaccccgtgattcatattcaataatattaaaatcaccagtctctaaatgtaaggtgttatgaaaaacatcattgacatacataaatgtttcatcattaatcattggaattacgtcaaattgtttcaaatgctctaaaatttgttgactcaatgactttgaaattgtctgattaaatagttgttgctgactgccgtgatgggtgacacaagcgccgttataggaaagtaagtgtccattataatgagccatctccaattcatctgctaagggccgcataccgttagtcgggcggccagaagccaaaatcagtgataggccttgtttttgtgcagctactaatgcttgtcgcgtttttggtgaaatctttttttctgaagttaacaaggtgccatcaatatccattacaattgctttgattgccataattggcctccaatccgaagagtttctttcttttagtataaaagttttttctattaatgtaaacggattctcttgtgaggtgtataaaagaattattttacaaaaatctatactatttttttgtgaaatttcatataatagaagtattctaattatctacatagagagcgagggacaaggaatatgaaggaaaaagaaatgcattcgctcttttttaaacataagtttgtgaaagtaactccctatttacgtcgttttggtcatcgtttgagtgggatgattatgccaaatttgagtatttttattgcgtggagcttattgtctttggtggctggctatacgactgggaatctacggctagctctttctgaagtcgaaacgataatgattcgagttgttttaccgattctaattggttttacaggcggaaaaatgttcgaggaacaacgtggcggcgttgttgctgctattgcgacagtgggcgtgattgtttccacagatgttccacagttgtttggtgctatgtttattggccctttagcaggatatactttcgccaaaattgaacaaattctcttaccgaaagttaaagaaggctacgagatgctgactaaaaactttttagcaggaattgtgggaggactgctgtgctgttttggtattctggttgtagctccggctgttgaaagcgctagtttttggctgtatcaattttcttcttggttaattgaagccaatcttttaccattggttcacgttttcttagagcccttaaaagtgttattttttaataatgcgattaaccatggcttattaacgcctctaggtttagaaggtgctagtcaaacaggtcagtccattttatttctattggaaacaaaccctggaccaggcgtgggcgttttggttgcttttctgctgtttgggcctgtaggacaacgaaaaacagcaggaggtgccaccatgattcaactgattgggggcattcatgaaatttattttccgtttgttttgatggacccgcgcttatttttagcagtaattgctggaggaatgagtggtacgcttgtttttcaaatatttaatgtgggtctaagtgctccagcttcgccaggttcattggttgcgattttagccaatgccccgactgatgcgaggctggcggtttttagcggaatttttgttagctttctgtgctcttttgcaatagcaagcttgttattaaaacgtcaacgaggaattgaaccagtttcaatgataaagatgaaggaggaagaccaagtggaaacagtcacacctaactatcagcaaattttatttgtttgtgatgcaggaatgggctcaagtgccatgggggctagtttgctaagccgacaattaaaagctgtgaacttggagatgcctgtgacttaccagtccgttcatcagatgaagtggcagcctaagacattagtggtcattcaagcagaattgaaacagttagcacaaaagtacgtcccagaaaaggatatggtgagtgttcaaaattttttagaaattaaatcctattacccgcaagttttagccaaactgactgcttcttctcaagagcaatcttcacttggttcagagtctactgaaacgaactcgacaaaacaaatacagaagcttgtttttttatatgccgagaatgttcgaggatcgcaaacaatgggaatggaattattgcggcaacaagcggcgaaacaaggagtcgcgattgaagtatctaaagagccactggaaacagtcttttttaccaaggagacaacctacgtagtgactcgtgaactggcgcaagcctatcatttagatctaacgcaacaaaatttatacgtagttactagttttttgaataagaaagagtatcaagaatggctggaaggaggagctgatagatgtttttaacgacaagagaaactgttctattaacggaattagtgaatagtcctacccccgtttcagtaaaccgcatgatgaatttgttaaaggttagccgccggacggtatatcgtgaattagaaaatttagaaacctcgctagcatcgatgggcgcgacattggaaaaagtagctcgtgggcgcttttcgattcaagcagatgaagcagcgatgacggaaattcaggctgctattttaggagaagagacacaggaactttctactttggcgcggcaacatgcgattttattgacattactgcaaacaaaagagccagtctctatgcattattttctggaaacgtattgtattagtaatacgactttttatgccgatattaaacaattagaaacacggattgctcggattccgttgacgattgctcggaatcaaggttatgaagtgactggttctgaaaaatatcgccgtcttctaatggcgaatattctaagtatggaaattaatgagtaccaattttttcattttaccgaattaacgacaaacgaccattttttctttcagtttattcatgcagaacatttagcatttgcacaaaaaattgttcagccagaagtagaaactttatttccagcattaagtgatcgcaaattacaacatttgattttaatgttaacaattgcgatggatcgggtcactgcaggtttttatttagctgatgagacctatactgggcagatgaataaggcctttctaaattgttctaaacgacttttttcaaaagtcgctgctgaaacgaaacaactatacgctgtcagtgagattgttttttttgctagcttgttaagtgatttttctaattcntttgatgaagatttttttgatgaacattttgacactcagctggcttatgaagtgaaacaactgattgaagctgtaagtcaagaaacggaagttnattttttcgaagataccaatttgtctaa

SEQ ID NO: 195 - DNA, 16798 bp; double-stranded, linear
ccagctcaaaacgcatttaatcacaaaagaggtaaaccggctgaaaaaagagaagaacgccctgcactatatcggcattgccgcagacgaagcgaaacggtgcaaggatgccccaaaccaccgctatcccctggtggaatggggcgtcaccgaggcgcaggctttacagatctgctatgaccggggcttcgattttggcgggctgtataaaatctaccaccgcgcttcctgctggtgctgccccttacagcggattggtgaattacgcaagctgcgtcagcaccaccctgaactgtgggcgcggctgtgggatatggataaccgggcgcgggcgcagtttggcgcaggcccccttggacagtttaaggagcgttggagcattgaacagttagacgcacggttttcccgcgaagaaaaggaggaacgcgcatgaaacacctgctccgccgcctgctggttccgccttagttgctcccaggcagccaatgaaaaaaacgcaaaacagaaagaggtgagaacaatcgaatttcaagcgaaacaactgctgatggaaaagctggataaaaacctgctggatcatgcaaaaagcctgacagacgggaacgggccgcagattgtggatgtgtatgggctgcaacaactggccgaggttcactgttacttgaaaacaacccaccagtttgaccctgctgaagtggaagcactgctgcaatttgctgacccgctggaagctgcctgccattgttgggaaatgaacacccatgaatacagtttcccgatctgcgacctgctgcgggaaaccagggcgcgggaactctttgaactggcaaagccggaacccccggcaaaattgtcggtgcgggagcagcttcgcgccgctgtgaaagaagcccgccagaatctggcaccagaggaacggacaaaaggcggcgaagcccggtgaaacaacctgccgcttgcaggaaaggaggtgaacccctatgaactatgacgcaaagcagcccccggcaaacctggccgattccatccagcagaaagaaaccgtccaggcattatacgacctgttggataaaaatatggccgacttcgatgcaagtctggctggcatggataaagctgaaaccgctgacctgaaagaagtttctgatacgcgggaaatatacgacttcattcgataccattatggcgaatttggacagcgtgaagcagaacttttgctccgcatggaaaatcccctgaatttcatagtggaaaactggccctgccataatcttgaaacgctggctatgaattatctggcggataaaacgattaaggaaccgaacaaaaaggaaatgccgcagtccggccatgacacgaaagatgctgaaaaaccctctattttgaaacagattaaaaccaaccagggacagatcaaggcaaacagacaggaaacccgccagcaatctattacggcagagcgacccagggacggtgaggcccgctgacgctttacgagaaaggaggtaacgcaccatgcaggacgaagtacgcgaaaaatcagtcgcgctcaccatcaaggtcggcaggactggcggcaggctgaccgctgaactgctgaaatgggccatccggaaatacctttcccaatcccaaaacccgaaaatccaccacggcaaacagacggtgaaacagcttgtgggccagggcgcgggtgtgcagaatattgagattaccggaaaaaatatcaaatcctttgagcgcgtggcccggaaatacggcgtggatttcgctctgaaaaaagacccagcacagggaaaataccttgtctttttcaaagcacgggacgcggatgcactcaatgccgccttttacgagtatgccggaaagagcctgaaccgctccgcgcaaaagaagccgtcgctgttaggccagctctcgcatttcaaggagatcgcaaagaatcttacacgggacaccgctaaaaaccgggagaaagggggcgttgaactttgaaatttgatgtaaagaagattctgcttccaaacctgccttatctgttcatcttctggtttttcaaccgtgtggcggagggctaccggctggcggagggcgcggatatggtgacaaaggcaatgggcgcagtatccggcctgggggcgctgatttccaaaaacccgctgcccagcttctacccgcgcgacctgctgctcggcgctgtcgtcgcggtcattatccgggccgtagtttatttcaaggcgaaaaacgccaagaaataccgccacggagttgagtatggttcggctcgttggggaaattccgacgatattaagcctttcatcaatccccaattcgaccagaacattctcctgacgcagacagagcgtgtcatggtggggagaaacaaaatccccaagtacaatatcaacaagaatgtgctggtaatcggcggttccggcagcggcaagacccgcttccacatcaagccgaacctcatgcaaatgaacgccagctatattattactgatccgaaaggaacagtcgttctcgaatgtgggaagatgctccagcgcggcggatatgagataaaaatactgaatacgattgatttcaagcagtctatgaagtataacccgttccgctatatctactgtgagaacgacatcctgaagctggtcaactgcatcatggaaaataccaaaggcgaggacagcaagggcggcgaagatttctgggcgaaagccgaagccctctactatcaggcgctgatcgcctatatctggtacgaagcgccggaggaagaaaagaacatgaccaccctgctggaaatgctcaatgcctccgaagtgcgggaggatgacgaaaatttcaaaaatgccgttgacctgatgtttgacgcgctggaaaaacgcgatccacaacattttgcggtgcgccaatataagaaatacaaaatggcggctggcaagacggcaaaatccatcctgattagctgcggcgctcgtatggctccctttgacatccgggaggtgcgggaactgatggagggcgacgaactggaacttgaaaagattggcgaccgcaagacggcgctgttctgtatcgtatctgacacggatatgacattcaatttcatttctgcgatggtttatacgcagatgttcaacgtcctgtgcgacaaggcgctggaaaatggaggcgcactgaaaacccatgttacctgcctgctggacgagtttgcaaaccagaaaatccccaacttccagcacctgatttccgttatccgaagccgggaaatttccgcgcatatcgtggtgcagacgcagagccagttaaaggctgtctacaaagaccatgcggaaactatcatcggcaactgctcctgcgtcctgtttttgggcggcaaggagcgcagcaccctgaaagagatttcggaaacgctgggaaaggaaaccatcgaccttttcaatacctccgacacgcggggaagccagcgcagcatgggggtaaattaccagaaactcggaaaagaactgatgtcaaccgatgaattggcggtgatggacggcggcaagtgcatcttgcaggtgcagggcgtaaggccgtttttcagcgacaaatttgacattaccaaacatccgcaatataaatacctgctggattccagcaagaagaacgcttttgatattgcaaaatatctgagccggagattgaccgtccgaccggacgacgtttttgaaagctgtgaactcgaagcgccgcctgcgtctgatgcacccgccgattgacttttcaaccggcggtttttttgttcctatccaaccaatcacaataaatttatggaggtaatttatggaattttttgcaagcgctattgaaaccctgaaagtccttgtaatcgcgctgggcgctggccttggcgtgtggggagtgatcaatctgctggagggatacggcaatgataaccgtgcgacacgttcgtaagtgaaaagcttgcgcacaaagtcgaagggcaattgtagcccgaaactttggagaactgatattccgatgggtgaaatgagggggtaacgtcccgaagcgccaccctaatactccgaatggcggggagcatgcaacggctctctccaaaagtttatagagctcggtgaagtcggcagagagcaaccgtaagactggttttcagaccagacacgaaagctgtccagaggtggatggtgttgcctatatgccgggggtcggatatccatggtgagaatgtatgaaaatactgacgaaattctgaatgtacgagtctaaacgttgatgctgtcgaaaggcagtacacctttcatggtggtatctgtgggcgagtaaaattggttgttatgaaagtccatgcatcgttacaggcggtgcggttatgcatgaccagatacaggcttagaggaagaacctaaagatatccaatgataggaatatcggaacgtggaaagctgggaacacggaggcggttgcaagccagtgatgtggtggatgggaataccttcgcgagagggcaataaccattctttattccagtgagagtagtggcacagtacctgtgaagccgtgaataagtaagcggtggagggatagccacaagtcgaattcagcaaagaaaatgaaaacacaacaaacacagcttcgagtatgacaaagaaaatccaaaccgaagggagaggatgcctgtgttgacttcggggcagcaagaaaggaaaagcaaacagagaaaaatccgcaactcagagtattacgacatggaaggtacttttgacaggctgtatgcagaaagtaagaaagataaaaccttcaaccatctgatggaaatcatcgagagtgaagaaaatatcaagcttgcatacagaacgataaagaaaaatacaggaagtgatacttcgggagtggacaaaaggacgatagccgaccttgcaaagttaagcgaggaagaatacgtccgtctcatacggaaacaattcagtaattatcatccaggacccgtaaggcgagtggagataccaaagcccaatggaaagaccagacctctgggaattccaactatcgtggatcggatcgtacagcaatgtattttgcaggtcatggagccgatatgtgaagcaaaattcagtgagaactccaacgggttccgcccgaaccgttccgctgagactgctattgcacaatgcatgaggctgatacaggtacagcatctgtaccatgtggttgacctcgatattaaaggcttctttgacaatatcagccatacaaagctgattcgtcagatatgggcattgggaatccgggacaaaaagctgttatgcattataaaagagatgctgaaagcacctgttgttctgccaaatggagagaaaacatatcccgcacggggtaccccgcaaggcggtattttgtcgccattgcttgcaaacatcgtattgaatgaactggattggtggattgcctcacaatgggaggagatgccaacaaaaacaaaattcaaaacaaggagcaatgcgcagggaacagagattaagagccacgcctacagggctctgcgccggagcagattaaaagagatgcatgcagttcggtacgcagatgattttaaaattttctgcgcaacacatgaggatgctgtcagagcatataaggcaacagagttatggctaaaggacaggctggggctggaaatcagccctgacaaatccaaagtagttaatctcaaaagacagtattctgattttctcgggttcaagctgaaagtccgtaaaaagggtaagaaatatgtggttcggtctcatatgagcgataaagcatacaaaaaggcgcatgaaaaagtctcggaagaagtaaagaaactggcttattcgtcagatgataatgctcagttcatgcagcttcagaaatataactctgtagttgccggacttcatgaatactattgtatttctacagaagtatctcatgacttcagcagacttgccttcagtatcaacaaacagctcagaaacagactgaaaggcgacttatccaaaaagggacagctcagaaatgggttcattaaagaaaagtatggagcaagcagacagatgaggttccttcatggacgtccggtggttccactgggatatgtccagtcaaagaatgcccagcataaaaggaaatccatcaataaatatacggtcaaaggtcgggaacagattcataagaatcttgcaatcgacacagctacaatgttatggctgatgagaaatcctgtaaagggcagaaccattgaatatgcggataaccgtatttctttgtatgcggcacagtatggtaaatgtgcagtgacaggaattccgatgaattcccacgatattcactgccaccataaagtaccggtaagcaatggcggttcggatgaatacgcaaatcttattcttgtcagcaaagcggttcatatccttatccatgcttcttcagaacctacgattgagaagtacctgaaatccttaaatcttgacaataaacaaatagaaaagcttaacaaacttcgttctatggcagaaatgccacctattattctttgaatttaatgctgtaacgaagtgtgtaagttgtgtttaaaagccctggacggctgaattcgatggagcgccgtgtgcggtgaaagtcgcatgcacggtgtggagcgggggaaaatccggagataacttcaaaggattacctatcgctatctggcgcgaaatcgcagggaatgaaacaacttatggccggcggcggagttgccctgattgggatgcagcttatccctctgctggcaaacctgttcggttaaggcgggatagcctatgctgaacatcctcgacataatcacagactggatcaaggaaatcctgcgggactgcatcatgggcaacctggacgggatgtttgaccagattaacaatgaagtcggggaggttgcggcgaatgtggggacgaccccggcggcatggaacgccggggtcttttccatgatccgcaatctgagcgatacagtcgtagtgccggttgcggggataatcttaacctttgtcctgtgctacgaactgatttccatgctgatggaaaagaacaacttccacgactttgaaacttttgcactgtataaatggatattgaaggtgtttatcgcagtctatctggtcacacacacctttgacatcacaatggcgatttttgaactggcgcagaacgtagtacagcagagcgccggtgtgattaccggctccaccaccatagattttgcggcggcgctgggcgatgtggccgcccaactggaaacaatggaaatcggggaacttttcggcctgctggtggaaaccatgctgctgaaaatcaccatgccggtgctgtcgttctgcgtcatgctggttctggtggggcgcatgattgaaatttatatctactgctcggtgggcgcaatcccctttgcgacgatggcaaaccgggattgggggcagatgggaaataactatctgcgtggtcttgtggctcttgggctgcaaggctttttcattatgatctgtgtttcgatttacgctgtgctggtggggcagattgggagcgccgacaacatccacatagccatctggcagtgtgcgggctataccgttctgctgtgcttctccctgttcaaaaccggcgcggtcagtaaatcaatttttaacgcccattaaggaggtggaacccatttgaaacaatatgaaatcattctggccgaccctccgtggagatactcacaaaaggggggtgcagggagcggcagaacgtcactacgccaccatgagcatggaggatttatgctcactgcctatcagccgttttgctgcgccggactgcgcgctttttctttggagtacattcccacagcttccagaagcactgcatctgattcgtgcatggggattcacctataaaacagtggcttttgtctggttaaagcaaaaccgcaaatcccttagctggttctatgggcttggattctggacgcgcggcaatgcggaagtgtgcctgctggctaccaaagggcatcccaaacgccgccgggccgacatccatcaatttattatctcaccgattgaagcccatagtaaaaagcccgatgaagcacgggaaaaaatcgttgctctgatgggcgacctgccccgcgtcgaactgttcgcccgccagagagtccccggctgggacgcatggggcaacgaggtagaacccagccccggactggcggaggggctggcccctgaaaatccaacgtaaaggagggagcgaatttatatggacactgaaaaactgcgacggcagcttattgaccgcatcacggacaattacagcgaataccgcgccagcctgctgttaaaagaccggcaggaattgattgacggcgcaggcaggattgccgataccgccaccgtattccagcacctggctgaccgaagctacaaaccggaagaactggaataccttttgaaattccaaaaccccctggaggtggtcacggagcattgggcagattatgaactgatgccggatgtgctggatgcgctgattgcagacacggttgaccggcaggacgatctgaccctgttcccgctggcaacggacgcaccggcacagaagccggaaagcctgcggaagtttctgaatgtagacctggaaaccgtcctgccccagatcatgaagcagaaaaccgccttttaccagacagacttaaactatgcgctggatgccatgagggagggcgcaacgtccggcgacccggcaaaacagaactttgtcctgattttccggcagagcggcgtggagtgcttaaatgagcgggatatgttcatcggcggcacacgcagctttaacacactgcaattctaccacacacagacaagggagccggttctgacctattcggtggaactgacgggggacggcaaagacggcctgcggggaaatctgtaccagcaggacaaccaccgccttgcggaatacgcaggcgtaccgcytccccctatacagatgtaacggttacatttacaggagggaaagaagtacggctgccggaaaaggaattttactatgaaaaagccgcaagcctgaaatatctgcacggcagcattaaggaggttcgcaatgaagcggaggacgaaaccgtggtgcagggggcggtcaaacgggaacacgaccgccggcgggaaatgcccaggggctattttgccgtccacctgcaagcgctggatgagcagcggattcaggccgaagcagatcggctatcgtccgcgctcacggacttaaaacagcccaactcgccggacaaggagaagtttatggtggaaatatccgtgtatttcctgccgctggcttcccagcacgatatgaaccggctatttgagaaagtgcgcgaccaggtagggcagacggtgtatatcactccgccggacgatacccacaagcggtattttgtcatgcggcgggargaacgcgcacaggagcagccagaacgcaagccctctatcaaggcccagctttctgcaaagcccgtccccggcgataagcccgccacaaaaaccaaagaccgggaggtgagataaatgccctttgtacccgtacccaaagaccttgccaaagtaaaaacaaaagtggcgttcaacctgacaaagcgccagatcgtctgctttggcgggggcgggctggtgggagtccccgcctacatctttacacgcagcagcatcggcaacgagccggcggctctcctgatgatcggcctgatgctgccctttttcttatttggcatctatgaaaaagacggtcagccgctggaagcagtcctgcggcatatgatacgcgcaaaattcctttgtgcagggacgcgcccgtaccagaccgacaatctgtacgccgccctttcgcggcagactgaggaggtatcgacgattgaaaacaaaacagcaggcaaagcaggccaaaaacctgcaagcggcaaaaaaagaactgaaaaaagaaaagtctgacttaaaggccaccctgcgcctgaccccggacgcaaaactcaacagccgggacaagcggcggcttgcggcatcggtcagcaaggcaaagcgggacggcaggcttcccaagaccgcccagcagaccatcccctaccaggaaatgtgccgggacggtatctgtatcgtgggcgaccgctatttcaccaagcaaatccagttttatgatgtgaactaccagcttgcacagaacgaggacaagaacctgatttttgagaactactgcgatttcctcaactattttgacagctccatcaaggtgcagctttctttcctcaaccagcgggccgacatggaggaataccagaagtccatccatatcccggagcagacggacgcatttaacggtatccggcgggagtattcgggaatgctcaaaggccagcttgccagggggaacaacggcctgacaaagaccaagtacatcacctttggcattgaagcagacagcctgaaagaagcaaagccccgcctggaacggattgaagcggatgtgctggcgaatttcaaggtgctgggcgtccgcgcccattcgctggacggctatgaacgtctggcaatcctgcaccggatgtttcacccggcggacaatcagaaatttaagtttgcctgggatgccatctggaaaaccgggctttccagcaaggatttcatcgcgccggacagcttcaccttcaagtccggccagtatttccagattggcaggacttacggcgcggtgtcctttctgcaaatcctcgccccggaactgaccgaccggatgctggcggatttcctcgatctggaaaacagcatggtggtgacactgcatatccagtccatcgaccagagcgcggcaatcaagaacatcaagcgcaagattaccgacctcgaccgcatgaaaattgaggaacagaaaaaagcagtccgggcagggtacgacatggatataatcccctccgaccttgccacattcggcagcgaagcaaagacgcttctggaagatttgcagagccgcaacgagcggatgttccttgtgactttgcttgtgatgaaccatgccaggacgcggcagaagctggaaaacaacatcttccaggcggcgggtatcgcgcagaaatacaactgtgcgctgcgccgtctggactaccagcaggagcagggcctgatgtcctccctgcccctgggcttaaaccagatcgccatccagcgggggcttaccacctccagcactgccattttcgtgccgtttaccacccaggagctttttatgaacggtgaagcgctgtactacggcttaaacgccctctccaacaacctgatcatggctgaccggaaaaagctgaagaaccccaacggcctgattttaggcacccccggcagcggcaagtccttttccgccaagcgggaaatcaccaacgctttcctgattacccaggacgacatcgccattatcgacccggagcaggaatattcgccccttgtgcagcggctgggcgggcaggtgattgacatttcccccgcctccgaccagtacatcaacccgatggacctgaccctcaattacagcgaggacgacaaccccytgacyttaaaaagcgackttatcctctccctgatggagctgattgtgggcggcaaggccggcctggagccggtggaaaagacagtggttgaccgctgcgtccacatggtctaccgggactacctgcaagacccgaagccggagaaaatgccggtgctgggcgacctttaccgccttttgcgggaacagccggagcggaagcacagcggcttgctaccgcgctggaaatctacgttactggcagcttaaatgtgttcaaccaccagaccaacgtggaaatcaagagccggattgtctgctatgtgattaaaaacctgggcaagcagcttaaaaaattcgggatgcaggtggttcaggatcaggtgtggggacgggtcagcgaaaaccgcgaagcccataaatccacccggctctacattgacgagatgcacctgcttctccgggaggaacagaccgccgcctataccgttgagatttggaaacggttcagaaaatggggaggaatcccgaccggaattacccaaaatgtcaaggatttgctggcaagccgggaaattgcgaacatttttgagaacagcgactttatttatatgctcaaccaggcgggcggcgaccggcagattttagccaaacagcttaatatttccccgcaccagcttggatatgtgaccaactccaacgccggcgaggggcttttgttctatggcaatgtgattatcccattcgttgaccatttccccaaggacacggaactctattccatcatgacaacccgcccggaggatctggcggaacagtaaaggagggtaagatttggaacacaatcaggaaattatggagcagtttttgaagctgctttcggaaaacgggcgggcgggacagtcagaggatctgtcccgcctgctgttctatatggacggcatgaaccgccagcttgacgcggtgcgccaggaattgcagacagtcaaggtacagcttgcacaggcccaggacacgccgcagaaaaccgtcttgcagggcatggtggacggtctgcaaagcaaagtccggcaggcgcaggaaaagctggacagcctgcgggaaaaaatcatgcagtgcgccgccaacgcggtagagagtttcaagcgcgtgggcgtgactgcgctggataaggcggtttccgctatgggcatccacaagacgctggaagcggtacagcagaatatcagcggttccctggacgatgccagaaagagcattaaaaaggtggaaacccttggccacgaactccgcagcgtgggcgggcatctgaaaaacgccgggcgcgccgtggccggcagggaaacccaggccgtggacggcgggcaggaaggacgcttccaggctgctttccttgcccccatgcggactgcctataagatgctttccagcatgaacaataccacccttgccgctattggcaacgtggaacgactggaaacagcggcggaagcgtgcgggaagccaaaaagccccctgtccggcaaacggaaacgcaggaaaaggagcaggtaaaggagctggaacataaggaagaacccactgaaacccagcgccgtgagaagccctctatccgacagacgctgacagagaaaagtgagcctatggacgtaagcgatattttgagcgaccctgccaatatccagatttttgatacggttttagaagaatcctgccgtcaatggtgcgactgtattggcgatgcgccggaacgtgccagcggcaaaggctttgcgtcctttttctatgaggtttttgaacaaaaagagcaggaatacaaagccgagttaaaggcagacacacgctctgaaaaaccatccatccgaaaagcgctgaacgagaaaaaggccgaagccgccgcacggccttccccagagccggaacgtaaagcgccggagmcgcacggtgagccgggaacggtttcaggcacgggagaaaaaggttcagaagatgggccgggacggtctggtggaacagaaccgcgccaccggcgaagaaaagcgcgtcaccagcgcacggcagacaccgcctttgaccgcgcccgccctacggaacgggaggacatccgccgcccggcagcacggggcgcagacaccggcaaaaagcggaaacagccccgcactgcgccggagatggcggcagaacagacggaaccgctgcttacgccggaatatctggcagacagtactgccgaaccgccgcccgatgccccggcatccatgcgcggcgcggtggatatgccgttactggatgcgcccatagccgaagaacccactcccgcgccggtgaggaaacagccccaaaagcgggggaaaaagggcaagaagaagcaaagcacgaaattcacggaagacgctgcccgaccgggtagtgaggaaaaaacggctatgcgcggtgtggagggcgctcctgccccaaagcggcgcacttctgagggcggctcccgcctgcaatttgacaaggaagaagaaccggcagaccccgcagccgaccgcgcagcaatcagaaagcggcagacagcaaagctggccgaacacgccgccaaaccggaggataagctaaaatccgatggcaatccaaaggccggggaaacacgcctgaaatttgaggacactcccaaagatacggacatttccggcgatactgcgcccgatatgcccacccgccaacaaaagaaatataacaaggccgcctgccgcacggaacgcgcagaccgccgcgtggagcaggcacaaatgaagctgcctgccaaacgccgcctgcacatggatcaccagcctgacgaagccagcgggaagataaagcggcggctccgttttgaggatgaaatcctgccggagtaccaaaagccctccctgtcctcccgtgccggaaatgcggcaaaaacggcggcagtcttaaagctgcatggcaaactccgtgaatatgagcgtgacaacgtggctctggaatctgcccacaaaatcgaactggttgccgaacagggcgcggggcgcgtcctgcgctgggaacggaaccgccgccgctccaaaccctaccgcactttgcggaaagcccagcagaaagcggcgcgggcgcacactgaccttgcatggcagaccgccntgcgggataaccccgaactgcaacgcaaaaacgcgctggcaaaatgggtgcagaagcagaaaatcaagcggaaatatgcccaggccgcccatgaagccaaacagagcgcgaaatttacccaaaacgtcctgaccgccaccggcaagattgcccgcgccatcgcccagtatgcggcggcacataaggcggtctttctggcggttgcaatgctggcgctggtggtgatgttcttcgccacgggcctgacctcctgcaccgccatgctgtcaggcttccagtcctcgtacatttccgcgtcttacatggctaatgagcaggaaatctgccagagcgacctttattacacggaaaaggaaacggatttgcagattgatattgacaaaactgaggaaaattaccccggctatgatgaataccgctacaacatcggtgaaatcagccataacccttatgaactgttaggctacctctccacggcgttcaatgcttttacctttgcagaagtccagcccgaaattgaccgcattttttcccggcagtacaccctcacccgtgaggtgatcgtggaaacccggtatgacgatgacggcgacccttatgactggtatgttttgcagaccacattggccgtgcgcccgctgtcctctgtgttacagagcagcctcacccccggcgaacagaccgaccgctacggcgtgtatatgcagactacggcaaccggcaggcgtttggaaatccctttggtttttcctggcttggatatgtgagcagcggctacggctggcgggtacaccctgtaaacggcgaaaagagcctgcaccggggcattgacctcgctgtggcgcaggggactccgattctggcggcgcaggacgggcgtgtggtatcggccggcgatgcaggcagctatgggctgtgcgtggtgatcgaggacgataaaggctaccagtcccggtatgcccactgttccagcttaaacgtcagcgccggccaggaagtaaaacgcggggatgtgattgctgctgtcggcagcaccggcaacagcacggggccgcatctccatctggaagtcatgttaaacggcgaatacttgaacccttatttcttcgtggacaatggcgacgatggaaccggcgcaatccccggcacccccggcgggccggctatcccggactattccggcgaaccgatgggcgatggcagytttgaaagccatgctgcgggaarcggagaaatacctgggctatccctatgtgtggggcggctcccatccatccacttcctttgactgttccggttatgtttcgtgggtcattaaccagtccggcgtgggcagcgtcgggcggcagacggcacagggcctttacaacctgtgtacgccggtatctgcggtgaacgcacagcccggcgacctgattttctttaccgggacatacagctcgccggggccggtcagccacgttgggatttatgtgggaggcgggcggtttattcactgcggcgacccgatttcctacgccaatacgggaagcccctattggtctgcccatctgtacgggtatggcagaataccctgaaacacttttttcaggcatttttgccagaaacggaggtatgatttgaaaattggactgattgatgtggattcccacaactggccgaacctgtgcctgatgaagctgtccgcataccataaggcgcggggcggcctggttgagtggtggaaycccaaaaaccactacgaccttgtttataaaagccgggtattcacagatacctactcgaaagatacgattgccgttaccaatgccgatgccgtcattttaggcggcacgggctacgaccttggggaaaacttaccggatgcggtggaacacacccgcccggacgctgcactgtatccgcagttttctgataccgcttacggctttttgagccgtggctgtccgcgaaactgcggattctgtattgtcagcggcaaggagggacggcgaagccgaaaggtggccgacctttccgagttttgggacgggcagaaagaaatcaagctgct

SEQ ID NO: 196 - DNA, 1409 bp; double-stranded, linear
ataaaatctagccgtcaatatcataggaaattattagaaaatcccaattctgcaccaagtatgtggtttatcaatcaaaaatatggttcatggaaaaacttattagttagtcttgggtgtgataatggagaatatgggaaatgggcaaaaatatcagaaaaagatttattgaaaatagtagagtcttttatcacggttgagaaaataacttctcagcgtatgtatgaaaaaagatcagtaggaaaagacgttccttcattgagtacattaaaaaagagatttggagatataaggtatctatttagaaagaatacagagaagtcttcttttactgattttgaactaatgattgaactaagaaatgaaatagtccgattaaaattacaggatgatttatcaatgacgaaatttcgaaaactagttcaatcaccaaagttaccatcagttgatacaataatgaaaagaacaaataaaaattgggaagagttgatgacagaaatagggtttgactatcgaaaaatcaaaatcaataagcagagaaataacttatctaaaaagaagaaaactaaatagtaaaactctagactagacgttcaaactaaaaagttgaacgtcttttttattacctaaaaacgaaaggggattttattttatgataaagccgatatttaaaaaatggcgattgtttgcggctttagctttattaggtcaaacaattgtaggggcgattgatcctatgattgtctttgctgatgaaattgctcatccacaaacagtgacggttgaattagatttagcgcatcaatatgttgttgaaggaactttcagtgacggtcgtccaatgtcagaagtcactgttccacattatgctgtgtacaacggcgtgaaacaagatgttttctgtattgagccaggagtcccaattgacaatgagttcacgccgggttatgagaaaaatccattgcctgatatgccagagaaagcgaaactagtttccgttctatggaaaaaagccggtacagatgtagatactcatattgtggcacagaagatgatctggcaagaagttaatgggtatacccttcactcaatcaaacgattgaatggtagtgccgtaaatatcgcagccattgaggcaaaaatcaatcaagccattgccgattatcagaagaaaccaagcttccataatagtacggctaaaatagtattagggcaatcgactactatgacggatacgaataatctgaatttgtcagagtttgatgaagtggtggaaaataccgcaaacattgattatcgtgtgaatggcaatcagttgataatcaccccaaatgccagttcaaaagaaagtggtgtgctgacgcttaagaaatctgctggcaccggaacacctgtcscctataaaaagg

SEQ ID NO: 197 - DNA, 9619 bp; double-stranded, linear
aaatgggaaaagtcgctcgagcaatcgcttcgggtcaacaaaagagtcaacttttcttaaaggatattgaagaggatacgaaaaaattagtccgtgaaattaaacaaagcgagaaaaaatatcaagatttttccattacgcaaaaaaaatgtccagattgtggctcaaacttacgggaaaaaaatacgaaagatgggaagatttacgtttgtacaaaccaagaatgttcttatcgtcggcgaaaagatcctaaagtatccaatcaccgttgcccacaatgccataaaaaaatggtcatcatagaaggaaaaaatggtcgttctttcaaatgtaaattctgttcgattactgaaaaaattcccgataaaaaagaacgaaaacaaaaaatgactaaacatgaagaacgtcgtttgatgaaaaaatattcacaaccagacgaaccagaagaaagtgctttagcgcaggccttaaaagccgctatgaatcaagagtagcgacttgacgaatgttggctctaaataatcaagtcatccttgttggtctttagtaaactttcaaatagaaagagagggacacggatgctcgcaaatttaaatcaagcaatggattatattgaagaacatttaacggaagaagtatccttcgatgaattggcgaaaaagacagggatttctgtttaccattttaaacgaactttttcgtttattacggggatgagtctggctgagtatattaaaaagagacctttggcggaagcaaatttagcattacttgctggtgaaaaagtgacagatgtagcttttaaatatggttatcaaagtattgaaggattctcaagagcttttcgcgattggtcaggacaagccccttctgaagtaatgaaaacacaaatccaaaaaacgtttcctaaattctcttyctatattgatattaaaggaggacaatcaatggatgttaaattgattgaaaaaccagcgtttcaawtagtcggagttagtcagaaggttcccttgcagtatcaaggggaaaatcaagcaatcatggaattagcacagcgcattacaccacaacaacgagcggaaatgcatacatttgatgacatatatcctcatcaagtagtaaatgcttcttttgactttcaagagggacgaacaacagaaggtggagaaatgacacacatgattggctttgccacttcgcaagaaaatacctatgaagatttggagcaactaagcgtacctgctcatacatgggcggtttttccaaatgaaggtcctttcccacaaactttacaagaaacctgggcaaagatattctctgaatggttgccttcatctggttaccaagtcgttgcagcaccagaaatttcgtttacgcaatatcaaggaccagcagaagctaagtatagtgaaatctggcttgctgttacagctactaaataaagaaaacccaccattgaaaaatggtgggtttttccgccaagaaggaaaaagttkggtataataaacgtgaagaaaaaaattagaccttctaaactgaaatctagctatggataagtgatgcgaatacggaatcatggagaaaaaataattctccgaggttttagagtcatgttgtttagaatggtaccaaaacaacaaacccttgttcagcataatgactatagttttagagtcatgttgtttggaatggtaccaaaacaaacttttttgatttggctttttctcccctgttttatagccatgttgttaaaaaacaaactatcacctcaagcaatccgtaattttcatcacaagattagaatttttatcatcaaagacgagctgcttcaattttcgaaaactaatcaagtgataagtcaaaatgttgatagattgagattagttcttcctttttttaggaagggctttttttattgatagaagaacgggaagaaatcttggtagcacctaaaaaaattgtgagaaatgcttctgtattgtttggtttctgcctcagaaagttgtatacttagattggaattattctatattacatgcattttcacactttttggaaaagttcacttgaattttcttttagtttcgtagataaaaggagtcatcgctaatggaaatgaacaattcaggtaagcttgtttctttgtgtggaggcaaatcagggaggaaataatatgtttgatattgtaacattggcgagaatccaatttgcgatgacaacagttttccactttttcttcgtaccgttttcaataggattagcacttgttgtagcaattatggaaacaatgtacgttgtgaaaaaagaggaacgttatcgtaaaatggccaagttttggggaaatatattcctattaagcttcgctgttggggttgtaaccgggattattcaagaatttcagtttgggatgaactggtctgactattctcgattcgtcggagatatttttggggcaccgttggcggtagaagcgctcttagctttcttcttagagtcaacattcttaggtttgtggatctttacttgggataaaatgaatccaaaagttcacgtaacctttatctggttagtcgtattcggttcaatgatgtctgctttctggattttagttgcgaatagttttatgcaacatccagtaggttatgtcatcaataatggccgtgctgaaatggtggactttgtagctgtcatcagcaatccaaaagtttggtatgaattttcacatgttatcatgggcgcctttacattgggcggcatggcagtagctggtatggctgctttccaaytgttgaaaaaacgggatatttcattccacaaagcatctatgcgcattggcttatgggttactttgttcggttcaatcggcgttttattagctggcgacttgcaaatgaaagctctaattgaaggacaaccaatgaaatttgcggcgatggaaggggcctatgaagactctgatgatcctgctgcttggacattgattgcttgggcagatgaacgggaacataaacaagtttttggtatcgatattccgtatatgctaagtattttatcgtataacaaattatcaggttcggttgatggaatggatacagtcaacaagcgtttggtagaaaaatatggggatgataaaaattattatccaccagttaacactttattctggagcttccgtatcatggctggttttggtgccttaatgttattggttgctgccttaggactattctttacaaggaagaaaaaaccatcgctgtacgagaagaaatggatgctttggattgttgctttatgtacgttcgcaccattccttgccaatacaacaggttggttagtcactgaattaggtcgttatccgtggactgtctatggattatttacgattgaacaaagtgtttcaccaaatgtatcggttgcttcattaattacgtcaaatgtcatttatttcttattatttgctggtttaggtagtgtcatggtttacttggttattttagaattacgtaaaggaccagactatgaagcgaaaaaattagcgaaagaaaatgaaccagcgttggatccatttgataagggggtatttggcgaatgagtacactacaattattatggtttgtccttatcggcgtcttgttctcaggtttcttcttcttagaaggatttgactttggtgttggaatggccgttcaaacgttggcacacaatgacgacgaaaaagatcaagtcgttgcaacaattggacctgtttgggacggaaacgaagtttggctattaacagcgggcggcgcaatgtttgcctctttcccatattggtatgcttcattatttagtggctactatttaattctatttacgattttatttggcttaattattcgcggagtttcctttgaattccgccataacatgccggaaggtaaacgtcgtcggatgtggaactggacactatcaattggtagtttccttgtaccgttcttctttggtattttgtttatcagcttagtccaagggatgcctttagatgcaaacggcaatatgcatgcgcaatttacggattattttaatctgttttcaattgttggtggagtagccttaacattactttgctacttacacggcatgaactatattgctttaaaaacagaaggcccaattcgtgaacgtgctcgaaattatgcagaaatcttatacggcgttttatatatcggtttagttgtttttgcagtgttgatgtacttcaaaacggacttttatgaaaagaactttgcggtcactttaattttaacgttagcaattgtggtcttaacggtcattgctaatgttggggtgtttaaacgcaaagagatgttagcttttctagcgagtggtttaacattagttgtactagttgctctcttgttcagtggcttgttcccacgtgttatgattggtagtgaaggttttgatttgttgattaaagatgcaacaagcacaccatatacactaaaaattatgacgtggatttctttaagcattttaccattcgtgttagcttatactgcttggtcctattatattttcagaaaacgtatttcacagacagccgtaccagaggggtattaaatctatgattgataaagacatcttacagatgcctaaaatcaaaaaaattcttgtcttgcttgcaggtttttctttcctgcaagcagtctttataattgggcaagctttttttctttcaaaagccattgtcggcctttggagtggcgggcatcttaaccaacaactacagagtattttactcttttttattttttatcttggtcgacatgttattacgtattttcgtgagagaatgctcgatacatttagttatgaacgctcgaaagaattacgcgaacaattattaaccaaaattttccgtttggggccaaatgttgttcaaaaaaatggaactggaaatatggttaccatggctttagaaggcatcagtcaaaccgaaaattatttacaattgattttgacaaaaatgatgaatatgatgattattccttggattattttggcctttgtttttacacaagatattcgttcaggcataacattgctgattgtttttccgattattattatttttatgattgtgttaggctatgcagcacaaagtaaagcggacaagcaatatgcggcgtttcaaatgctttccaatcattttattgattccttgcgaggaattgacacgctgaaactgtttgggttgagcaaaaaatatgctgggagtatttaccatacaagtgaacgattcagaaaagcgaccatgagtacattgaaaattgctattttatcaacctttgcgttagacttttttacgacattatcggtagctgttgtggcagttttccttggattaagtttattaaacggcacgattttattatttcctgccttggttactttaattttagcacctgagttctttttaccgattcgtgatttttcaagtgattatcacgcaaccttagatggaaaaaactcttttcaagcgatccaagcggtattagcattgccagaagcagaacagaccgatgtgctcacgttagatgattggcatcaagaaagtcagttgtcagtcacagcgttaaatttttcctatgaagatgcaacgcaagaagcgattcaatcgttgcaattctctgttgatggtcgcaaaaagattggaattatcggggcgagtggttctggtaagtcaacgttaattaatttattaagcggctttttattaccaacagaagaaacgagtcaattggcgataaatggccaaacgattccacattttttacaaaaagactggcaaaaacaaatcctttatattccgcaagcaccatatattttccaagatactttggcaaacaatattcgcttttatacacctgaagcaacagatgaggcgattcagcaagcgattcagttagttggcttagacgagctggttaaagaccttcccgaaggaattcataccttgattggggaaagtggtcgaatgttaagtgggggacaagcgcaacgagtagcgttggcccgcgcctttgtcgatcaaaaacgccacgtcttgctgtttgatgagccgacagcgcatttggatattgaaacagaagttgaaatgaaagagcgcatgttgccattaatgaacaatcatcttgtcttttttgcgacacatcgtctgcattggatggaagaaatggattacattttagtgatggaaaaaggtcaattagtggaacaaggaacgctagcagagttgattgaaaaagatggctactatgttcaattaatgaagcaaatgagaggaggacgccaatgatggaaaaacagccgacaacgaaagacgtttggaaaaacgatcaatgggttcgtcctttcttaaaacgctataaaaaaaccttgtattttgccttacttttaggcttcttgacgttctttagcgcaggggcattaatgtttacgtctggttacttaatcagtcgtgcggcttccttaccagagaatattttattaatttatattcccattgttttaacaagagcattcgggattggacgtcctgtttttcgttatgtggagcgtctaacgagtcataactgggtgttaaaaatgacctctgatctgcgcttgaaactttataatgtactagaaaaagatgcgattttctttaagacaaaatatcgcactggggatatcttaggtttgctttcggaggatattaatcatatccaaaacttgtatttacgaacgattttcccaaccgttattgcttggattttgtatatctttttagtgattgcattaggtttcttttcttggtggtttgctttatgcatgttactgatgttaggagtggttgtttttctattaccacttgtttcagttctagtgaatggtgcgcgtcaagaaaaacataaatatgccaaaaatgagttatatcaaacactaaccgacaatattctaggtgtgtctgattgggtatttagtcaacgaggctctgaattcgttgctcgttatgaaacagatgaagcaaacgttcgtgcattagatgaaaaaatgaagcaatttaaccgtggccgagactttgttttacaacttctgtttggtgtgattgcgattgctgtcttagcttggacaagtgtgcggtttccaggtaatcatgggggcgcagccaattggattggtgcctttgttttaaccgtttttccgttaattgatgcctttgctccgctacctgctgcagcacaggaaacaacgatttataaggattccattcgtcgttttaatgagcttcctgaaggggaagatgactcaacagaagcgcctgttcagccaaatggcaccggtttatcgatagaacatttgtcttttgcatatgaaaatcaagcgaaaaaggtattaaatgacttatcgttaacaattcctgaaaaacaaamattagcgattttagggcgcagtggttccggaaagagtacgttggcttcgctcattcgtggtgatttacggcctacttcgggagaaatccttttaggaaatatcccaactgaggcatttggtgagacgatgactgaatatattggggttatgcatcaagcaccgtacctatttcgaacaaccattttaaataatattcggattggtagagaagaagcaagcgaacagaagtttgggcggttttagaaaaagttggcttaaaagaaatggttgcccaattaccagaaggtttacaaacaatggtggatgaagcaggtttgcgtttttctggtggcgaacgacatcgcttggcgctagcgcggattcttttgcaagatacaccgattgtgttattagacgamccaactactggtttagatccaattacagaacagcaattgctggaaaccttttttgaggcattaaaagataaaaccgtcatctggattacccaccatttgcaaggcgtaactttgatggatcaagtgatctttattgaagatggccaattagagatgagtggtacgccagaagaattacttgcaaccaatgcgcattatcagaaactttaccgaattgatcgtggcattagttctttcgaggaataaaaaaacgactggttgttgattaaagcaaacaatcagtcgtttttctatttcaattaatggcaattcttctataaaacgtttaaaatgaacgatgtaataagagctcagttaaggaaagtaaggtttcttttgctgtgccatcaggcaattgttgaatatcagtgattgctttgttggytacttttttagcaaaagcttgtgcttctgtaacgccatgatagtcattgactagcgccgcaacttcagctgcctcttctaaggtaatggcgcgtcctttatccaaataagggctgaatacgtcaggtgctgcttgataagcgaagagaagaggtaacgtataaacaccttgtgacaagtcttctaaagcgggctttttcaaggtttccgtgtcggcagtataatctaaaatatcgtcatagacttgaaaagcaatgccaatatgacggccaattcgtttagctaaacgttggacttcttttgaactatgaccgaaataggccccttcaagacagcttagtgaaaaaagttcggctgttttgccgttgacacttcttaaataagcaggaatcgacatgcggcggtcaaatcgatgactcatttgatcgagttcaccaagtaataaccgtttcattccttgtgcattgattttcataaattcagagccattcatggcatctgcaatcaaagtaaagaattcagtgaatagtaaatcacctgtgtaaacagccacgtctttaccatattgtgattgaatagtcacagcgcctcggcgcaatggagaatcgtcaataatgtcatcgtgaatcaacgtagccatatgtaggatttccaaagatgcagctatttttaatagttgttgtttctcttgtttttcttcatcacccagttgagcaaaaagaaagaaaaaagcggggcgtaataatttgccgccagaacgagccaaagttactaaggcttcttcaatgtcttcgttgcgtgtatgcaacgtttgttcaattaattcacatgtttccgttaaagaacgttcaacgtcaggaaacgacttccaaaatgtgttcataaatatactacgatcctttcagtggttcaatactatttgattgtatacgaattggcgacagaaatacagtaattaagttttaaaagtaacaaagtttgtaaaaaagtagcggagggatagtttgaatcgagaaatattttttgaattagtagaattaaaagcaaaaacagctagtgttttgccatttttgttaggaattkgttttagttggtaccaatatgggcggcttcatgttggttatgttttaatttttttcattgcgatgtttatttttaatatggcggtcgatattntagataattataatgattaccatcatgccacagaagttcatgattataagggaaaaaacggaatattatcggtcgagaaaatttatctttgccattaatacgcaaaatgatnttttgggatgatcccggtttctgctttaatggggattggggttgccattnaa

SEQ ID NO: 198 - DNA, 1521 bp; double-stranded, linear
gctcgcttccaatagaatatttaaaaaaatttaaaaagtctacataattccaaacaagattaccctttcattttacacgtgataaaatatttttgcaagaattgtcctcattctgaagcaaaaaaattctcttctctcaaactaatgtatccgctatcaccaagaataatatgatccaacaattgaatccccatcatttcgccacattcttccattcgtttggtaaattggatatcttgtggagacggtgtcggattgccagatggatgattatgagctaatagtatgcgagcagaagaatatttaaccgcttcccgaaaaatttcgcgtggatgagcaatactttgattcagtgatcctttgaaaatcgttttctgttggataatgtcattcttggtattcaagtaaatacaaattaaatgttcttgttgcagccccttcatctcttggagtaatcgttgagcgacttgttgactggatgtaactttgccaaatttgatttgactactttgataaattcgacaccctaattcaatggccgcacgtaattcaatggctttcacttggccaatgcctttaatagccattaactcgttcaacgtggcttgctgcaaataagaaagttgcttaaactgttttaacagcgttgcggcaacagtcatcacgtctgcttcttttgagccagtacgtaacagaatcgccaacaactcttgattcgataatgctttttctcctatcgccaagagccgttctcgtggtaaacaatcactcggcatctcgcgaataaacagatccgatacttgcataaaaaaacctcctttgctagtcattaataaactacgcaaaggagtgttgtttttattattttaaataatgtggcgcttgatgtaaactctccaagacatgtaatgttttctcttggataacttcagttggttgcaataaatcaggtaccatgatcactggaatgcccgcactatgagccgcacttaccccatgaaatgagtcttcgaaaatcaaggttttcggggcttctgttcctaaaagttgacgagctttttgaaaaatttctgggtccggttttgctcgtttaacatcctctgctgaaacaatacctacaaaacgatcctgaattccagcatggcttaataacatttcaattgctggacggacgttacttgaagcaactaatcgaggaattttttgatcatctaaaaagtcgaggaattccaccacccctggttttaaagggacgttaccagatcgaaactcttgcaaggtatcatcataagaacggcggataaattcttccactgtgtcatgaccataggatgcataaatacgtcggtaattctcttgtacttcttcatcggaaatcccaacatagtctaaatagacttctttactatatggtaaccccattgcatctgctactttttgagtagatgtatagtaaatcaactccgtatcaaaaagcaacccatccatatcaaaaattacgccancaattnctncatcatt

SEQ ID NO: 199 - DNA, 5738 bp; double-stranded, linear
tcacctaacttattacaaagaaataatagtcttttaagtaactctttgtcaagacataagcagaagtcaaaacagttctatttacaaatgaatgcgacgaaccatttcttctgttatttgttctacaatatcaatggttgtttttggcgaacgttgatttctggggatatcgattgagtaaattttggcaatacgaccaggatttgcatccattaatacaacccgatcagaaagttgaactgcttgttgaacatcatgcgtgatcatcacaattgatttagtcgcaatttgattgtttagccaaatttctaataaatcgttagataattggctggctgtaatgatatctaaagctgaaaaaggttcgtctaagagcaataagctaggttcgatggctaaagcacgagcaaagcctacacgctgtttcattccaccagataactctctaggataagctttttcaaaaccagttaaaccaatcatttcaatgagattactgactcttttatttatttgttcacgggaaatttctttacggttttctaagccaaagctgatatttttttcaactgtcaaccaaggaaaaagggcaaaatgttgaaaaaccatgccgatattggcatcaggctcattaatgattttatcttcaaaagtaatttcacctctagttgtacgaagaagtccagcaatacttctgagcaacgttgattttcctgttcctgattgtccgataatacttaaaaattcattcgttttaactgttaaatcaatattttcaaggacttttaaatgttctgaatgtccttcaatttcaaattctttatatactgattttatgcttaataattctttattttccatcgtcttattagataggtcaagggaaatcacctatcgttctcctctctagtttatcttaaaaatttagtcgagttgagtcgtccagctattaatagtgaaatttttgttttgctgctcgatataaaggttgccaaacaaaggcgatacataaaccaacaacgaaacacatcgctaaggttcctaaggcagatttatcttttacaccatcgtttgccgcaatatattgtcctaggccagtaacatctattgattttttgccccattgaatgctttctgctgcgatatcagcgttccaagcagcaccagcagcgttaataattgctgtaatgaggtaaggtaaaatagaagggatcaaaaattttgtccaccattgccatttagataatttaaaaagtttggtcacgtcacgaatatcatcagggatggctaagtagccagcaattacattaaagaaaaaataccattggcaaccaaccatgatgagtggtaaaatccaccattctaatttgttgaagcccatactaataatcaacacaatgaatggagtataaacatttgacggaatggagcctaaaatttgtccaatcggttgaacgatacttaagcgccgattatcattcgcaacccagattgctaagggagtaaagataatgccagcaacgaccatagccaaggtaacccgtagcgtagtataaagggttaatctaggaatcatgctgaaatcttgatggggcaagaaatgatagagcttaatagaacaataaaccccaataatggttaagctgacataccataatgttttgaagaaatggcgtaattttgctagtaatcgatagagatagtctagcttgaaaaagtaccaaacttttggtaaatcgtaaatccaaaaatgactgaatttcacaaaagcttttgaaaagtatttcgttaaagttgctttttttaataaatgataaatgatggatttaggtggcgttgtactttcgacatctgtttcatatttaaaataataagtggctcgaactaaaggttgaaaaactaaaaagtttaaaatcaccacattgattaataaggcaaaaacagcccataaacaggatttaaagtcggctcgatttaatgctacttggatataagaaccaattcctggtaaataaaggttggtttctttaggaaaggcaacagaagcttgctcgctggccaccaaggcaaaccaagccgcagtttgagaaataataacgttccaaagtaagccaggaattgagtaaacaaattcaagccgccaaaatttttcccaagcattgtacttgaactgatcggtcacattgactagatctgaaggaataacttccattatttgataaagagtcaacatgatgttccaagcttgacctgtgaagatggcaaaaatagcaaccgcttctgcgcccatcacatttcctggaaataaaccaagtaaccaagcagttgtaaaggtcaaaaaacctagcaatggaacagattcaaggaaattaactaatggtaaaatgactcttcgtgccgttttatattttacggctaaaataccaaaaacaaaggaaaacaggaaggaccaagccatacccacaatcattcgaaacatggttcgaattgaaaagtaaaaaagatttgatggagataagaaatcatctgttttacttggtgttgcgaggaattcttctgagggaagggtgtggagagggcgattcatttttagccaagagaagacgatgataaaaatgaaaatgcctaaaatgatgagcaaggtaagatttccgatacttttagcaagtagggtatttttcttagatgatgcagtgacagctttcaatttaaaaacctccaattaatcatattaaagaggtcgccgaataaaagaagaagattatagggtaatcacaataattgagctttggctttctgagacgtaagaaaaaaattctagttatcttaggaaagccttaattcgacaatccctgctttactcgttactgtctctcgacatttccgagcgataacctgtgttcttcagagtaacctcacctaatatgattctatttgatttacatgcttatcatactcgtgactaaaaataaaacaatttctagctggttatacctgaattactgtttgttgttattctattcaatgattcttaaaaagattgcccacattctgtttttttagggagaaattatcagatgagtatgttatgtaacgcaaggtgaatagtataggatgttgtatttttagtttgtctcgtttactgttaaagatgtaagtagtaactataagtgaatggctaaaaaaattaaaagtaatctagcacctaaattaaacaacaaagaaatttgttcagaagaaaggaaattatgatgattatttggttaaacggtgcgtttggagccggaaaaacgaccattgcacatgagttacaacaaaaacttcccaatgcaatcatttatgatccagaaattattggtagtgcattgatggagttagttcccgaagaaatgaaagaaaatgattttcaggagtatcaggaatggcgttgctggaatgctcatttattaaaacgaatgtccaaagagtctggacggccgattattgttccaatgaccctttataaaaatgaatatgaagaagagctgattggatatctgagacgagcaggcattgacgtttatcattttttgttagcggtcgagaaagaagaaattttacagagattattgaaaagaaatgatggaacttttgaatgggggaaaaataagttgcccgaagtacttgaaggttttcgtcagattcagtttaccgagatttttagaaatcattcagctgacacgacagaaattgtagcaaccattcttaatagaataaccgaataaaaataaaataagggacctaagccgaaatgacttaggtctcttattttctacttcttaagataatcaactaccagctactctgatttcttcaaactttaagaccgcacatttacgacaatctatttttacactgtcaaaattttctttcaagtcttgcattttgttatttttagcagtatattttaggtgtacctaaaatatattagaggttaaccttctaacaggaagggccttttaaaattattgcaaaacgaaagaaggaattgaattgaaaaattcagaagaacatgaaccaaagcaaagacatcatttgattgaatatgcaaatggtccttcgcttgaagaaattaatggcaccatcgacgtgcctaaaaatatgagtttttggaaaacgttatttgcttactcaggtccaggagcattggtagcagtggggtatatggatccaggaaactggtctacttcaattactgggggacaaaattttcaatatttattgatgtcgattattttaatttccagtttgattgcaatgttgctccaatatatggctgctaaattaggcattgtttcacagatggatttagcacaagcgattcgtgctagaactagtaagacgttaggtattgtattatggattttaacagagttagcaattatggctacagatatcgctgaagttatcgggggcgcaattgccttatatttattatttcatattcctttaggtctggctgtcttcattacggtatttgatgttttacttttgttgttattgacaaaaattggttttagaaaaattgaagctattgttgttgctttaattgttgttatttttgtgatttttgcttatcaagtggcattgtcaaatccagtatggggagatgtaattaaagggctggttcctagcgcagaagctttttctacatcacatgcggtgaatgggcaaacgccactgacaggtgcattggggattattggtgcaacagtgatgcctcataatttgtatttacattcttctgttgtgcaaagtcgtaaaattgatcgtaaagataaaaccgatattcaacgcgctttacgcttttcaacttgggattctaatattcaattaacgatggcattttttgttaactctttattattgattatgggtgtggccgtttttaaatccggcagtgtcaaagatccttcattctttggtttgtttgatgctttatcaaatccagcggttatgagtaattctattttagcgcatattgcaggttctggaattttatcaattttatttgcggtagccttattggcatcaggacaaaattcaacaattacaggaacgttaactggtcaaatcattatggaagggtttattcatatgcgcgtaccaatttggttacgtcggatggtcacacgtttgttatctgttattcctgtcttaatctgtgttttaatgaccagcggaaaaagtacagtggaggagcatattgcgattaataatttaatgaacaattcacaagtttttctagcatttgctttgccattttcgatgttgcctttactgatgtttacagatagccgtgttgaaatgggtgaacattttaaaaactcgtggttaattaaattgttaggctgggtttctgtcattggcttaatttacctcaatatgaaaggtttacctgatcaaattgaaggattcttcggtgataatccgacagcgagtcaaattacgttagccgataatattgcctatgtcatcatagcactcgtcatcctcttgttagtttggacggttgtggaattatataaaggcgataaacgatatgcacagcagcttgcagctatggagcaacaagtagaggaggttaaataatgaaattttcaaaaattatggnttggtgttgaagagtcgccagatgcgttaaaagcatttccattatggctatcccaaaagcaaaagaagaacaagctggattgggg

SEQ ID NO: 200 - DNA, 13865 bp; double-stranded, linear
aagccatcagctgtttgnttacatggtgaattttgagacaagttaattgtaaaagtccctaaattatcgttgttcttcgcagcactagattgtccttgggcatctgtttgtacttcaatatacgaattatcttttgaaaaagataccatatcgccatcttgaaagccgaattggacgacattgtcaataatagtagatacttctttggcatcataagttgtcatgctttgcattagttagttccccctttagacttcaattgttccagtaacatcaacagtgtgaattgctccagaacgtttgtatttaaatgataatcctttatagtttcgtgctgcaatatcatctggatttaaatcttgacgtcccaaagcagtcacactataatttccaacaccagtttcatctacaatatctacaattccgttattaaatgcagtttccaaaacatttgcaacagttgtatccaataaagcaatcccattagaatcaaaagttaatttatctgtcgttgataacaagcgctgaacattcgtttcaatgtttgatttaacccagtgatccccatgcagggcatcgataaattcgccactcattgtttttccttctgatgtttgggggattcccgcttttgatacataagcaatagcattagctttctcaatcgcttgtagttgagaggtagttaatgtgttaggtgtaatccctactaaattatgtcggaatttccaagtaacacttccgactgttaagcttgcagtattaccaattaatgcagcatctaaaaattcttctaacggatgaaccaagccgatagttagattgttccctgtaaaaactgttaattcgtcaactgtagctgtctgaattactaaaaacttaaattcgttttcttcaattaaatttgatagtgccaaagcatctgcctcaacaaagttggctaataatgcaaaatgccaatcattataaaagtaacttgtagctgcggcgataattccacttccagcaattaagctatctggctgttctggactagtaggggtatctgctacaaaagttactactggcaatagtttgtggtttattttcctgtttccaaattatttctgcttttttataaacagtagttgttgtagcaaaatcttttgctaatgtttctaaacttgtatattctttatagttttgagtagatccttgaacaaaaattgctggatttcctaatccaacaatgggttgtggatgcattatgtcaatttttacattaacatctgtaattttttcaatcatttgttttcctcctgtatgtctatattttctataatcacagcattgtcaacgtagctgtcttgtactctaaaacgagcatcaaagccagccagacgttcataatcaatactaatgaaattatctcgtttttgagattgtgttgttgaaactaaggctattttagagttttgaaggtctacttttacagaaaaaccgtttaaatgctttcttaactgctctgacaaattaagtgcctgaatactagaatctgtatgacatttaatagacactactaattcaaatacttcattatcagtgacatctatagtcactggaatatatggcgagatgacctcataagaaaaaaacggtttatctggctgtggaccagctgtgctactttcaataagttgaagtccagttgatttcttaacaattgctattagctcatcagctaaaagctcataactaaaagccccattaatttgcggcattattggtcaccgcctttaatctgtaaaggttcacatctgcatagtgttccgcatatggctcttcgctttctactttgtactcttttcccatgtcaataattttagaacctaaaggaatcgatccaacgtaagcaagttgcctgtcgctagatgtgagtgttccaccactttgataaatcgtccgattgtcgtatgggataatcgccccagaaacggttttgggttcttcgttagtaggaaaccattcgccgtgaatgtatttaccagcaccttcaactgaaggtaacactaactgaaagtcaaccgcaaaagtttctataagactagaaaagttcattctttgcattaccctttcaccaccttataagtcactgactgtcttaattttcctgtgtcaattaatggattacttgacttcttattattgactgttattggagaatttggcggatcagataaatttctgatagttcgttgaatatccctttgcatacgagcaccaactttatttgtcaattcttctgctgtcatttttccagcaataagttttttcacaaggtttaaggcgtaatccgaccaagcctttgcttgctcgtcaaatgtagatctaataaaggaacgttctggaatagttatttgctccgctaacatgtatgcgaattctaactgatctttacctttatttcttactaaaaacttgtgattttctttagtttgcataaaaaacaaatcaaattgacgtgggcttttacctctatactttttcataagtggtataacaagaaaacgacctttgggacgaatagtcacaccaaattcatgaacttgggccaacatcgcaataaaagaatcatcttccccaaatattcctatctgcaaagaatatttattaagctgatttagttcatcaatcagcttaataatcctgttattctcagtaactttcatcaaatcacaaccaaactcaatgaacctttttttgcgtattcgttgtaaagacgtaaatactcttgaccataaacggttcttttaaggtcggtaaaagttgagtgaaaacccgaatactctttttttagcgagcctacttgctcggatttagtattttggttgttcaaaacggctagatggcaagcgagatagcgacacgctttctccttaacctcttctttaaatggcaatgcatctacttctagccaagcatcatcaataaacaacttaatagaatcattgttaacccctactagttctgcagctgttaacctaacattttcaactgtgctttttggcatagtaccacttcctattctggattaactacgctgtcttcatcagggtttttaatatcatcaatttgattttcgattgctttgactacagttgtgcgatttttgtttgcttgctcttcttccaaccatttttccaacaattctaaatcgaacgtatcagcaatggattctactgctttattggcactcaattcagtaaaaccaactgctttttttgattttccttttgttatatggtccaaaatctcaatttctcctaatctttccaacgatttatttaatggtaattccatacctttaataaattcttcagcatctgaattatctaaatcatttacacctggaattaatcgaacatttccaatatgtctaatatatgaacctttattgtgtwctaacataatctttacctccttatttttaaataccatccacacgaacaattgcatatggcgttctaattaacgcaccaccacaacgttctacaaatggtactttccaatttggaaaagaccattcaacctctaaacgcacgatgtcttctggaagtaaaatttcacaagttgatggttttgtatccatgataataaatgaatcagaattatcagtacctacaccttttaaatcataaacttgctcaatagatgaaaaccagccattttcctgaacaactttcataattgatcgggcatcatattcaccataacgacgattcaattcttcatattgttctggagcaaccattaattttagactagatcctttaaatcctggaataatagtaattttagctcgagatgtacgtaattgttcaacaatctcttcactagtcatttctttccacttcttaggtgaattaataacttgaataccttcagcattcgcaacacctttatggtttactttaggatctcccacaaaaataaagctattttctttttcagcaatagtacgtcgtgccacttctgcttttgttgcatcaattgaagttcccatcatttgagcttgacgaatttcttgtcgactataacgaataccagcagcaattgtaaaaattggtgattgataacgttcatatcaatgkcaactaaaggaagatcatctgcaccatttgcgataatttttgcagcgccacttctagtcataacattatatgcgtatgtttccgctcctggattgatatctgttttaacattaaacatggttcgcgccacaagttcctcctgtggtgcttgataaatgaccttatcaatttcttgtaggtcacgtgcttctaaagttgctgttacatcatttcccatttagttgtcctcctagttttttaaggtaagttaatttgtaaaactgctaaattaccagctgatgctgttgttttaaatgtaccaatcacggtatctgatggtgtcgtagctggatcagaactaatagttgcttttccaaaatttccagttgataaagcttttgcattttcacctgctaaaacatcttcgtcaactttcacccaaatagcccctttacgtaagatcggtaccatttcgtgttctttatacttaccaactttttccacatctccgtaagggatttcttctacataatttttagcatatgaaataccataaaattgcccatctttatatgtggtagcaacgtcttctgttacttgaacgccgacaccgaaacytaagccaccgacaccaacgacaagactatctgcttgtacaccttgataattagctaatttcccaataccaagttcaggcttcatatacttttctggataaggaatagtcatagttatttatcctcctttttgttcatgttcaaacggttatttttttgtttttcaatatcttccgccgcttctttatctttatcttttgcatcgttgaacgctgctggatttgtaaatccttttttctccacatttgcaactgctgaatcaaagtatgctgcaatataatcgtcagattttccatcacctttaaagtcaggtgatgttttggcaattactgattctttaatttcacgatcagatttgccagtgaaatcaactgaatcaccaagaaacttttgtgctttattaattagatcaacacgatcttgaacacgcttatccaaagcatctgcagttacttcttttttctttgcttcgtcaattyccttattcaacttatcaatttgagcttttaaagcatctcgctcaccttctaatttctcaacgtttgctttacgttgttcggctgcatctaattttgcttctaaagattcaaattttgcttttacaattgaatccacttcaaattcctttgaatcaataattaatttagacattccatttcctcctgtttgtttatctttagtatcaatcatgaaagcgactgaatctccccgaatagcaacttcgggaccagctctcccctcatctactatagcaatatgattaatttgcatattcctttgcacagaatcatattgcatgccattatacacgccagtttcttttgaaacatctgcttgaaaaccgatgctcagttcacgttttccatcgttaattttctttatkgtctctgcatctgtaattgtgaacgaaaccaatagcttattatctaaaacgtgagcatcattatgagtcatgccttttgaatatttattgtaattagctgctgttactggttcggtcggatgatcatcagtcattggcttagcatttgctgaaagtacagttgccttagaaaataattcatcaggcaattttgcctccattgataatccaccatcagttcggcggtaagggaaaacacctggtcgtgtaattggacaagctgtgattgtcaaataaccttcatcagtttctttaaaatccttaataaaggctttgtcatatctaattaccatgtcttcaccccattattcgactaataagcgaatgccttcggttacttgattactcgattctaactcattaagatccagtaattttcgtaggctcatatgatagcgtgtcgcaatttcactagcagtttctccctcagaaacagtatgaatcgttttctgcgtagtttttgacaactcttttttgttttcttctttactagaagctttttyctctttagccattttgatcacctccttcagktacatcaaacctgatatttctccactttttataagcatcgaaatatagttcatttttatcaccgttgaaggtaaytcgtaatacataccatcaaatagattggtacttaataatgctttattattttgcagggttttcgctaaccagaccacgtaaatatcagactcgcttatttttttttgatctgtgtaatccaattgactgttagcaaaatcaactacatgctttttacataaatcaataaatttttgactatccattaatgtccctcctgttttttgagtataaaaaatagccccaacctataaggtcggtgctactcttctttttcttttaaagattttttcaattgctgcataaaatctttatctttctttttcgatgtatctatttccttttttgtcatttcatctgggtaacctagactttttgatttgggaacgtcttcccatctacgtttgtttttctcatttttattcatggtactcctccagtactataaatggttttccatccaataaatatctgtctttaacaataaacttggcatcacgattaaacagaacttctttttccgacttgttgtaagaacctaaatcttttccagttgagctcattataacaaatcttaacgagtcttgctctgagtaaatgtcttttgtagtcgaaatgtattcaggaaattsaacaacatcatttaaattgtagttgttagcaaacctcactaggtcatcactgctatcaaaaaacatggaacgtgttacttcaccatcatagttggtcattttgcctaacgctttgtctaaattgtctatcaatttcaagtcgctttcatctaactgataaccatttctgagcttatcgtttaatttgtaagcttcagagctaacatatgtcttgaccgcatgctcttcttgattagaaaggccaagatcaatgctttcttcaagcaattcttcatcgtcgactggttcagcaacacagcgacaattatattcttcgcctggtaataatggattatcagcataaaagtaaatcttcccgttacgttctcgatgagaatccctaactcgttcatctccactatcactccatctaaaagcttgaaatcccgctcgtttttggcgttcactattcatctgacctaaaatagtacctgtctgatcacgagcaataaacgctgctttgtctgatgacataccagcttgatgaacaagctcttctcttatctcgtttgaagatttgccttctgtgattccgcgataaataacctgttcaaacttttttgagtaatcatcacgaatattagtgacataactgatgttttccgctattttagcttgaacatagctgtctaaccatttttcagtctgtagtgggtttattcctctagcgctaagttgagagttcacattagacttgttaaatgcgttgacactattaatatgcttacgaactattttttgtgcggttctgttttgaagaatacctaaaaagtatgtttgcgcatttctgattagtttcgatgcggcatcgaataatccatcattaattaagttggaatcattaacaatatttttatcatctatcatcggtgctagatacttatcaaattcatataatgaaactttttctatttcttttacggccttctgaatgtttttagcatagctttcttctaaacgtaacggatatctcgtttttggattatttttcattatctctgtcctgtttgtaattttcataaactacagcagccatcttatctaactcatccctggacaagctatccgcgttaaatttagaggtttctgttatgccaaaacgaccaaagcgagcttcgtgaacatcatcaggatcagatacacctgcctcaatgtaaatcttatctgtttcagcagtgagttttctaatctctgcatctgtcttgctatcaacgttccataacggattgaattcaacggaccattcgattgaatcagggtcaagtcgaccaccacattcgtcctctgcccacattagacaccgcatgagatattcaaggtgtggccttagctgattttcttgtatagcagttatacgagaatagtagttcatgacatcatattgtgctccagtaacagttccgccctcttgcccttttaaaacagtcttaggcattcgagcagcgcctgctaaataatcccaaacaaagtctaaaagttcaccgatacctgctaccgaagaactctctttmccaagactttcytccttgtctatgatagcaattgcttctgttctgaattgataatccaycttagtttcaatttctagtttgtcttgtggtgtaagacttctaacatctgctgacttgtatactttaaaaataaaatcatacagaatttgtccgactgaccaaacagatgtgtcagctacagttaagatatcataaagattctctaataaagatgatccttctaattcatcttcaaatctcaaattttgttgatgtaaaactcgtgacctatgaattgttgtagctctgctgtaagtcgtattatttagaaggtgtatgcgactgttgtttgatctattattgacttcaaaagattcaatctgtccatagtttggactaaaaacatcttcatcaattattctattactaatctttttgcctgaaaatgcattaatatacggaacacttttaatattctcaaagtctaatggctcacttagagagtactctcttttctctattgttccaatacttacgaatccatctccatataatcgttcatacgtgaataattgttgtaatcgttccttagctttcagttgtctcagcttactttcgtacagagcttttactttatcatcttgcattttgagactccacccatttctagttaagtcttctgctggaatgtctacgatatttttcgccatcgagttagacgagtaaagcgactctaattgtgagcatgacaatctcttgctcgttcctggtctttgtctagataagttgtctctagcgtggcctttgccatttccaagcataaaatcatttcgatatgctttaccatccagctttaataacttagcttcgtttgctatattccccatttattcaccgcctttcaattttttaattgtcgagatacctttctcttaaacttactttgccaatcattttgttaagaatttgagtcatgctgtcaacgtcgtcatcatgttcagcatttgggaatgctactagttcgttaatgaaatcatctacccaaggacaaactaatgggtgcggaagatagacattaccagcttcccatataggagcaacagcgtttgcccgtacctctttgccgccttctggatttactgcaatgataccgctcaattcatttttaagcatttcaattaccgccgtcccattagctttatcttcaatgtaaataccgcgagcttttggccacttagcagccatggcatcaattgctttcatcgtctcaactatgcccatacgctcatgatgacggtctaataaataaaaatcggctctcttcttgccccatacctgaccagatacatagtcagatgtttcggtgtctttgaaagtacagtcccaagactgagcttgtctatcaaaaagacgtggtaaaataaccacgtcatcgcctaaacttaattcaatttttttggataatgttggcacatagaacttaatccatgaacgtttgaaaatgttaccacctgctggcgtcggtcgttgttggtacaaagcagcccaaccacgagaaccagtaactgcttttgttttagcagcccactcctcatctttcccaatttcaggtgctaacgcttctcctggttttcttcctagtaagtcgtcatcttcggctatagctggtattttaatttcttcccaaggcagtgtttgttcttttaacagacgacctgctaaatcatcctcatgccatctagtcatgattacaatgacactggcatccgccgttaaacgagaatagaaagtgtcttgccactcattatatattttatcgcgaattgttttagattcagcttctgctctattttttatcggatcatcgataattaaaagccttgctccacgtcctgttgcaccacctaaaatagaagtactgtaaagcgagcctagatgaccttcaactccccattcactaacagatgaagtttcagaacttatttgtaagccgaataattggtccgaaaacaagcggaacttttcgcggttctttctaccaaacttttggaataattcttttgaataagaaacaaccatcaccagactatctggatgcctcattaaataataagctggaaatgtctctgtaattacagtagatttaccgtgttggggaggtatttcaataatataatacttttgctccccatcaattattttttgaagtcgatctgtaatgtatttctgatgtcttaataaatcccattgtttaccatgtgacaaatagaagaaatctccataatttcgtctagctagttcttccaatgcagcgttagctaatgcatcaagttgctcttggtccatttgctaatcgcctcaattcttcttccgacaaattcgcaagcggattaacatccacttttccgctatgctgtatctggtcaattgctttaaagccacctcggtctaaaatgtcttggaaaatagatttctttagactctgtaatttttcccattccttggcatcaagataacgagattgatgctttgacaattcatttagtaacacaactctttcaagattcagttcaaaatattctttttttatggagtcaatctgctctaaaagacttcttttgtggnttcgcatttctttctttcgaccatcaatagcatctgctgccttttgtactttttctaagtcgttattagccttaagcatttcgagctctaaatcgctaagttcagactttattttatcaattgctatctcagcttcgttgtgatcttgtattttcccttcagtttgcattgctatatctaacagcattgaaaaactacgcaatccctcgtccttcatacgatcgcgtagtcttttcatttccaattgaattttttctttaatgtaagcatttgttaatagcttgtgtccttgttgtctagctgtcttttgagaataacccactttaattgctgattgtgttgcattaaaagtttgcagataacagtcaacaaacaagtcatatctctcttttgttttatttgatggctctttttcacttcttgccattgaccgcacctcccctaacttctaagtattttatcagcttcaataagagtttttagatcactaactgaagttagtttgatttcgccatttttaagattttttaaccattgggccatcgtggctcttatgatttttcggtattgttcataatcttcggcatcttcaaactctttctctaattccaaatctaaaatatcaattttttcatgttcttcttttgttcccattgttaaaacaccccgcatttgataaaatgctaaaagacacagagggtgtcgaaaatccacgcgtgggaattctctgtgtcttcggggtgttttttgcgtcctgaggaattagtcgagtgttagctgcactcggcttttttaatttattctacaagttctgcaatgattcctgttgatttttcaaagcgttctatgattacatcacagaagagtggatctaattcaagcgtataacagatacgatttaactgttcacaagtcattaatgtacttcctgaaccaccaaatagatctaaaacaatatcttgtcttttagagctatttctaactggtatcgcaataagtgataacggcttttgtgtaggatgatagtacgttgctacatcatctcttggtactttccaaatagtagctggtaaatcttctaatagatcatcttgccaaattgtagtttgctttctgtctccgtaccacgaaggtgcctgtttcttcttgtgggcataaaaaactggttcatgttgccatctgtactggctccaaccaaacgtagcattattttttacccatatacattgtgaacggacaactataccagcagcattcatactattttcaaattcacgttgataagatgatccgtgaaacacataaatcgctgagtcatctctcattgcgttagaatagttttgaaatactgacatcaagaantggtcgaactcttcatcactccatgtcatcgttcataatttttttcccgaccagattcgtttaattctttattgtcagattttactgctacattataaggtggatcagtcacaactagatttgctttttytcctkgtaataacttttcaacatccgaaagctttgtcgcgtcgccacacaatagataatgattaccaagtttccataattggcccaatttagttttagcttcatgatgattttctatgaactcattaacttgaaaatcatcttcaataatcggtttctcaatatcttcttcataattgaaagaagcgagcargctatctacttcctcagtatcaaamccagtcagattaacagcttcatcatctaattcatttaataaaatagagagtttttcttcatccccaccgaccagaaatcttattaagagccacgttgagcgctttttctttatcaagaggtaaatctaccacggatacctctatttcattgaacaagcccagttctttggcaacagcgacacgctgatgtccaccaactagattgcctgtttgaatattgtaaataggcggatctacaaatccaaattctaggatagattgttttaacttctcatactcttgcattcctggttttaaatcaactcttggattgtagtcagctgctttcagatcagataatttcattttttctatttgcatgttttttctcctttaaacaaataaaaaagcctaattaggcttttttagataatagtcaataagtattcttgttcaagacagttttttatttcaatcgcagctatttctgcttctttatatctttttaataattcttgatactcatctatagccagctccgtatatgctttagggttaatagataaaatataagtattttcttgattcggcatattaacaaaattaatcgataccgaatcattattttctaaaattacgttaatttcttgttcgttaatcactactgtataattctcatttccaaattgtttcatcttattccctccaaaaatgtaataacccctcatctaggtgtgtctatataaccatactattagctacttgtacagtcatcatagaacatttatcaacttaattatggtatatgtgatttgaaattattctgaatgtgataatccttaaaaaagccatatccaatgtaaattaaatctagctttctagacatttttttactaacaggtcgtatacattcaacaattgsaaagtcacgatttaattttacttctcgagttatttttggkgggtaatttttacttaaacttatgtwccagtaattcataatgtatcccctatttaaatttgtgtggaacgcctagccgaatccacackgaataacaatactaggttgctcgccttttcctgtttccgcaggcaggcactttgaaaggaaggagtgaaaatcgtgtgtcacagtagtagaaacatttattgaca

SEQ ID NO: 201 - DNA, 5154 bp; double-stranded, linear
ggtatctaacgcccaacctgtaatggttaaaattattggtggtttggtcgcggatngatactatccaaggatccacnttaatgtcttcattcagngcattctccttaagatgtttcggatttcggtagggatccaactaaaagcttccgcggcccatttttccgcaagtctttataagatccttttttatcatggttttgcattttttcgtctgctttcaaaattgcataggacacatatacatttcgtttaccagcgctagcaaattgtaacgataaatcgacacccatccattcttttcctaagctttcgttaattccttctaaatttaggtaaagttgtttgttgaatagtaagcagtcttcagttgctgcttgaatatttcttggtaaagcaattctgtaatagtaacctaagcttttaccaggggtgcctttttcaggataaagtaatcgacctttgtctgtatcaactgatactcccactgtttccacgcgatagcgtgmtcaactacgcggccagtcactaaaccagaggtctcttgttgaccaatgttcattaactcttttaaccaatcatttttcgttggtaccaatccagcatttaataaagccacatattctcccttagcagcttgaatcatgccatgacgagtttctgttgaaacataacgaagacggtcattttggatatttatttgattctcgaagcgtgcaggcaatagaatttcataatttgtataggcagttttttctaataattgacgtaagtagctactcatattctctgtatcattcgtaataatcaatgataccatcggcacatgatcataaagatagttaattttataggaaccataaaattcggcaatctctacttgtgcttttaagccacggcgttccgtcgccgcttgaaccgctttttgaccagccacataggcgtaacctttgctttcagggtttagagcagtcgatgattcaatggcacgccaatgatacatcataccaggaatgtgctygattttcgttgcttgttccgttgctcgcaatacgaaatcatagtcttgagcgccgttatatgctgagttcaatccgcctactttttctaataaatcacgtttcacaacaacaaagtgtgtaatgtaattatgatttaaaatcagttctggattccagtccgatttgtaaaacgcgttgaagcgacgaccattttctgtaattttatcttcatcagtataaagaaaatcaatcgttgggtctgtatttaaagctttgaccacttcatataatgcttgtggcgctaattcatcatcgttatccatgaaaccaataaaatcgccagtagcaatcgacaaagctgagttagttgcttctgaaatatgtccgttttcttcgcgataaataactttgattcgttgatctagttctttatatttttctagcattggcttaatatgttcgcttggcgatgcatcatctgctaaacataactcccaattttcatagtactgattttgtaaagaagagacgcacgctgcaagccatttttcttcgacattataaacaggcacagcgacagaaattttaggctgaaattggaacgttttaatttccgctaaaactgcctccacgtcaacaggggcttctgctttttcttgtcgtttaaagtaccacttcactgagcccatcaaaccacgtgtctgaatcgaacgccatgctcgatcaaatttcgtgcctggttgaaccatgtttggacgctccaccacgtattgaaccttctggcctgatttggtgtcaatgtttaacgtgtaggctggtaaatcttctggatctttaatcgtaattacaaaaccataatcttgatcgccttctaattcaaacatatcaataacatcacgacggtattctgtttccaccgtataagtgactgattcactagcttctgcaatgctgaatcttagcggataatttgtttgtttgtcatacgcccaccctctgataacagaaacgttattttctacatcgcgagcaatatcatcgatggttaaattaatcattttatcaaatttagttaacgtgattcgtttatattttccagtaggcataggggcagtctccgtctgtttattcatttcttctaaaaattgatttctttcatctaacagtgcatgaataaaggtattttcacgttctgaatagttgccttcaaagaaataatcaatgtctactgtcaggtctttgcctgccatttgtgcatcggttacttcgattacaggtacttgcgtatctaagaaataatagatattctcttgtaccagaaaagcattcgtggctgcgactgggactgtctcgccgtctatcgtcatggataatttaacaattgcccccgttaaacttgggaataattttatcagttggacgtcttctggtatcttcagttggaactgttttgtttcaggtttttgtaaatcaactggttgatccaactcagtctctttttcttcgccgcaattaattaaaatatgaacgtttttttcattgtatgaatttactggtgtcactcgctctggctgttctactggttcagcagtcaaggcaaaaaagtactgatacacttcgccaaagggacgcgctttaaaagctgcttgcacttctacaggtaacgcttcatacgtcgtaggaatttcgttgtagccaacttgattaaatgtaaaatcttctttggcaatgtataaaccaacttctgcaaaaactttttcaaatccttcttgtaaatagaatgatttatgcgtagcatccaacagcccagtttcattccacgttaaacgattattaaataaatcaattaagaccgaattatgcgccaaattagggaaagtgattaagatttgaccgcctggttttaaaaacggtttgacttttgctaaggcgctttgaggattcattaaatgttccaacacatctgcaaaaacgatataatcaaacgtcttaccagcaaagtattcgacccaatcattttcatcaatattgccataaaaggcatctgttgaaaattgactgacatgatcataaagttctttgtctaattcaacaattgagacctggcactttttttcttccatcaaatagctagtcattcgcccattacctggaccaaattccaagacatcactattttctttgatttgtgctacgattttcccaacactggtactctcgtctgtttccatttcaaaatcatacttcatcttttgtcgtatccttccatttatgatctaagatgacaattccttctccggcataacgaccggtaataaacatcgtcacgtattttgttttgtagactaatgggactgttgcatgttcctcaaagaaagcaatatcaaaataatattcacctgttaataatgacattttttcatattctaaataaaaaacattccgtccttttttccaaggaatttgcacgccatctaacaacgtatttaagccacagacataatgattgtccactgttcgaatagcgaccccacaaacaggcttcttaatttggtcatttttgacagtatattcaatttttacaatcactttttcatcttgcgttaccatttctaatggttcataatccgcatttaaaagttccgcatgatccacttcaataatatctggtgttggggtttcatctttcatgggtcttcgcggtcaaccgttttaattgatttctttttcaaaaagttttcgtagttggtcgtcacgtccatcgtatctccatattcaacgactttcccgtgttgcaaccaaaaagttctgtcacaaaaacgacgaatggagtttacatcgtgagaaacaaataaaattgttttaccagaatttttaatttccgtaaatttttccatacattttaattgaaactctaaatccccgacagccaacgcttcatcgacaattaaaatatcgggatccacgttaatggctaccgcaaaagccaagcggacaaacataccactagagtacgttttaactggttgatacaaatgatcgccgatgtcagcaaaatcaatgacatcttggacacgctcttccatctcttctcgggaaaaacccaagaccattccatttaagaaaatattttcatatcctgaatattcagggttgaaacctgaacctaattcaagcmacgctgaaattttcccattaatcaccatggacccggaggttggtgttagtactcctgtaataatttttaacatggttgatttcccagagccattttcgccgacaaamccaatcatctcgccttttttaatttgcatcgtgrcmtcgtctaacgcataaaacaaatcgtggtaggattttttggttggactaagcgcttctttaaaccgatcggacggctttttatacatgttgtatgttttggtaatatgttggatatcgattgcatattctgacatgtcgttctctccttatagtacatctgaaaaatgtggttttaagcgtctaaacacggttgagccaattaatagtaaaacaatagtaactccccagaaatataagctatattgccaatgttcccagaaccatgcaccgcctaaataagattcgcggtatccttgaacaatataatataatggattgatttttaagattgtcgcaatcattccagttggttgccataaaattggcaatgtccacataactgtttgcataatgatattgataaattgcataatatcaggtaaaaatggttgtgttgaagcagtaatccacgtaattgctgttaaaaagactaataaacaagctaagtagtaaattaattgcaaactgtacagacttgggtaataaccgttagctgtagtaattacaaaaccaattagaatgaaaaacaagtgggtgtacaagttcgataaaattttagatgttggtaaaatttgtacattaaacacgacttttttaactaaataactatattcacgaaacacattcgtggctgataataacgaatctgaaaagaagaaccaaggtaccatccctgttactaaatagacaatgaatggcatattgtcgccagctctagaacgaaggcctacagaaaagacaaaccaatacgtcaaaacagttactaatggcgttaaaaacgcccagacaattccta

SEQ ID NO: 202 - DNA, 10996 bp; double-stranded, linear
actgccgctaaacaagaatttaaagtagtagttcaacaagaaatgccttctgcagatttatctttaggaacagatacaattagttttacggcactgaataatgcgtatgaaggaatttatcgtttagatgataaaagcaagccgcaaccagcaggggctaaagaaaaagtgcaagtcagtgatgatggtctgacgtacacagtgaaactaagagaagaagcaaaatggtccaatggtgatcctgtcacagctgccgattatgtttttagttggcaacgtacagcagatcctcagactggcgctgagtatgcttattttctagaaatgattgaaaacggtgcagacattgtagctggtaagaaaccagtctctgaattaggcattaaagcaaacggagattacgagctagaaattaaactggcaaaaccaacaccatattttgattatttactggcctttccactatttttcccgcaacatcaagcaaccgtagagaaatatggcaaagattacgctgcttccagtgaaaaagcagtctataatggtccgtttgtcttagctaactttgaaggggctggctcagataccaattggactttggaaaaaaatgaaaactattgggataaagacaatgtcaaattagataaaatcaattttgatgttgtcaaggaggcgccaaccgccttgaacttattccaagatggccaggcagacgatgttattttaagcggcgaattggcccagcaaatggcgaaggatccagaattggttatcgaaaaagaagcacgaaccagctatttggaatttaatcagcgagataaaaattcaccgtataataatgtgaatttacgcaaagcaatttcagcagcgattgatcgcaacgcattagtagataaaattttaggcgacggctcagtagtcgctaccggcttaattccagaagggatgtcgtattcgccgacagatgacacagattttgctgatgaaaataaaaaaattgttgaatatagcccagaaaaagcaaaagaatattgggcaaaagcgaagaaagaattgggcataacaacactcaaaatggatattgttgccgatgatgtcgattctacgaaaaagttagcggaatatattcaaggtacgttaaaggatactttagagggcattgatgtaacagtgagcccagtgccgttttcagttcgaattgatcgaggtagtcgcggcgattttgagacaatcttaggtggttgggctgcggattacgcagatcccagtagtttcttagatctttttgttactggtaataactataatcgcgggcgtttttcaagtaaagcctacgatgagttgattgaggcttcagctacaagagatgcttcagatcctgaaaaacgttgggaagacatggttaaggctgagaagttattgattggtgaagagaccgctttagcaccactttatcaaaaggcgactgcccatctacgcagtaaagaagtgaaaggcgtcgttgcccatggtgctggcgcacaatatgattataagtggacatatgtgacagaagagtagttaaaaagagacacagaatagtcaaatcgactgttctgtgtctcttttaatcaaaatatttctgctgttcttcttttaatttttctggggttacatcttcaccagtaggatcataaatagtgacgcccattaatgttttattgaattgttcacgaatggtccgcaaatattcttgtcgcaaatcgacacgaagagcttgttcttcagatgttaaaccttgttcacgctctttttgtgcaagcgtattaattctttttaaaacctctaacatttctcatttcctttctataataattcttttgctaggcgttcaaacgattgaaagcgcgtttgtttgtcataacctggggtgattagcattgcttctgtcaaccctagttcttcttgttggtggaaaaactccgcaacttcttggctactgccaatgacaaagcgttgtttattttgttctaaaaccagtttgtccatttcactgtaagggaaagctagggcttcttctggcgataaaaatttatttggaagcccatgttcggtggcaaagatataatgctcgaaactagccgcatggtattctgcttcttctttcgtgtcggcggcaaaagtgaaatacgcagcgctcacttgcggctcttgttgttcagttactggtcggaaatgcttgtaatatgcggacaatacttctttgggcaaatgtccatgaataaactgagcaaaggaaaaattaatgccatattcaccagctgaacgtgcgctttctttgctagcacctagtaaccaaggttgtggtaatagaacttcccgcggaacagctgaaattttagaatataaatgatcttcaggaaattcctctcttaaaaagagtaaaatttcaggtaatttatcaaattggtctagctgtggtggctgaccattatttaacgccaacgtagttaaagggctgccgccaggcgagcggcccatgcctaaatcgattcgatcaggatataaagctgctaacgttttaaacgtttctgcgactttaaatggcgcataatgcatggtcatgatgccacccgcgccaacacgaattttttcggtggcactagcaatatgtgcaactaaaatttctggcgttgcactggcaaaggcgtctgagccgtgatgttcggcataccaaattcttgtgtaaccaagtttttccgctaattgagcgagctctttggcttcttgtaatgtgtcgcttgctgattgatttttaggaaccgttaattgatctaagatacttaatttcatgtatgtagtctccttcttggttatttttttgaagctaccgctattatcacgcaagcatgtcaaaaaaaacagtacgcactttttaattccctagtgagcgaaaagtaacaaatagatgtagccaagatcgatgataaaaaattctccgctatggctttttgatgctttgtgttaaaatggaacatatgtacgcaatcagcaattggaaaggtgacaacatgtacgaatatattattggaaaagtaacgtttgttagcccatactatattgtcgttgaaacaaatggcattggctatcagatttcagtcgataacccgtatcgctattcaggaaaaatggatacggatattaaactatatcttcaccaagtcgtgcgggaagatgcacaacttttatttggttttggcagtttagaagaaaaacaattgttcttaaaattaatcagtgtctctggaattggacctaaaagtggcttagctatcatggcttctgtggctgatcatggtggtttaatcaatgcaattgaaggggaagatgttacatatttaacgaattcccaggtgttggcaagaaaacagcccaacaaatgattttagatttaaaaggaaaattaggcgaattagagtcttccgaagcagcggttgcggccatgaccgcaaccgaagcggtgacaacaagcaatcaagcattggcagaagcgttagaagcattaagtgccctaggctacagtgaccgagagattaagcgtatcactaagcaattggaagcgttaggtgagacaacgacagatgtttatttgagcaatgcgttaaaattcatgatgaaacgctaaggaggaataacgatgacagaagaagaacggttgctttcagctgcaagtcaagaagcagaagcttcaattgaaaaatcgttacgtccacaatttttagcacaatatattggtcaagataaagtaaaacaagaactaacgatttatattgaagcggcgaaaaatcggaatgaagcgttggatcatacccttctttatggtccgccaggtttagggaaaacgacaatggcgatggtcatcgccaatgaaatgaatgtgaacattcgtaccacaagtggaccagccatcgaacgggcgggagatttagtcgctattttgaacgaattagagcctggtgatgtgttatttatcgatgaaattcatcgtttgccgcgagttgtggaagaaatgctgtattccgcaatggaagatttttacattgatatcatggtcggtcaaggaaccacggcacatcccgttcattttccgttaccgccttttactttagtgggcgctaccacacgggcagggatgctttcagcgccattacgagatcgttttgggattatttctcacatggagtattatcaagagcaggatttaaaagaaatcgttctccgttccgcggatatttttcaaacggagatttttgaggaaggtgcctttgaaattrcgcgccgctcaagargaaccccccgaattgctaaccgtttgttaaaacgtgtccgtgattttgcccaagtccaatcagatggcaaaatcgaccgagcgattgcagacaaagcgttaaccttactgcaagtggatcatcaaggcttggattatgtcgatcaaaaattgttgaaaacaatgattgatttatacggcggcggtccggttggtttaagtaccttgtctgtaaatatcggtgaagaaaccgaaacggtggaagatatgtatgaaccctatcttattcaaaaaggtttcattaaacgaacaccacgaggacgaattgcaacgccatttgcgtatgcacattttgggtatgattatttagagggtcgtaaaaattaaagggttaaataagagagaagggccttcaacaggatagagtatgttgaaggtcttatttttcattttttcaaagtttatgtaacggaataaatattctttttttgatagaccactataagtatattaacgaataatttttaaaagtttcatctcttgataatataaatctttgtaagataaatcagacagtttgcgagtaactgtttttgatatcggtttgttttcaaaaccatttaaagcggacaaaatatataacttagttgtgcaggtatttttaaaatgatttcggatgtagccaagaagagcgattgctgagggtgtttcaatattttgattatctgacggtagagaacacatagagcaaacctgataattcaatgtttttaaatagttgctgtatgaaaatttacctggtggatcaccttcaaaatcatttataaaaaagaagaacgctttatttaatagattgccagtgggcttgctcagtccatttaaagttatactgcctgtagataaaggttgttcgctagctaagtagatgtattctgtcaattttatcacctctttcttatcgatatgaattatcgtatcatgatataatcaaatccgctatattttaaggtgaaatgctaaatggaaacaaaagaaagcaagccttaaccgcttgctttcttttgtttcacgtgaaacgtttgttcttatttagaagagcggcatatttcagctgttgtagttatactgtgtttgtaatcgcttttaaattggagggatcaatgttgaataaagaaatcaaaggggcattaattgtttcttgccaagcgttggcagacgaaccgttgcatagttcttttatcatgtccaagatggctttggccgctaaacaaggaggggctaaaggtattcgagcaaattctgtggtagacattcgagcaatccggaaagaggttgatttaccaatcattgggattattaaacgagattatcctgacgcagaagtatatattactgcaactatgcgtgaggtagatgaattaatggctgttcagccagaaattatcgctctcgatgcaacccattcgaaacgaccaaatggcgaaacgttagccacatttttcaaaagaataaaagaaaagtatcctaaccaagaatggatggcggattgttccacgctggaagagatgattgaagcagcggagttaggttttgattatattggcacaacgttagtcggatatacgccgcaaagtgaaaatcagcggattgaacaaaatgattttgaactgttaagagaagcaaagaagcattttactacaccaatcattgcagaaggaatgattgatacgccagcaaaagtccaacgtgtcctggagctaggtacttatagcgtggtggtgggatctgttattacacgaccgcaaaaaattactgaaaaatttgtggaagctacgaaaataaaacagaatcaagcataaactaaatacactatcgatacactcgttattttttgatcaatacacttcgatacggtcgctttttttctagagaaagttgaatctttcaataataaaaagggatacactccatttggcatagtccttgctgataataaatcagtgtataaagcgctatcattttataggaggggttttatgaagggtttatcaaaaaagaaacgggtgtctacttggttagcgttaggaatcaccgtagtcagctgttttgcgttaagcagggaagtgcaagcaagtgttgaaagaacaaaagttgatgaatttgcaaatgttttagatgtgagtgcatcaccaaccgaacggacgaatggcgtatacgataccaattattttaataatttttctgatttaggtgcatggcatggctactatttacctgaaaaaagcaataaagagctactgggtggttttgcggggccattgattattgcggaagaatatccagtaaacttggcggcaagtttaaacaaattaacggtcaaaaataaaaaaacgggagaaacctatgatttaagccaaagcaaccgcatggacctgtcttattatcctgggcgcctagagcaaacctatgaattagacgatttaacgattcatttagctttaatttttgtcagcaatcgaacggcgcttatccaaacgacacttgaaaacactggtgaagagcccttgtcacttggagcaagctggacaggtgcggtctttgacaaaattcaagagggaacggaaaccttagatattggcactcgtttaactgctaaagacaatgacattcaagtgaattttggtgaagtcagagaaacgtggaattattttgctacgaaagacacaaaatatacgattcatcatgcggataaagtttcaacaaaaattgataatcggaattatacagcaaccgctgaaccaattgaattgaagcctaaacaaacgtacaacacctatacgacagaaagctatacttttacaaaagaagaagaggcaaaggaacaacaacaagcacccgaatataccaaaaatgcggcgcgctatttcaaagagaacaagcaaagatggcaaggatatctagataaaacgtttgatcaaaagaaaacagcagaatttcctgaatatcaaaatgcgctagtcaaatcgattgaaacgattaataccaattggcgaagtgcggcaggtgcctttaagcatgacgggattgttccgtccatgtcttataaatggtttattggtatgtgggcttgggattcgtggaaagcggatgtagcaacggctgattttaatcctgagttagctaaaaataatatgcgggccttgtttgattatcaaattcaaaaagatgataccgtacgtccacaagatgcaggagcgatcattgatgctgtcttttacaatcaagacagtgcgcgtggtggtgaaggtggcaactggaatgaacgaaattctaaaccaccattggctgcatgggcagtttggcatatttatcaagaaaccaaagataaggaatttttaaaagaaatgtatcccaaacttgtggcttatcataattggtggtataccaacagagaccacaataaaaatgggatagcagaatatggaagcatggtcagtgatgctcactggcaaaaagacgacaaggatcaaatcattaaagataaaaatggccacctaaagtggatgatgatgctgttattgaagcagccgcgtgggaaagtggcatggataacgctacacggtttgacaaagaaggtgtgggcaaaggcgacgttggagttaaagtttttgaaaacaaaaataaaggaaaagtagtggggtattcgattaatcaagaatcagtggatttgaatgcgtatctctacgctgaaaagggctatttagcttcgatagcagaagaactaggcaaaaaagaggactataagaactatcaaaaagaagcgaagaaactaaaaaaatatattcaagaaaatatgtttgatgaaaaaacaggcttcttctatgacttacaaataaatgaagacggctcgaaaacaaaattgttagtcaatcgtggcaaaggaacagaaggctggttgccgctctgggcaaaagtagcgaccaaagaacaggcggcggcagttaagaaaaacatgatgaatcaagaaatgttcaatacctttatgccattcccaacggcatccaaagacaatgaaaaatttgctgcaacgaaatattggcggggaccagtttggcttgatcaagccttgtttggtgtagaagctcttcaaaactatgactatacaaaagaagcgaaagaaatgacacaaaaactcttcttacatgccgaaggattgatgggagaaggccctattcatgaaaattatgatccactgacagggaagggcttaagtacgaaaaactttagttggtcagcagcagcgtactatttattgtataaaaacaccttattaagtaataaccccacaacgcaaactgcttttgagataaaatagaaaaacagctcttgagaaaatatctctcaagagctgtttttttcttcacttgctacaatctgtttccctctgatttaattaaatgtaatttatttgtttaaataaatatatttcatataattaaataaaatatctgaaaataaacgatatgtacttttattaaaaatgttatttaataaaaatgaaatagatattcaatgaaattgattgtacaatggttaatgaagagtgggtttaacggaatagtgtaataaggaataagctgatatcaaagccaaacatatgcaaaacctccttctctgttagctatattgacttctattatagaacatttcttttggttttttcaagggaagttaagtatataagtttttatgattatcaaaatattacaatattataattacggaaataataaaaatgaatattttgaaatatttattaatgttttcgctgattttgtttaatttgtacaggtattgttggatctttaagttaataaaaaaataatatttaatattatttttattatmaaagggggatattatggatgtgctaggtgctctaaaatattttagaaaaaagaaaaaaattgctcagaaagatgttttgccaaaaaaggggaaacaaacctatcgaagaatcgaaattggtgaagccaagctaagttacgaggatttaatgacggcattacagtcattggggattacttttaatgaatttttttttatggtatctgatacgagaatcatggcttcttcagaagtcaaacatcaaattgaatgttgtcaaatggggttgaacaatacaagtgaaaaaaagaatctgattcattatttttatcaattagagcgcaatcctcataaaaatgcgttggaaatgtctatttacacagatattaaattaacgtttagtaatgattgggaggaaattccagaatttgatgaaaccgatcgaatggtaattctcgcgcttatctctagcaaaagctactatacatactacgattatcaaatggtgactaatcctgccgccttgttttctgaaaatgaagtccttcagattcttgagcagatgtttcctgtcaaagatgctgaattacgtgatacccaaacactaaatgttgcctatggtttttacctaaatatcattactggggaactttataagaaaaattatgcgaaagctcgggaatatttagcgctagtgagtgttaccacgattcctgctgaaatctactatattcattttaacttacgttacttaaaaaaccttacgtattatctgtacactggcaaaatgagatattataaagaagtaatcgccgttattgatatgattgaaagctttggggatgcacgtttggcggaaggcatgaaaaaagaaatgcttcagctgacggctggtcggacatttaatttagaaaaaggtcagtttccattgaatattgtcactgaaaaataaaaagccccccccccccgcaaggtcaaacttgcggggggtgctgatgttaaacaataatgttatctctaatcatatctaaatctttaatcaaaattttgcggttacgtagttcaattgcccctaactcttttagttgctgcatcatccggttaacgctactagcagaagttatcccacaaaaatgcgcaatttcttcattggtcaccacgaaatcaattaaaataccttcctctgtttctacgccaaatgaatcgtacatttcatagatttgtgtacaaacggccccaaatttgccattcatcaacatttgctgcatctttttcatggaatgcattaaacggtcccgatagtattctttgacatacatttgcaagtctttactattattgatatcccgccaaaattgaacacggtcgatttggtaaagttctgcttgtggagattcgatgcgaatattaaaaggtgcatcaataaattctgaatattcatcacgtagcaatgaaacaatttccaaattgttgatataacgtaaattaaattcacgaccgtctttggaaataacgctagttttgatgatgccactttttaaaatataggcataacgatcttgcagtccttcataagttaaataatttttcttcttttttacaacgactcgaaaggaatgttcatctaagtagtcttgtaaaacatttctcattggcggtaactcctcaattatctctaaatatttttgtttttgcctgttgggcttctttcttatttaagcgaattggacatcatatgtcaataacaaatgttgataaaaaaggtcaattaaacgctattttgaaaaataaaatcagcnttta

SEQ ID NO: 203 - DNA, 957 bp; double-stranded, linear
cggcccanttttttaaatgcntncattcttttaaggctttccaatcccatcattatcatttgnatctgtgaccatcgtggccactttttgaatggaggactcgcattgcccattgcgacgccaatccctgcatggcttaacatttctcggtcattttcgccgtccccaaaggcaatgatattttttgcatcaatacccacacgtttagctaaatacgttaacgtagctgattttgagccatctttaggcacaacatctacgctatgttgatgccagcgaataaagcgaaattctgggtattcttcttcaaacgtacactgatcttctgcgtcataaaaagccagcgcttggtaaatatcattttgacgataaaagtgttcatcataagcaggtgaatgaaaatgaaaagagttcatcgcaatttccattttttcagcacggtgctggktgctcttcttaatatcatctaagcccacacaagcaaatcctaagccgcgttgatcactgtcttgtgccaaacgttccaacgcttcagcgtgcaataaattttgataatattgctcatgatccacaaaagccgcggcgccattacataatacgtaattggtaaaatctaaatcccaaatcacctcttgcgccatataacgacttctgccagttgccagcgtaactaagtgtccttgctcccgcaattttgctagcgcttctctcgtgctatccaatgctttcttctccgaatttaacaacgtcccatcaatatcaaatgcaaaaagttttctttccatcatttctccttattcgctcgctttcgctaaatatttactgccttctcgttgtgctaaaggactcaacactaattctttcatcaattcctcgacccattgcggattcgttttactatattgggcgtaatggaccagccaatcgctttttgaatgaagactcctctgnagtcna

SEQ ID NO: 204 - DNA, 6835 bp; double-stranded, linear
agtcattngtaatcttttaaactatcgattagtcgggattgtgttaggtagtttacttggttttgccggcgcttatgttttcacaactgcgctacgtttctataatcgggcctactcaattgatgaaacctttgaaaatcaacaagaagaaagaggcgttttatgaaaataacttatcccttgccaccaaatctaccagaacaacttcctctattaacgaactgtcaattagaagatgaggcaatcttagaaaatcatttgtatcagcagattgatttaccgaatcaagaagttcgtaacttagtctttcgggatgctgttttcgatcatctttcattagcaaatggccagtttgcttcttttgattgtagtaatgtgcgttttgaagcttgcgatttttctaacgtcgaatggctgtctggcagttttcatcgagtgactttccttcgttgcaatttgacaggaacgaattttgcagatagctatttaaaagattgtctatttgaggattgcaaagccgattatgcttcttttcgttttgcaaattttaatcttgttcactttaatcagactcgtttagtcgaaagtgaatttttcgaggtcacctggaagaaactccttctagaagcttgcgatttaaccgaaagtaattggctaaatacttctttaaaaggattggatttttcccaaaacacctttgaacgcttgactttctcaccaaactatttatcaggtcttaaagtcacccctgaacaagccatttatttggcaagtgcccttggtttggtgattacctaagaaaattttaaaaaaatagccgaataactggttctgtcggttctttcttattaaattgttattaattttttggaaaaaccaacggaaccattttacttgtgccttatttttaggkaaactatcytaggttaagcaatctctttttttggaacaagagaaacttttggaatcatttcctataaatcatgaagagattatgacaaacgttcttctaatccaagaacgtcttttgtcctatactcgattctactcaaaaggaatgtcagtgaatgaatataaaaaaacaaggcctcggtcaagcgacgggaaaaatcattttaatgggagaacacgccgttgtttacggcgaaccagcaatcgcctttccttttcaagcgacagaaatcacagccgtctttaccctagcaaaaactatgcagattgattgtgcatattttacaggattgcttgaagacgtgccccaagagctagcaaatatcaaggaagttgttcagcaaaccttacactttttaaaggaagatacgtttaaaggcactttgaccttaacaagtacgattcccgctgaacgaggaatgggctcaagcgcasaaccgctgtggccatcgttcgaagcctttttgattattttgattacgcttatacatatcaagaattgtttgagcttgtttccttaagtgagaaaattgctcatggcaatcctagtggtatcgatgccgcagcaacaagcggcgctgatcccttattttttactagaggatttccgcccacacatttctcgatgaatttatctaatgcctacttagtagtagctgatacgggaattaaaggtcaaacacgtgaagccgtgaaagacattgcgcagctagctcaaaataatcccaccgcaatcgctgaaacaatgaaacaattaggttcttttactaaagaagcaaagcaagcgattttacaagatgataaacaaaaattaggtcagctaatgacgttagcgcaagagcaactccagcaattatccgtcagcaacgatatgctggatcgactagtggctctctctttagaacatggcgctctaggagcaaaattaaccggcggcggtcgcggtggctgtatgattgccttaacagataataaaaagaccgcacaaaccattgcacagactttagaagaaaatggagctgttgctacatggattcaatcattagaggtgaaaaagtaatgctttcaggaaaagcacgagcgcatacaaatattgctctgattaaatattggggaaaagccaatgaagaatacattttaccaatgaatagtagtttatcattaacattagatgccttttacacagaaacaactgtgatatttgatgcccattattcagaagatgtatttattttagatggtatcttgcaaaacgaaaaacaaacaaaaaaagtcaaagaatttttgaaccttgttcgtcaacaagccgattgtacttggtttgcaaaagtggaaagtcaaaattttgtgcctactgcagctggtttggcttcttcagcgagtggtctagctgctttagcaggggcctgtaacgtagccttaggattaaatctttcagcaaaagacttatcacgtttagcgcgacgtggttcaggttctgcttgtcgcagcatttttggtggttttgctcaatggaacaaaggccactctgatgaaacgtcgtttgctgaaaatattccagccaataattgggaaaacgaattggccatgctctttatcttaattaatgatggcgaaaaagatgtttccagccgtgatggaatgaaacgaacagtagaaacttctagcttttatcaaggttggttggacaatgtggaaaaagatttatcccaagttcatgaagcaattaaaacaaaagacttccctcgtttaggagaaatcattgaagccaatgggttaaggatgcatggaacaaccttaggtgctgtccctccatttacttactggtccccaggcagtttacaagcgatggctttagttcgccaagcacgggccaaaggaattccttgttactttacaatggatgcaggtccgaatgtcaaggtcttagtcgaaaagaaaaacttagaagcattaaaaacatttttaagtgaacatttttcaaaagagcagttagtcccagcttttgctggtcccggaattgaattgtttgaaacgaaaggaatggataaataagcatgattgaagttactacgccaggaaagttatttattgcaggagaatatgccgttgttgaacctggccaccctgccattatcgttgctgtggatcaattcgtaactgtaactgtcgaagaaacaacagatgaaggcagtattcaatctgcacaatacagctctttacctattcgttggacacgccgaaatggtgagcttgtattagatattcgcgaaaatccttttcattatgttttagcggcgattcatctaactgaaaaatatgcgcaagagcaaaacaaagaattgtcattttatcatttaaaagtgacgagtgaattagatagttcaaatggacgaaaatatggtcttggttcaagcggtgcggtaaccgttggaactgtcaaagccttgaatattttttatgacttaggtttggaaaatgaggaaattttcaaattatcagcattagctcacttagccgttcaaggaaatggttcttgcggagatatcgccgccagctgttacgggggctggattgccttttcaaccttcgatcatgattgggtcaatcaaaaagtagccactgaaacattaactgatttgttagcaatggactggcctgaattaatgatttttccgttaaaagtaccgaaacaactacgtttactaattggttggacaggtagtcctgcgtccacttcagacttagttgatcgagtccatcaatcaaaagaagaaaaacaagcggcttatgagcagttcttaatgaaaagtcggctttgtgtcgaaacaatgattaatggctttaacacaggaaaaatttctgttattcaaaaacaaattactaaaaatcgccaattgctcgccgaattatcttcactgactggtgtggtaatcgaaacagaagccttgaaaaatctttgtgatttggctgaatcttatacaggagctgcgaaatcttctggcgctggcgggggcgattgtgggattgtaattttccgccaaaaatctgggattttaccattaatgactgcttgggaaaaagacggaattaccccactgccacttcacgtctatacctatggtcaaaaggagtgtaaggagaagcatgaatcgaaaagatgaacatctatcattagctaaagcgttccacaaagaaaaaagtaatgactttgatcgtgtgcgttttgttcaccaatcgtttgctgaatccgctgttaacgaagtggatatttccacttcgtttctttcttttcagcttccccaacctttttatgtcaatgcaatgacaggtggtagtcagcgtgcaaaagaaattaatcagcaattaggcattattgccaaagaaactggccttttagttgcgacaggatctgtctcggcagcgttaaaagatgctagtttagcggatacgtatcaaattatgcgaaaagaaaacccagatggactcatttttgccaatattggtgcaggcttgggtgtggaagaagcaaagcgagcgcttgatttatttcaagcgaatgccttacaaatccatgtaaatgtgccccaagaattggtcatgcctgaaggagatcgtgatttcactaattggctaaccaagattgaagctatcgtacaggccgtagaagtgcctgtcattgtcaaagaggttggctttggcatgagccargaaaccttagaaaaacttacctctatcggcgttcaagcagcggatgtgagcggccaaggcggaacgagttttacacaaattgaaaatgcccggcggaagaaacgagaactttctttcttagatgattgggggcaatcaacggtcatctctcttctggaatcacaaaattggcaaaagaaactaactattctcggctctggcggtgtgcgtaactctcttgatattgtcaaaggactcgctttaggtgccaaaagcatgggagttgctgggactatcttagcttcccttatgagtaaaaatggtttagaaaataccttagcccttgtacagcaatggcaagaagaagtgaaaatgctttatactcttttaggaaaaaagacgacagaagaattgacgagtaccgcacttgtcctcgatccagttttagttaattggtgtcataaccgtggtatcgacagcactgttttcgcaaaacgttaaagagaccagaacattaatgttctggtcycyttatttgagttcttttatcctacataagcatctaagataatttgttttagttcactaattaatggttctttcggatttgcagttgtacattggtcttcatatgcaagttctgccatacgatcaaccgttgtgtctaatgtttcttgtgagacaccttgggctttcaagttcatgtcaattccgactgatttacctaaatctgctactgctgttgctaaagcttctactagttctgcggtagtatttccttttaagcctaagaattttgcaatgtctgcataatcagtatcggcgcggaagtaatcatatttagggaacattgcgtgttttgatggatctttcgcattgtaacgaataatatgtggtaataaaatcgcatttgtacgaccatgtggaatgccatattccccaccaattttatgagcaatagagtgacaaatacctaagaatgcattggcaaatgccatccctgccatggttgatgcattatgcattttttcgcgagattccatatctggacgtttcactgaattttctaaatgatcgaaaactaacttgattgcttgtaaacttaaaccacgtgtgtaatctgaagccatcacggaaacataagattcaatagcatgtgttaaaacatccatacctgtatctgcagtgactgaagctggcacagacattacgaactgtggatcaacaatcgctacatctggtgttaacgcatagtctgctaacggatatttcacgtgtgtttcactatcagtaataacggcaaatggtgtaacttctgaaccagttcctgaagtagttgggatacaaacaaattgtgttttttctggtttggcaattttatatgtccgtttgcggatatctaagaatttttgttttgcaccaaagaactctgtatctgggtgttcatagaacatccacattcctttcgccgcatccattgcagaaccgccacccaaggcaatcactgtatctggttggaaatcaaccatcattttggtacctgcataaacagtatttgttgatgggtttggttcaacatcagaaaatacttcgattttcacatcatttttacgtttttgtagctctttacgtacgatatctgcatagccaaattgaaccatacctgggtcacaaactaacatgacacgttcaacattttccattttttgtagatatgtaaagaatttttttcaaagaaaatttttggaggtaatttaaaccattgcatattatttctccgtttcgctaccgttttaatattaattaagttaatggctgatacgtttttagaaacagagtttttcccgtatggaaccacaaccaagtgttaaggatggaatcatttcgttataaatgttaccgataccgccttctgctgatggagtattcactaaaatacgacaagctttcatacgtaaaccaaaagcaacttgtaactcttcatcttctgtatgaattactgctgtatgtcctaaaccacctaagtttaacatcgcttcacatagttcaaaagcatgctctgcattgtttgatttcatcattgctaaaactggcgataatttttctcttgataatggatattctggacctgcaccttctaattcagcgactaaaatttttgtgccttttggtacactaattcctgctaattcag

SEQ ID NO: 205 - DNA, 3977 bp; double-stranded, linear
agtaccaagcacttgaccgcttttttccttaggtgtgccttgtagcaactnacgcagtcgcattactgatntaaccagaaaaaacaccttgtaataagcgtaagccaatcaattgataaacacttgtgactgcgcccattaaactaatgacgatagccatccctaatgaagcgcgtaataacattaacttgcgtccttttcggtcggctaaacggccccaccaaggtgaaacaatggttgtgactaaaaaagtggaagagaacgtgattccgctccaaaaattcaattgttggtgggtaaaagtacctaatgtgttgatataaagaggcataaatggcatcactaagctaaagccaataccagccataaatgtgccaaaccataaaacgagcagatttttttcccaaggttgtcttggacggaaaattttacttttaattaattcatacattctatttcctcactttctagtaaagaaattcaaatttggctttggcgagtagttgatcattcaatgcttgatgcaattcattcgcaaaaaagccttcttttaaatttagtggattttttgtagtgtacacatataacgtataggtgtgcacaccagagcgagggcttaaccccagataacgttcggttaactcaggtaacgtttcagtggcaagcgcaggaatcatctgtttccccaaaggagaagcaagactattttttccttgaatggtaggcttgagtgctgttcgactaaagtcttcaggaatctcattggttacaggaacattggcagctaaccaatgaataaaagggaaaccgattagaggaatcgtgtcataatcaattaattcccaggataaataacgggcttctttaggaatggccgctaaagaaataggaaaagataaaataggacgttcgtgtaataaaaattctgcactggttcgtttgccataacgatcggccaaatgagaacggttggtaatatgcatgccaaacagccttctttcaaaaatgatgtttacaaattattattataaactataatttatagtttaaaaagagtcaatagatatgataaactaatacttgtccaaaatttaagaattggaggcgtcagaaagatggcaaaaaaacggaatttaacgaaagccaaaatccttgaaagtgcccgcaatctagcggaagaattgggcgttcaacaattaacctttcaaaatttagccgttgatttaggcatcaagtatccttcactctataatcactttaaaaatattgctgaagtaaaaaatgctctagtggacttgttaattcaagaattaaatgatgcattgcgaagagccttagtgggtaagagtggcgcagaagcaattcggatatatgckgaaacgtaccaacaatttgcytttgaaaattctgcagtctatgaattacttatcagtgtgccgaaaacgcaaaaccaacaattaattgaaggcatccatgaaaccaatcaaattatcttacaacttttagctttttatccatttaataatgaagaacgactgcataaaagtcgagaattacgtagcttaatccatggttatattaccttacgttttttaggttattttcaacgcgaagaagccacgccggaagaaagttatcgtcgcatgattgaagattttattgtttctttagaagtggcaggataaaataaatttcaaaaatttctcagtccgaaaccaaatccttgcaactttttcagaaagtgactatgatacctacagtagcaaaaaaaggagcggttcaatgtatcmagtaattacaatgtatggcgacmatgaaccttggtggttttttgatgattggcaagaggacattgttcaagaaaaaaccttcgataacttgaccgatgcagagacatattatgtggaagtttggcaaaaactttctcagaattatacatacgtcaacacaaagcctaattatttaacggctttctggaatgatggggaagaacgctggtgtgaagaatgcgatgaagatttacaacaatacttcggtttagcattactagaaaatcatcatgcggttacttttgaaaataaagctgagtttaccacaatatccaatcattttggcaaaacaaaattctgcaaacggaaagttatttgaaacgcatgagtttaaagaaaaacctcagggaattttctttaaactctttttctattctcggaatttagagaaaatcgaaccaatatttggtataatacgaaaagatagcactcaaaaaggagcgaaactagtggttgcaaaacaattaattattgctgaaaaacctagcgtagcaaaagatttaagccgcgttttaggagcaaatcaaaaaaataagaattattatgaaggacccaacgtgattgtcacatgggctttaggccatctcttaggactaaaaatgccagaagatttaaacaaagaatggcaaacgtggcaaatggaaactttaccgatgattcctaagaatttagggattaagccgttaccgaaaacgggacatcaattaaaagcgattaaacaattagccaatcgtaaagatgtttctgaagccgtgattgccactgatgctggtcgtgaaggtgaattggtggcccgctggattttagaatatgtccgttttaacaaaccagtcaaacgcttatggatttcatctcaaacagacaaagccattaaagacgggtttaagaaaattcgcccagcgaaagactacgataatttgtattactctgccttggcgcgcgcaaaagctgactggttagtggggctaaacgtcacacgggccttgacagtgaaatatcaagataacttatccgcaggtcgtgttcaaacaccaactttagcaatggtacgccaacaagaaaaaacgattgaacaatttaagcctcaaacttattttactatctcgttatctgttgaatcagaaaaagcaaagatgacccaaaaaaatccatacgctttaaaagaacggcaggaagcagaacaattagtcaaagaactctcaaaacaaaagggcttagttaccgatatccaagaaaaagttaaaacagaaaacgcgccgttaccgtatgatttaaccgaaatccagcgtgaagccaaccagcgattccaattttctgcaaagaaacgttgtctcttgtacaaagtttatacgaaacccataaaattgtttcctatcctcgaactgacagcaaatatctaacgacggatatgaaaggaacgatgaaagagcgccttcaagctattgctgatttttcaccagaagtgaaaggctaccttaaaaatggggctgttgttaaacaacaaaaagttttccaaaatgcaaaagtcacggatcaccatgggttgattccaactgaacaacgtcctcgttatgaaaagctaagtaatgatgaacaaaaaatctatcaaatgattgttcaacgattcttaggtttgtttgctgagccaaatcaaaccaaacaaacaaaagttacagtcgcttttggaaaagaaacatttgtctttcatcaaaataaagtagttgttgctggctggaaaacaacagccgaacagccgctatccactgtccaatggcaaaaaggcatgaccgttgcgccaaactttaccattaacaaagaattaacgtcgccgccaaaaccattaaccgaaggaacgttgttaggaaaaatggagaaacacagtttaggcacaccggcaacgcgagctgaaatcattgaaaaactgattaaatcagaattgatggaacgaaccaatagcggtttaagtgtctctgccaaaggaaagcmactattagacttggtgaatccatcacttgtgacacctggaacttaacgggaaaaatggggaaaagtcgctcgaagcaatcgctttcggggttccaacaaaagagttcaactttttcntttaaagggatatttggaagagggntacggaaaaatttagttccg

SEQ ID NO: 206 - DNA, 5530 bp; double-stranded, linear
nntatttttcaatgtatccgcgtaattcttcttcagtgacactttcgtcaaagatatactcaccaatgatgatcgttggtacaaattgaatgtgcgccgcattggcttcagcaatcactgcggaaacaagcgttgcatctttttgttcttttaagcccagatttttttcagcatacgtcgctacttcttctaaggttaagtttccccattcatcttgcgtacaaacattttatgcaatgctgacagcgcttgttcaggcgctgaatagtcaatgtagtgatgcatcacattgccgcgttgtaaactttctttttctttatcaaacaacttaatgatacgttcaactttaccacttttgacagattgtgctaacagttcctcagactcttcaaaccattttctgcaataaggacagcgaacattgataaattctatcattttgacaggggcattactctcaccaatgtgaagccctgtttctgtgttaacttttgttgcatcaattactgaaatatccataaaaaacctcatcctttcaaacctttatttctcttttagtataccgtttttcaataaaaaaatcataagacacgaattcaaattttctgaattcgtgcctctgttcacttttttaacgattaatcgaacgagccattctagcaacagtatgtcttttcccacgtatcgcatcagaaagctctttaatawtttcaataccaactaagcccatattggcatcgccaatatgttgaatatctacgcctaaaattttatttctaatgccgattgcttgggataacttcaggttgagcactttcttgtgaagttccaatggcactcataactaattttccttttgaatgtgcaaaatccacaacttctttgacttgttgatcatcaatgccccaaaccgtgccgactgctgggactaagacaatatcagcgcccgcttcaataaattgttcagctgattttaaactgaccactggttcatctacgcctgaactgtgcatttttccggcaataatgatgccgtcaaaatgttttttggctaaggccacgttcttagcaatcaagtcgttggtcacgccagttcctggattacctgtcaataagataaaatccaaacccagttcattggcttttttgaaagtagctgctgatgcttttctacctggttcaatcgaaactctcgttgaagctaagtctaaattttcatcaacaggttcgacattcatgccaatcggtaaaccgactagttctttcaaacgatgaacaacctcatcattagggacacatgtttccgcagtatattgcccttcataagcggctactacaatgggttgattaacatcgaaaacattcaataaaatcatgtctgcgccatatgcttttgacatttccgcacaagtgatatcacctgctacggatggatgaactaccacattttccgataatattacgcgcccttcgctcgctttaatactctgaaacagctcttcttttgacatccgtttgatttctgatgcatttgcactaattaatcgtkgaaccattttgacccctccaatagtttttaatgttttagttaaaaacagcaataagtaatcgtttgcattttattacatgcaacattcgtgccaacgtcgtttctttaaaccacaggtcaacactacatttcagtgctacacactttttgcacactttaattttttttacacgcttaaagaaaaagtgaaggatagcacttcaaacggaaatgttattcttcacttctggagcagaaaagttacgcacttttttctcgtaatttttctgcaaattcattaatttttcgaatacgatgattaatacctgacttagaaatagctcctgaaggaatcatttcccctagttctttgagactaacttccggatactctaaccgtaattctgcgatttcctgaagtttctccggtaatgacgtcagccctactgtactttcaataaattgaatattttcaatttgttttgaagccgcatcaatggttttatttaaattcgctgtttcgcaattcactaaacgatttactgaattccgcatatcacggacaatccggacatcttcaaatttcaacatagagttcgtggcaccaattaatgttaaaaagtcggcaattttttcagcaccttttaaataacaaatatacccatttcggcgtcccaatgttcgagcgtttaagtcatagtaattcaacatcttacaaatatcattattgtgttcttcataaattgaaaaaatttctaaatgatagcgacttgtttccggattattaactgagccagaagccataaaggccccgcgtaaataggaacgcattttttgcgcgttacccatgatttcatttgacacattgccattaaaaacgaccccatccataatatccaaatcagctagaattttttgtgtatcttgttttagacgcacaatgtaaacattatttttctttagtttcatttttttacgaactaataattctgcttgtgcatggtaatgatctttcagcaatgaatacattcgacgagcaattgcagcattttccgtttgtacattcaagacaaactgttgattaactaagctaagcgagccgttcatccgaattaatgctgctaattctgctttcgcgtgttctcgatggacttctaaaccagttaactcttttttgacatccgaggcaaaagacatctaagctcctcctctcttgattcttttgattaattaatatttcgttccaaatacgatacggaaaagttcttcaacaactttttccccatcatgaaaaactccgccatctcttaattctaaaaagtctgtcgaaatgactcggcaaccttcttcacgtaatccttgaaaatcatgctttacttgaactaaatattcatcataaatttcaggatccatataattttctggtactttttctgtgttaaccagcaccgtatcaacaaactgcgcttgtagatgctcgtttaagacacgaacatgatctgcatccgtaaaatgttccgtttcccctttttgggtcatgatgttacaaatatagactacttcggctgccgtttgtttgatggcttcaccaatttctgtaataactaaattaggcaaaatacttgtaaaaagactccctggccctaacacgaccatgtctgcttcttcaattgctttgacgactttacgcgcagctcttggctgctcttctccgtgtgtatttgttacaaacacatggtcaatcgtcttgcgatccagtgcaatttttgattctcccaccgccactgagccatctttaaatacagcatgtaacgttaatggccgttctgatgatggataaatccgtccatcaacatgcatcatttttgaaagcaattgaatcgcttcatacgtacttcctctcatttctgagacagcagcaatgattaaattaccgattgcatgattggcaaaatgactatctgatttatcaaaacgatattgaaaaatatcttcatataattgtggcatatctgacaatgccactaaaacatttcttaaatctcccggaggtgtcatgttattaatagaggaacgaagctcgccactactaccgccatcatcagcgaccgttacgacggcagtaatatcaacactttgatttcttaaacttttcaaaattactggcaagcctgttccaccaccaacaaccacgatcttcggtttacgaattcgataggttttcattaagagcgattaaccgtttcttttctttttaagcggtcgcggtgggtaatatttacatggtaatcttcctcttttaattcagcgccaacacgttctgtcaatgcaacagagcgatgttgtccgccagtacagccaattgcaatggtgacgctacttttaccttcttttttatatccaggtaagactgttcgcagtaaatcgataaattttgtataaaattcatctgtttctgggaagcccatcacataatcataaacaggttgatccattccagttaacggtcgtagttcatcaatataatgggggttaggtaaaaagcgaacatccataacgatatctgcatcaatcggcaagccatatttaaagccgaaggacaccatttccactcgaaattcgtgtgtctctctcgttgctagttctttattcaaacgttcccgcaattgacgaggggacaagtccgtagtgtcaataaccaactgagcatccgccttgatttcttccagcattgcacgttctttacgaataccttctgtcactaaaccatccatcgccattggatgcgcacgccgtgtctctttataacgagaaaccaactcttcatcggtggcatctaaaaataaaatcgttgtatcaataaaattagtattttcaagttcgactaacatatcctgaatttctctaaagaaggtccgtgaacgtaaatcaatcactaacgcaatcttggtaacttttccagattctttaattaattcccaaaattttgggattaagcttggtggtaaattgtcgatacagaaatagcccatgtcttcaaagctttgaacagcgactgtttttccagcgccactcattcctgtaataataaccagttgtaaattttctggcatattcaacactcccttcacttgcatcactatattataacaccccgggcgtatcaaagaaagcttttcaatcattcttataaagatttctattctttcatagaaaaacagcattgacatttttgtcaatgctgttttaattgctgaattatactatataactctgtgttattttaatacaaactcaatttctgttttatcagtaaaattagcttcaaactcaaattgttttacttgttcattcacggctaactttttcgtaatgtgttctttaatttgttcatttgtagctgttttgattgacaatccatctaaaagagtcatgattttgtcttgtgctgccttaccttctaattctaaatcagcagattcatcttcatacgttgcttcaattgttcagttcgattttatttcataggtgaactcaatttcattttcgtcgtattcaatttctacgtcaatctcttgaagactggcaacagtcggtgtcggtgtggttagttcattgtctgctgtttcatggtccccaccaacttcaggagttacagtttcccacttaaaggtaccaattttagctgttgctagatagggattattaatggttatgactttcaattgaaggtctgaatggttggcgatatctgttaaaatccccagagcctgatatgtattttgtgtaaaacgtgtcgcaatattttgcgcatcaattgtggaatagcctaatgtttcccaggtgatttgttgctttaattcctgatgaacggctgtactgtcgccggctccaattgaatgcccgttgcttcttttaagncttcctggnaaaactcattactttttcatgggctgattgtgaaattaangtcgctgctccatggggtacnaatgacaaaag

SEQ ID NO: 207 - DNA, 2571 bp; double-stranded, linear
ttgttaggggatgagatgtatcatggaaagatggatcaaggaattgagcggcaagcgttgcattgcatggaactaatttttactcatccttttaccaaagaaacggttcatctgatttccccactngcggaggatatgaaaagtgtagatgatacgttataataataaagaggcaggaggggaaagtgtaagatgaatgaaggccaagaaatggaagagcaatttgcccttcttttagaaacgctaaaaaatcaacaaatgaacgaatttcgtgagctatttttagcgttacacatttatgaacaaggacaattttaccaatcgttagatgaaaaagaccgacaacatttatacaattacctatctccgaaagaactagcggatatgtttgatgttatcgaagaagataatgagaatatgaaagattatttagctgaaatgcgcccaagttatgcagccgatatgttagctgagatgtataccgataatgcggtggatttactaaatatgttagataagagtcaaaaggcgaaatatcttagtttgttaagtagtgaagaagcaggcgaaattaaagagttacttcattacgaagatgaaactgctggggcgattatgaccaccgaatttgtttcgattgtggcgaatcaaacagtgcgttctgcgatgtacgtcttaaagaatcaagcggacatggcggaaacaatctattacgtttacgtagtcgaccaagaaaatcatttagtcggcgttatttcgttgcgggatttaattgttaatgatgatgataccttgattgctgatattttgaatgaacgggttatttcagttcatgttggcgatgaccaagaagatgtcgcgcaaacaattcgtgactatgacttcttagctgtgccagttacagattatgatgatcatttgttggggattgtaacagttgatgatattattgatgttatcgatgatgaagccgctagcgactactctggtttagccggggtcgacgttgaagaagttagtgagaaccctttaaaagccgcttctaaacgattaccttggttaattacgctgctgtttttagggatgtctacggcctcgttaatcagtaattatgagtcgttagttagcgaagcgagtattttagccgtttttatttctttaattaccggaacagccggcaatgccgggacacaatcattggcggtcgcggtacgccgtttggctatgaaagatgaaaaggatagtaattttggtcgcttaatcttaagtgaagtgctcacgggactagtgacgggggctgtgacaggtttaaccattatgattgtggttggcgtgtggcaacataatcttccgcttggatttgtgattgggatggcaatgctctgtgcaattactgtggcgaatttagcagggagtttaatcccaatgttaatggataaattagggtttgatcccgcagttgccagtggcccgtttattactaccttaagtgatttaaccagtgtattaatttatttcaatattgccagcatgtttatgcgttattttgtttaaaaaattgcacttatttatcatgagactgaggtaaaaggattcgttggtttgcttgaaatcaaaaaagtgagatagccgttaatacgacggctrcctcacttttttagatacaagaaattaaacaatttttgtgccatggacttctgtgacktttaaagtgtccatcacagtttgaacgttttctgtggaaataccgccacctggkaaaataagaatccgktgatctgcgtagacaattaawtcttttaaakgatcaaagtwgtctycgataggggkaccagcyggcccgccatgagttaaaatacgsgkcacaccacgctcagctaaccagtcgatcgccttaaattgattttctttcgacaaggcatcaaaagccatatggaaagtgatttgcaagccttcagccgtttcaatgaataagtccaaagcttcttcatctaaccaaccgtcctcagttaaaacagcccaataaccaatgcccgtcggttccctaatttctttgcctcgattaaatcggtatgcataatttttaattcaatatcattatagacaaaattgccgccacgaggacgaatgattgtcatcactggtacagaatgttcgccagcgtatgctaagacttcttcaataacaccagtacttggcgtcgttccacccacggctaagttatcgcataattcgatgcgattcgcacctttttgaatggcttggggaatcttagtgaaattttcggcacagaattctttaatcatttcttatcgctccttgctttttcttcacaggcattgtaccataattctgcttactaccatagccctgaaaaaaagagtgcaactttttataagagaaaatgttcatttaatgaacgtaaggagttttaaatgttaaagaaaattgaacgagcacaacaattattgaaaaaagaagcagccgtttttcgctgtccaacttgtcatgaaccaatgcatttagaaggggttggtctgatttgtcaacagaggcatcaatttgatttat

SEQ ID NO: 208 - DNA, 2988 bp; double-stranded, linear
aaagttgttgacaaataacaaacgagatgntaagatatagaagttgtcacnacagacaacaacaaccaagcaaaacaacttaaaaaaactttttyaaaaaagttcttgacattcaaacgraagtttgttmtgatataaaagttgctgcgaggtaacgtagacctttgaaaactgaacaaagaatagacgaaccaaatgtgtagggcgtcttgattcaattcaagacaacaaacatttttaacaagcaagcaatatgctagcaaacaaattgagcttaacaatcgtaagattgttctaacttttattatgagagtttgatcctggctcaggacgaacgctggcggcgtgcctaatacatgcaagtcgaacgcttctttcctcccgagtgcttgcactcaattggaaagaggagtggcggggcgatgccaaaaagcaaacgcttgttaaagtaacactgaaagggcaattaaaagaagtcacgtttccagaaacaattaaggtctttaataattgtaaaactgggacattgtttggcgattgggctgacgtaaaaccttttttagaagcaaacaaagaaaaaattgaggattatgttgtagaaaacgatgcacgtaactcagcaattccttttcttgatctgaaagacattaatgctcggattgaaccaggtgctttgattcgcgaaaaagttgaaattggcgatcaagcggtgattatgatgggggctattctaaatattggcgccgtcgttggtgcagggactatgattgatatgggcgctgttttgggcggtcgtgcaactgtagggaagcattgtcatattggcgcaggaacggttttagctggtgtcattgaaccaccaagtgccgcacctgtggttattgaaaacgaggttgtcattggagcgaatgcggtcgtactagaaggggttcgtgttggtgaaggtgccgttgtggctgctggggcggtagttgtggaagacgttccagcgcataccgttgttgcaggcgtgccagcaaaagtaattaaacaaattgatgataaaaccaagagtaaaacagagattttagaagaattacgtaaactctaaaaataaattagtcagtcgcgatgaagaaacttcttcatggcggctttcgattacccaaaaaatgaaggagtggcttttgtggagcaagaagaattaattgcgattagacggcaactacatcaaatacctgaaatcggtttagaagaaaaggaaacacaagcctttttacttaatgaaattgataaaatgaagcaaccttatctgcaagttcgaacatggcaaacggggattttagtcttcatagaaggcaaaaatcctcagaaaaccatcggctggcgtgctgatattgatggtttacctattcaagaggaagtggtttctgcttttcaatcaaaacgaccagggtttatgcatgcctgtgggcacgattttcacatgacaatcggtttaggggttttgaaagaattaagtcaacagcaaccagacaataactttttatttttatttcaacctgctgaagaaaatgaagcaggggggatgttgatgtatgaagaccatgcgtttggtgagtggttacctgatgaattttatgcgcttcatgttaatcctgatttgccagtcggaactattagtaccagagtagggacattgtttgctgccacttgtgaagtgaacattaccttaaaaggaaaaggtggacatgcggcttttccgcatcaagcgaatgatatggtcttagcggccacaaatttaattcagcaagcgcaaacgatcgttagtcgaaatgttgatcctgtggttggggcagtcgttacctttggaacttttcatgcagggactgcctgcaatgtgattgccgaagaagcaactttatctggtacaattcgcacattgacagcagaaacgaatgaacaaacgcagcgaagaattcgcgaaattagtgaaggtattgcgcaatcttttcaatgtgaagtaactgttcatcttgatcagaaagggtatttacctgtagtgaatgagccagcatgtaccacgaattttattgaatacatgagcaaacaagcaacagttcaatttcaacaagcaccggttgcaatgacaggtgaagattttggctatctattgtctaaagtcccaggcacgatgttttggttaggcgtggcaagtccctacagccttcattctgctaagtttgaaccgaacgaagaggcgttattgtttggagtggaggcagttagtggctttttaaaatcattggacaattagaaaaacagccaccagataactaataaatatctggtggctgttttttattttgcaataatgggcgtattgggaatcgtaaaaccggcctctgttaatgctttgatatattgggctagaaattcttctttgaccgcaaattgtttgccgtttagtacatacatggtcgttcgcaccgcaaagttgccattgcctaaatcgaccataccaaaaatatctggctcagtttgaatactttcgatatacttttcttttaatgtttcattgacttctgtaatcacttcacaaattttttcataaccttcttcaggattgatgcggacatcaattaacacttgcatattggcacgagacaggttactgattgtggtgatgtttcggtttggaataaaatgaacagttccatcaaccgctttaatttgagtggttcgtaatccgacagaagtaacagttccttcaatatttaacgccaataagcgaatataatcgcctacatccatttgttgttccaaaataatgaaaaatccggtaattaagtcattcatgaatccttgagcccctaaaccaatggcaacaccggcaattccagctccggctaataatgagccaacaggcacaccgacaatggtcaaaagagaatagatgaaganaaagaacagcgtatatggaaatgcattaatggnttanantgggta

SEQ ID NO: 209 - DNA, 1510 bp; double-stranded, linear
cntatagacatattctcnccaacttattttttggtgggagttcccggttattcntccatattgttttcnggtaattcgttggtaactaacaaatgtttccatattggtcatctgtcaatccaagtaagccgtattcagctttaatatctgcatatttaggataatctaaaataactttgccgattagtggtatataagacaatgcccaagaaataaccgcaaagttcaacattacattcccaacaaaagaagttgttctattatttgttaggccatttaaatcatcaggataatgaactaatttgccattgcgtaaaccccagttcaaataatcttttggctcttcatttacttcaatttcaatatagtttttcttagcaataaacgaatagtccgtaagcatttgattttcgtccattgtaatccatatttttatcttatccatgttgcactccctccaaattctacatcatcattttgaagtccataaactcgaatcataattcgaccagatgtttctatttgtattgctgcatatttatttgtttgaatcgtattgcctatatttaaggttaacggtattttaataatcatattttgaggtctatagctagcttgaatataggtatccacaccatgccaaccattggcttttccttttttaaaaattccttcaacattacatgtaataattgtatttgatctttgaatgtgaatagtaattccattgtaagaaatatgttgaccaacagcattaaatgccgttttgtcaatctttttatttaaatcatttgtatactgtgttttagtaactaaattgcttatatcaggcgtatcacctttaggtccttgctctccttttgcgcctggaacaccatcgtttcctttttcaccttttggaccttgtggaccagtatcccccttgtcacctttaggtccttttaaaccaatcggaccttgcgagcctgtttctcctttttctccttgtggtccaatgtctccttgtaaaccttctgggcctctagggcctatatcccccttatctccttttggaccttgtggaccaatatcgcctttgtctccttttcgacctttaaaatctgtaaaactttttttatcaaaggataaaacatgagcactattgtttggcaatatatacgcaacacattcttcagcagcttctatagctggtagttcatctacacgttcaaatgaacaaatacttacatctgattcacatggactaaatcctatattgccacaatcagaacaaaagcttctaaccctcatcatcaatagcccctttcatcatatcgctaaagcaagaagcacattcggtaatgggtactcctgtaaattgagtgatttttttgatgaaataagcatttttttcaatacatatttgataaagtaaacgatcgttatcactggcttgccaagcttcaaaagctgtatacattgccattgcagcgtgtttaactatacaccattgtcccttatcacctttacc

SEQ ID NO: 210 - DNA, 7287 bp; double-stranded, linear
attgaagttgctgcaaatgcytcgktgatttcatacagatcaatttcttccgtagtaagttgattgcgcgctaacagtttttgaatggctttaatcggcgaaattcccatataggctggatcaataccgacttccacactgtctcgaataatagctaaataaggaagaccgtgtgcttcggcatattcttgtgaagcaataatcaaagcagaagccccatcattaatggttgatgcattccctgctgttacagtaccgtcttctttaaaaactgttttaagcgttcctagcttctcaacgctcgaattagggcgaatcccttcatctttctccacaagcgttcctgatacttctaatggggctatttcgtcagcgaatatcccttctgcttgtgcttgagctgcttttaattgtgaatgtacagaaaattgatcttgctcttctctagttacatgatacttttcggccacattttcagcagttaagcccattgcctgaccactaaaggcatccgttaatccatcatacatcatactagaaaaaggcgcatcgtagctttctgtttcgtaattaaaacgttgtaatttaggtgcttgggacatattctcaatcccgccagcaattaaaacttccgcttctcctaattgaatcaattgtttcgccaaaataacggccttcattcctgatccgcagacctcattaaccgtcattgcgggaatttcatgagacaaaccgctgtttattgctatttgtcgtgcgggattttggccatttccagcttgtaaaacatttccaaagattacttgatcaatttcttcagaaatagtggaatgtctttttaaaagttgtgttgtaacatgtgttcctaagtctacggcacttacttgacttaagctgcctttatattttccaattggtgttcgtaatgcatcaataataactactgttttcaactaaatgcacctccatcttgaaatatatcataaaatcccagaatcacaagtgccaattactgaatgttaacagacttataagatattttttaataatctatgaagttaatacaaaaattccccattttggttcatttcgtgctattttatataatgaatctatttatcgtaaaggagttaaagaaatgacaattgggattgataaaattagtttttttgtgcccccttattatattgatatgacggcactggctgaagccagaaatgtagaccctggaaaatttcatattggtattgggcaagaccaaatggcggtgaacccaatcagccaagatattgtgacatttgcagccaatgccgcagaagcgatcttgaccaaagaagataaagaggccattgatatggtgattgtcgggactgagtccagtatcgatgagtcaaaagcggccgcagttgtcttacatcgtttaatggggattcaacctttcgctcgctctttcgaaatcaaggaagcttgttacggagcaacagcaggcttacagttagctaagaatcacgtagccttacatccagataaaaaagtcttggtcgtagcggcagatattgcaaaatatggcttaaattctggcggtgagcctacacaaggagctggggcggttgcaatgttagttgctagtgaaccgcgcattttggctttaaaagaggataatgtgatgctgacgcaagatatctatgacttttggcgtccaacaggccacccgtatcctatggtcgatggtcctttgtcaaacgaaacctacatccaatcttttgcccaagtctgggatgaacataaaaaacgaaccggtcttgattttgcagattatgatgctttagcgttccatattccttacacaaaaatgggcaaaaaagccttattagcaaaaatctccgaccaaactgaagcagaacaggamcgaattttagcccgttatgaagaaagtatcgtctatagtcgtcgcgtaggaaacttgtatacgggttcactttatctgggactcatttcccttttagaaaatgcaacgactttaaccgcaggcaatcaaattggtttattcagttatggttctggtgctgtcgctgaatttttcactggtgaattagtagctggttatcaaaatcatttacaaaaagaaactcatttagcactgctggataatcggacagaactttctatcgctgaatatgaagccatgtttgcagaaactttagacacagacattgatcaaacgttagaagatgaattaaaatatagtatttctgctattaataataccgttcgttcttatcgaaactaagtatttaaatcccccgattcaatcaacaaaagagctagacattcaagcaaaaacttgaatgtctagctctttttatgaaagccaaacttctttgaccccgtctgtcacggcgataccatctgtcaaagctaaacgttgtgaataagaaacgtagccataataaacatcaacaccgccgccattgttccaagtaacagtgattttaacatttggagtaatcgattttgtagctggttgggtcgtcgggcgataactagtcgtatcataacttaaaatagtgcccgaagctccacttatttcggcttttcctgtgtaaatttcgccattcgtattcgtctgcgtgaccgctccattcgcttcaatgattaaacccgcttgcttttgatctcctcgtggataataaaaaagatacgtggttgcccatttagcaaattcatctggaattggtttaagtgatcccgttggtgccggactcgacttcgtttgcttttcaaccgcgacttcttcttgtctttttaagccttcactattttgattatttagtttctcaaccgtttctttaacgatcgaataatgaggtttccctaaatcgctaacagggatcgtagctaatttttcttctgattctttatattgcccctctgccgttaactttttagcttctgtaataatggcatcatacttggtttggtctacggaagaggatgtgctttgtcccgtagcttcgacttgttttgtgacactggttttttctgtggtcacgtctgatgaatttccacaagcacttacaaacattgagctaacgattaataaacatcccacaatcacatgctttttcatttttaaatcccccatttgtctatctttgttattttttgttacttaaattatcccatagatgaacaaaagaaaccattatttataaaaaagcttagcaagcgcttcaagagaggcacttgctaaacttttttctcactgttattgattgattactttgactagttcttcaaataataatgcactagatgctgctcctggatcaatatgaccaattgctcgttcccctaaataagaggcacgtccttttttcgccacccaatcttttgttgcttcagcaaattgttcaattttttcttcattaaattgttccgttccaattacttcagcaacaggtgcccagacatcaaccatcgttttatctcctggttcagctttgccacgcatctgaatcccagctagaccttgctgaacaatttcttttaattgctctggcgaactgatggtttccaaatcttttgtcgctttagtcatattcataaacgcagtaccatataaaggaccagaagctccgccaacttttgaaatcaaagccatggataggactttaaatgtctccgtgattgttgttggtacttttttgtcaaacgcaattttgtattcagccataccacgagccatgttgttaccgtgatccccatcaccaatcggcgtgtctaattcacttagatagtcttttttttcttcaataacttttgaataattgtctaaccatgtttgaatgtcttttactgttaattccatcttttatcacccttaccaagaaattgttgttacattgctttctagcgctgtttgccagtcttttgtcgccaagtcaatcatcgttaaagataatccttgcatgtcaatagacgtcatatagttacccactttatggaaggtcacttgaacacctttatcttctaacaatgttagcacgtcgttcataaatacaaattgttccattaatggcgtgccacccatgccattgacaagtacccctactgtttgtggttgttgctcatagctacttaatgttttttcaactaattctttcgctaactctttcgatggttggattttttcacgacgatagcctggttctccgtgaatccctacgccaaattcaatttcatcttctggtaaagtaaaacctggtttgccaacttcaggcacagtggctgcttttaaagccactccaattgttttcgtggctgatacaatcttttctcctaaagaaacgagctcttctaaagaagcaccttggcgggcatgatgtcctaaaattttatggacaagaacagtcccggcaacgccgcgttttccagcggtataggtgctatcttcgacagcaatatcatcatcgacaacgaccatttctacatgaatgtcttccatatcagccatatctttggccatttcaaagttcaaaatatcgcctgtataattttttacgattaacagaacaccggccccttggtctgccgcttggatccctgttaaaatttgatctggtgttggtgaagtaaagacatcacctaaaactgcggcatttaacattccatcaccaacaaacccagcatgtgcaggctcatgaccacttccgccaccagatactaacccaacttgtttgtttgagtcgttgcgagcaatcacgcgagaatcttcgacttgatgaacaaggtttccatagcttttcacaattccttggagcatttcttcgacaattttaccaggttcattaataatttttttcatttagttccaccctttcttaccagcattttgagcttctgctaaaatttgcgtcaaatcatctgagacacctgcagtaattgctgacgcaaaggcaccttcaaccaatggtgcatcgactaaatgataatgtttctgttggtcttcttctagcatatcaaaagctaattctgaacttaaaacggcactgcctaaatcggcaaaaattaaaaattctcggtcagagtccgcttcgttaatcgtgtcaatgattttcattggatctgaacctaatgaaccatctgatgtaccaccaagtgaatgaattgtaatttcttcactggcgttcatctgttcaatcatctctttaataccatctgtaatcattttgctatgtgaaacgagtaaaatatctgctttcatgtggacacttccttaatctaatttatgtcttgttttatattcttgtccgactttatctgcaacaatgattgcattcgctacttcttcaacgacaattgggaatggcattgaatgaattgattcttctggaatgcaagcaattttggctacttccaacgcttcttcataagtgatttcatcgacaccaatgtctgaaagcgttaatggtaaacctacagaagcgctaaagtctaaaacagcttctaattcgtcttttgctgcatcttctaatacaagttgtgcaatcgttgcaaaagctactttttcaccatgtaaataactgtgcgcaccaggtaagactgtcataccgttatgaatcgcatgcgctgcagctaaaccgccactttcaaaacctaagcctgaaagtaagatatttgtttcgataatcttattcaatgattcagtaaccacatttgcatcacaagctaatttcgcttttaacccatcttcctggaggttttcccagcaaagttttgccatggccaaagctgcatatgtgccgctagcagcaggcgttaagccttctcttgaacccattggcaaactagcattaacccgagaatatgaattgtgtgttgcgcgtgcttcaaaatatgtggataaggcatcccccattccagcaactaaaaatctagttggcgctttggcaaccacttttgtatcaaccataacgacgcttggactttgtttaaagtaagcataatcatcaaatgagccatcttcatgatatagtacagctgaatgcgaagttggtgcatcttgagccgcaatcgttggtacaataattaagttttcaccttctgctacgacttttgaagcatcgattgctttaccgccacctaaaccaatgatacagtctgcttgttctttttgtccaacgttttgcaagcgctttgtttcttcacgcgttacttctccactaaagccaccctctacgaaggtaatgtcaaactttttcgctgtttcttccaatkgtgracgwacacgatcaacgtcagcaggatttgcaattagtaacgctttttttccaaaagttgaaacgaagtaacctaagtttagtaattcatcttccccttgaacatatttcgttggtaaaatcaatgcttttctcatgttgatagcctcctatattttgttnacatccatagtataaaacgctttcatctaaaaagcattgaacttttggtatcgtttycttgcaaaaaatgatagaattattttgtgaaataataaaatattatgatttttaaactttagattgaaggattgccttatgactgtagaattaaaaaatattttagatttagaaaagtgggaaaaattgcaagaatcattggccttaagcactcgtttagccattattttagtcgattataaagggcgacctgtgacgaaacatagtcaagttcaacccttttgccaactggtacgtcactcccctgagctctcgaaactttgtgaaaaatgtgatgctcgtggtggcttggaagctgttcgcactggtcagccttttatctaccgttgtcactttaacatcgttgatatggccatccccattattgttgatgaccagtatgtaggagccattatggctggtgaagttttgctcgaagatcaccaagaagagttagaacaggttttaaccatgaatgatgccttcattcaagaatttttagtaacacaccaagagctgtatcaacaataccctgttttagaactagcagacttagaaaagagcgcgacattaatcgctgatctaagccaatatattatttctgaagccatcaaaaaagattatttaatcaatacgtacaaacaatccttacagattagttcgcgaaaagaagagctggagccattgaatatgatccaaaaagatattcmacaamctttattaactgctcaattaactccttcaagkgccttccaamctaaaawtaagcaataccaccgggtttagatgncccttggggaaaccaatn

SEQ ID NO: 211 - DNA, 3756 bp; double-stranded, linear
gtatgccaatcgttttaattacttgttggtcaccgctaacgatgcccacatcaatcaacttgccaactaatttagggacgccaagggttcctgcgatttgcaaacagatggttaaagttgtcgcaagaacaatccatttattttctttaataaactctttcattaatttcatgaaatttcctccttaaacaataccgttttagctgttacaaagagtcattgtacacgtcaagtaacttgaatgtcaacagtagaaatgctaaactttttgatggagggaacagtatggaaaaaaattacacataaaagatgtttctgagttgttaaatatccctaagtccacgattcgttattgggacgagcaagggttgattagtacaacacgcaatgaagaaaacggatatcgaacctttgatttagaagatttgttcaaaatatatgatattgatttttatcgaaaaatggggattcctatcaaagatatgttgaatttatataaaaagacacctaccgatctctatgccaccatggaagcaacagaagaacaactggggcaagaaataaaaaggcttcaacataaatacaaagaaatcaagaaaagaaaattacatttacatgcgttaattgatttagaaacattggttttttcagatgaaccaattccttttgataaaattgttgttgttgatattgaggatccagaagagatgaaagtttacatggaacacatttcaactttaggtatttacggggatttaagtgaatccaatgaactgacgtatgggatttgtttggcaaatcatgtgaataaaaaaagtttagataaagtgatttggctcaaagaatcaagtagccaatacaaaggctttattttaaaagtcaatacacaagatacccgtttgaataatatcgaagaagtaaaaaagcgtttagcaaaacaaggatttgaaacaggcatcgttgtcggagagcatatcttgacacaactagaagaggaaaaccaatatattgaatattattatggttggattgaaattttaggggaaaagtaaaacaattaaaaaaaggaactagcaatagcaaatgtagctaagctagtttctttttttggtaaatgtaatgaaaattacatgaaaaaagttttagtttttaaaacaatttagaacgaatgttattaaagggaaaacaataaaaaaattactcttaaagctagaacttacctatgtttgtaattttttagggaaagtcaatatatttgcttcatataaaacgtgttatttaattcacgattttttgttgaaatatcgggttttttctttttttagctaatataatgtgttactttttgattataaggagaaacggaaaatcgtacgttaaaaaaaagttgttgtagctaaataaagaaagaattgaaggttgaaaagtattttatggaggtggatgttgagaaacaattagtaattgtaaaagttgtttgaagatgatttgtttaagtaaatgaaaagaacgaaggagaatgtaaatgaataaagcagttaaaaattttgtgagttaccttatgattaccatgctgtttattttaaatttgttaccaatgatgaacgcatttgctcaagaagtaacaagtgatgctgagaagactgttgaaaaagacgggctcaaagtaatagggaaaatagaagatacatcgtctcaagaagatattaaaacggtcacttacgaataacaaatacgcgagatgtaccaatcaaagatctcattttaaaacaaaaaaataccaatgatagtccaatcaaatttgttttagatactttaagtgaagagcgaggacctacgtctttagaagaacaagcaaaggttgaaacaaatgagaaagatcaaacaaccgatattaaactgcttaaccttcaaccaaattcgacaagaaagattaccataaatgggcaaataactacaaaagcgtcgaacaagttattggtcagcgtactaatagaagataatgaaaaaggaacactagtaattgatttacctagtaaagatatactagcagataaagagtcggtttcgaaggaaaaacaggaaacttcagaaacaaaagtagaaaatcaggcaaacgaaacagcctcttctacaaatgaaatgaccgcaactactagtaacgaaacaaagcctgaagcaggaaaggcgatagaaagtattcaagagacagcactaacgcaggctaccgaaagtcctgagcaacctccattaaaggcgcaacctactggtccgttagtgccaccaacacctggtcgggggtttaatacaccgatttatcaaagcgttcataaaggagaacttttttcaacgggaaataccaacttaaaaattgcgaatgaaaatacggcggctgcacaaacatttttaaacacacgaggagcaagtagtggttatgcaattaacaattttcctttagaatttgcagatgttgacaatgatccaaatacgtataactctagtcgggcttatattgatttaaatggtgcaaaagagattgcttgggcgggcttattttggagtgcatctagatataaaggccctgcttacggaacaaatctttctgatgaagaaattagtgcaccagttcaatttactacaccaaatggaaccgtacagcgtgtttcgccccaaaggtaccatcgtatcgatcaagatgcaacaaacccaggacaacgtttcgggtacaataacactggattttctaattatgcagatgtaacttcaattttacaaggggataaaagtgcgacagggagttatacgttggcagatattcctatgacaagtagtttaaatggtcaatatcaatattataactttagtggttggagtttgtttgttgttacaaaggatcaggcaagtaagtcaagagcttttagtatttactatggagcacgtggtaatgctgctggaaccaataatgaatttactatgagcaactttttaacagcaaaacaaggaaatcttgatccaattgtgacctggtttactgttcaaggagataaatactggactggagacaacgcacaaattaaaaatagcgcaggaacttgggtaaatatttcgaacacgctcaatccagttaacaatgctatgaacgcaactgtgacagataacgatgaacatatggtagacaagtatccagggaaatttgcgccggatcatcctaattttttagatattgatatcgatcgtatggcaattcccgaaggtgttttaaatgctggacaaaaccaaattaattttagaacaacaagtagtggtgacgattattctacgaatgcgattggttttgctgtaaacgcagaaacgcctgaatttgaaattaagaaagaaattgtggaaccaaaagaaacttacaaagttggtgaaacaatcacgtatcgtgtctcactaaaaaatacaaaagctgattctgaagcgataaattcagtctcgaaggatgcactagatggtcgcttaaattatttgccaggctctttaaaaattattagtggaccaaattctggtgaaaaaacggatgcttcaggcgatgatcaagctgaatatgatgaaaccaataaacaaattatagtccgtgtcggcaatggtgcaactgctacacaaggaggtagctacaaagctgatacagctgaaacaatttacgaatttaaagcgcggataaatgaacgagcaaaagcaaatgaattagtgcctaatagcgcaccgttgagg

SEQ ID NO: 212 - DNA, 1046 bp; double-stranded, linear
atagaaaagcattatgtgtccccagcggtttccatgaggccacaaaaggttccataccgactttaatatgttgaggatcagataaccatttagcaaaaaactcatgccaaattcgttctcttcctgtaaataaatcaacagtatccgattccgcacataagtaaaataacaatggtcccaatgcagctactccgacaaaaccaaatagccaaactttcgaacgttgcaagaaacgttttggtaaaagattatccaccagaataaaaccaactaaaatggcaaaagaggtttttgattgactgacccatgtacctaaaacaccaccaatgtatacaggtaaaagcagcaggttaaaaaccttatttctatatgctttgatcaaactactggccatcattgttgaaaacatcaacgttgcaccaatcgtattggtattaatccaaatactttctagtttatttgattctttaaaaatttcgtctgctggaatcaactgaggcaactccacggacatccgatacaaagtcgcactcaaagcaactaaagagacaattaataaaagcgtttgatccaaacgatcaaagacacaaactttaaaacaaagaaccaacaaaataattaaaggaatcattgtatctgtttgcatcgtgctatgacggattgattccgtaaagtgaaacaagagccaggtggctagcgccaacgctacggtcagccagtcaataaattttaatttcgtacaatttaatagcagtacaagtattactgctattaataataaaattgaactattggcatacatatattttgtgactggcgcatcaattcctacgacccacatcgtatacgagccgatcattgtaactaataaaataagtcgaccgattctattcaatacttttcccatattcmaacctcattccatgaatgaatcactagtcgtttattcgataaatatatgccccgttctgatcaggtccatataatttttcaaaatgaatcgttggtgtgtctaacggttctaatggtttataaacgaccgcata

SEQ ID NO: 213 - DNA, 5233 bp; double-stranded, linear
taagtcggattattgtcgcctataatgaccaaagagagccggtgacggttaaagatttaaacgtggcaggtgcgctgactttattattaaaagacgccttaaaacctaatttagttcaaacgattgaaggaactccagcttttgttcacggtggtccttttgccaatatcgctcatggatgtaacagtattttagcgacaaaaacggctttgcatctaggggattatgtcgtaacagaagcaggttttggtggcgacttaggtggcgaaaaatttttagatattaaagtaccttctttaggaaaagcacccgatgccgttgtgattgtggcaacgattcgcgcgttgaaaatgcatggcggtttggcgaaagatcagttagcagaagaaaatttaccagcgttacaaaaaggctttgccaacttagaaaaacatattcaaaacatgcaacgttatgatgtaccagtagttgttgcaattaatgagtttacacaggatacagagaaggaaattcaactgttgaaagaagcctgccaagcgttaggcgtgcccgtcgagttaacaagtgtttgggcgcaaggtggcgcaggtggcacgaatctagcgaaaacagtagtagcagagattgaagccgatacaaaacagtttcaacctttatataatcctcgccaaactattgaagaaaaaattcaagccattgtacaaacgatttacggcggggaacaggcgattttttctccgaaagcgcaaaaacaaatcgcagactttacaaaaaatggttgggatcaattaccaatctgcatggcgaagacacagtattcactttctgacgatcctcaaaaattaggacggccagaaggatttacgattacaattcgtgaactagttccaaaaatcggtgcagggtttatcgtggcgttaacgggtgacattttaacgatgcctggcttgccgaaggttcctgctgcgttaaatatgggatgtggacgaaacgggtcaagcgagcggtctcttttaaagccgctctttcctgagacctatttttagtatatacttgaaagtagctcaataaaaaataatgacggaaatttattgcgtagtttattataaggagcaacgactatgggggaacgagcagatacatttttagcacactttaatcgcattgaaaagtggatgagagagagactgaacaatcctgtcaacatgggattcagtgaaatgacaagacgtctttcccgaaaagaaaaaggacagattgctcaatttgaagaggatttgcttcaaatggctcagttaagaaatgccatcgttcatgagcgaattgctgatgattttgtaattgcagagccaaacgaatgggcagttcaacgaattgaaacgattgaacaagctttaacaaaaccagaaaaagtagtgcctaaatttgcgaaacgtgttacagcttttgaaatcaccacttctttagaaacgttattaacgattattgcaaaaaaacaatattctcaatttccgatttatgaaaaaggtgtatttaaaggattaatcacggttcgagggattggtgtatggtttgccattgagagcaccaaaggcgaagttcacattgccaaccgaacggtgcgagaattgttggcatcaaattataaacgcagcaactatcaatttgtttcaattgaagcaaccgtttttgaagttgaacaaatgtttcgggagcagccacgcttagaagctgtgcttattagtaaaagtggccatcctaatggtgagttagtaggcattgttcgaccaagagatttagcaagtattcatagagaaaaggaatgacgcgattgttagtagtatattttttaaycagtgccttattagtagggcttgaccaatggagcaaatatttgacggtccaaaacatttctttgggtgaaacaaaagaattcattcctggatttttgtcgctgacccatttaagaaataccggagctgcttggagcttattagaaggaaagatgatattcttttatgtcatcacagtaattgttagtgtcgtgattatttatttattaattaagaattataaaaaaagtatctggtattctgtaggtttatcttttgtcttagcaggtgccattgggaattttattgatcgtgtacgtttaggctacgtagtggacatgctccaaacggattttatgaattttcctatttttaatgttgcagatagtacgttagtggtcggcgttatttgtatatttatttatttgattttagatgaaaaagcagcaaaggaaggcaaaaatggaacaaattaacgtaacgattcaaacagaaaaaggccggattgataaagtattaagtgaacatttacccaatcattcccgctcgcaaattcaacaatggttaaaagaaaaacacgtaacagttaatggtgaaacggtccgcgcaaattacaaagttacagcaggcgatgaaattgttgtaacaattcctgaaccagaagttctagatatggtagcagaggatattcctttgaccattgtttatgaagacaatgatgtgattgttgtcaacaaacctcaaggcatggtcgttcatccttcggcagggcatcccaagggtacattagtgaacgcgttacttcatcatgcggatcacttatcggcgattaatgatgtggtgcgaccgggaattgttcatcgaattgataaagatacttcggggctattgatggtggctaaaaatgatcaagcccatgaatcattagcgaaacagctaaaagaaaaaacatcgttacgtaaatacgttgccttggtccacggtgttattcctcacgataagggagagataaatgcgcctattggtcgttccaaggttgaccgcaaaatgcaagcggtcattgaaggcggtaaagaagcagtcacgcattttactgttttagagcgttttgatgcatttaccttagttgaattacaactagaaacaggccggacacatcaaatccgtgttcacatgaaatatatcggttatccattagctggagatccgttatatggaccgaaaaaaacattgcctggcaatggacaatttttacatgcgaagttattaggctttacacatcctactacaggtgaacaattagtctttgaagcacctttaccagaagtttttgaaaaaactttacaccaattaagaaataatcattgatttttttctgaagaagaggtaaactcttttttaagaagaaaaataactaaataactgtaacctttaagtttagtcccgtgaggctaagaaggaatcatgcaaaagaacactaggtgcgcttagttagtaagttgtgtgggctacatggtacccttgtacctttttaaactgtaaccaacatcctcctatcctcatacgggtaggaggattttttgttggaaaaaataacaggacaatttcaataaaaacccacttatttttcagctgctcaattgaaggaagaatcgctgaccccaagacagcgaggacgtagataaaaaagaaatgaggaggaaattattatgccaaagaaagaagttgttgacgcagtcacaatgaaacgagcgcttactcgaatctcgtatgaaattattgaaagaaacaaaggaattcaagacattgttttagtaggaattaaaacgcgtgggatatacattgcacaacgtctagccgaacgcttaaaacaattagaagatattgacgtgccagttggtgaattagatattactttgtatcgtgatgatgtgaaagatatggaggaacctgaattacattcttctgacgtaccagtctcaattgaaggtaaagaagttattttagtggatgatgtcttgtacacgggccggaccattcgtgctgcgatggacgctgttatggatttaggtcgtccgagaaaaatctctttagcagtcttagtagatcgtggacatcgggaactaccgattcgtgccgattatgtaggaaaaaatattccaacatcaaaaactgaggaaattattgtggaaatggaagagcgtgacggcgcagatcgtattatgatcagtaaaggaaacgaataaaaaggagtgaacaacgttgtcagaaaaagaatttcgaaatgaggatgcagtcttagatattaaagacagaccgcaagcttttcactgggttggcctaagtttacaacatttatttacgatgtttggtgcaacggttttagtaccaatcttagtgggaattgacccagggattgctttagtcagttcaggattaggaacaatggtctatctgattactacaaaaggaaaaatccccgcttatcttggcagtagctttgcttttattgcagcgatgcagatgttaatgaagagtgatggttatccagccattgcccaaggtgctatgacaaccggcttggtatacctaatcgtttcattaatcattaaaaaaattggttccgactggttggataaaattttaccgcctatcgttgtaggacctgtcgtgatggttatcggtttaggcttggcggctaatgccgcaaataacgcaatgtataacaacaacgtttatgattttaaatatattgccgtagccttaattactttaggcttaaccattttttacaacatgtttttcaaaggcttcctaggattaattccaattcttttgggaattgtcagtgggtacctagtcgctttagctttcggaattattgatttaacccctattaaagaagctgcgtggtttgctttaccgaattttgaagtaccttttgttcaatatgaaccgaaattgtatttaaatgccattacaacaatggcaccaattgcttttgtaacaatgacagaacatattggtcatttaatggtcttgaataaattaaccaagcgcaactttttccaagacccaggcttatctaaaactttaatgggagatggcttagcgcaaattgtagcaggttttgttggtggaccaccagttacaagttatggtgaaaatatcggcgtgctagcaattacaagagtacacagtgtcttcgtgattggtggagccgcggtgttcgctgtagctttaggctttgttggaaaattaagtgccttgattctaagtatcccaggaccagttatttncaggaattagtttcgtcttgkttcggtgtgattgccgcaatggtttgaaaatcttaatcgataataagantaatttggataagaaaaagaattnttgattgc

SEQ ID NO: 214 - DNA, 4473 bp; double-stranded, linear
tnatagtatatttttttagtcaaaaaatcaatagtttttgctaaaaaaaagtaaaaaaagctttttcttgcttttttttactaaaaagaaatatactatatgctataatagtacttgagaaggaggcatttagaatggcaactatcacagatatcgcaaaagtcgcgaatgtttcaatttcaactgtatcgcgagttctgaactatgatccaaacttatccgttacagaggaaaccaagcgaaaaatttttgaagcagcagaaaccctgaattatacgaaatataaaactaaaaataaaaacaaacagcaggagcaactgacacctaacctttccgtacaaacagctccgcaagagccttcgattgccgtcgttcagtggcgttcagatgacgaagaactaacggatatttactatatgtcgattcgtttaggcgctgaaaagcgggccgaagagttaggttacaatattctaaaagtttctcaattggaacaacataaccttcaagggattgatggcattttggcaattggcaaattcactcaaaagacgttacaagagttgcagcaactgcatcccaatctttgtgtaattggcagtaatttcccattggaagaatttgattctgtaaatactgatttttatcaagcaaccgagattgccttaacccatcttttggaattgggccacgaaaaaattgcctttattggtgccgaagaaagcgaaaatatgtatggtttccgtcgctataaaacaccgacaaccaacgcttatcttgacattatgcagcattatcacttgtttaacgaagattattttatcttaaaagaaaatggcatgttggatgtcaaaacgggggaacaattgacagaagaagcgttagaaaaatggggaaatgatttacctactgcgattcttgcttataatgacgcctttgcaatcggtgtgatacatacgttagccgcacacggtataaaggttcctgaagaaattagtgtcatggggatcaatgatatctctatttctcaatatgtctcaccgccgctatcctctgtccatgcctttactgaagaaatgggcgagacaggcattaatttattgcacaaacgaattcaaatgcctagcattcctcgtagagtcctgttaaacacagaattggttgtccgccaatcgacaactagcccacgccagaaataaaaaataaggaccgctcctataaaggaaccgtccttattttttatttgttttgaccaaataattcaatttgtgttaatgctggaaatggtgatggttcatctgcttgaattaactctgttagtatcacccactccgctgcccgtttcgcaaaggtaaagctctggcgttgctcagtcttaacagttttaaaaacttcatgtgtaccgtcggaaaattttaaagtcacttgttgccaataattatcatggggaaagtccgctcgtaatgttaagatcactttatccaacaagacttcacgcccaaattcaatttttaatgcggcatctaactgctgattaatcccccatgattgataaggatacggcccatgataaagattagcgaaggtaccatcaatcgcattacaagcaaaaaaagtggcatcatttcgcgtttccacgttggcagatgcatgaggatacgcaccagtaaaatgttgtaaatcatgtggatttaacgcccaattacgataactcttaatttcttctttagtggcaatacgcacacttatataaggtttcttggtttcaaaacgatacgctgctcgcgcttcgatagcgttttcattttttatgattggaaacgtccatttttgttctggaacataaatcaaactgctgtcaagcgtagcatctaacttcaccattaaataagtattgggcgtatctaaacaaacttgaatcacatcgccgtcttgtaattgacaatcccgagcagctaaacaaacaaaatcttttcctgtaatagttaactctttcaaagratctgaatcatctatcttagcttttctaacttcttgttcttgatttaaaatcgataatgraatacacgtcatatgcttccctcctagttttacctntattatatattattttagtaaattaatatattttttactaaaataacgactaattaaagcataatgtttagatcaaaaaataaaaaggcttttcttaaaagtcttcttttgttcaaactgattatctttaagatttaaaaagtgggacataagttgagccgacccccaaaagttagatttctaggtctaactttttggagtcggctcaagtcgaaatgactaatgtcccactttcaataaaaaaagaataaatttatgattttttctgatcatcttcatccattttcgattccgacaactggcctctaaagcccggtatatcaacatcgaaaattaaaaaatcgtctaaaaacagcttgtgacagcaatttgacagtagtaaatcgcaaaaaaaaattacacttcaaatttggtaaattcatctgctaaagtttggtttgtattaggatacagatgaccatacttatccaaagtcgtcttaacagaggaatgccccaaacgctttgaaacagcatagatattgttgttatgctcaatcaaaaaagctacatgagaatgccgtaatccatgtaagtgaattggtttgacaccagctatttcagctaatttttttactcgacctaaaaaggtctttggggacggcggtaatccatcaaaggtaaaaataaaacctaagtcatccccgatcgttttttgggtctctttccattccctcaagtctactatcgtttgcttatctagagtaatcgttcggatacttgaagcattttttgtatctgagaaatcataatctgttcttgttcgaatatagagtgatttattcacgcagcaagtacctttatgaaaatcaatatctggccattgtagcgcaaaaagttcttcacttcttagtccagttacgaacaaaaagcgcatcattcgtttataaaatgcttcttggaaatcacagcgatatgaacaattatatactttcttgaattcatcaacagtccaaaatgccacaaccgatcgttgagttctgattttcccaatagtatctactggattctcatcaatgacttccaaaaccatcgcacgtttaaaaataatccgtaacttattaaaaatctgcttaatataattattcgatagcggacgtattttcccttctttattcgtgacaaagcattcttgaacaagaaattgttgaamctcttgaatatgaatcggtctaattttytccatttgcattttcccgaaataagtaacgcgcgttttaaagtcttatcagtttttacataagttttctcaatcgtcccaagcttataccaagggaaaaaatacttcttataaaattctcgaaaartaattccttgtaaataaatctcttgagagtcagagtaattcttttttaattcttccatcgcatcttttgcttctttttgcgttttaaatcctcttctagtaggttgtattctctttccgaaacgatcatagcccagagttaaagaaaaataccaagtccccctcttttcatccttatacacatttgcaattcttctcatcagtattattcctcccaagaaatgtgtaagacttcttcaatgatactgacgggtattcgttttatttttttatttttgtaaaaagagtaccctttagtaattaaaagtgtcttacattccttgaagattttatcagcgtaatactgtgaaaaacccaactttattatatcttgccgagtggctgtcttcattctaccaccttctttttcagctgtcagctcttataaaaaatgtattcatctaccaactgctcttgtcagaaagcacataggattttcacctctccccagtaatggcgagccaatttagttacggaagtatcattattacatttgtagatcctggctcaaatttgacaattcttattttagtcatttatcgctctagtagctcatcatggcgcaacaaaaaaacgctccctacaaatggaaagtattggtagatcatctattcagttttcaatggtcgttttctttatactaataaagacaatttgaaacataaaaaagcaacttcgtgtgtaagaaagtcacttctttcagtaactgatatccaagcttacagcatcttgcctttcttgttttgaaatatttccattgctcawggrcaacagatttgaccaatgttacttgattcttcgcattctctcttgcgtagctatcacaataaagatagtctttgaatccgcyacaaagaacttcagtgcttaggaaacttacgatttggctaattaycgatgragttacatctaagtggttcatggggaagtagtaaaatcgcagaaaacttctttttattctgacgtttctctacttaaaaaaacggtcttctaggc

SEQ ID NO: 215 - DNA, 3662 bp; double-stranded, linear
caattgtatgtgccatctgcatacgtgctgcggcaattgccactctcaacgtaatagataatatttcggcataatcaaattgattttgatcgagtggattaattaaatttcgcatttttttcaatgcactacgataacaaccttgaaacaatgtccctgacccaaatttaattttagggattttttcagccccttttgtctttgtcacatagttcataatttggtaaatatcgtattctgtaagttctttttgagtgataaattccatcagtaagcgtacattgctttcttcaccactgattgtaaacccttgccgcgcttggcgaattaaggttaaatcatatgcttgcagcaaccgttcgacctgttccaaatcactgacaattgtgtttcgactcactaataattcatctgctagctgctgtgccgttaagtaccctttgactgacaataactgaaaaatcaatacattgactcgtcttttttgatcaggataggtttcaaatcgatcgacatcgataatttcattttttaacagtaagcgtttagagtcaggtaaatctagccagattcccttatttcgttttgaataaagtgtctcatcgtgctgttcaaaccaagcacgaatatcttctaaatcatacttaattgttcgaacgctgacagtaaagctctcagctaattcttgcgtggtaatactcccttccaaatccaaaagcatcaataaaatatttatcgctcttttggacaacaacacggtcatgccttgtcacctcttttcttttccctttacacttaaaactatagcgttattttatctgttccacaacacaaaaaagttgcacttataaaagtgcaacacttctcttttcatacaaaaaaaatcccttaacagtagtaactgttaagggataccacactatttatttgcataaatagacagaaaccttctccacaaaagtattctgtccgacacgttacaaatccggtaactgatagccgtactatctggtgtcgttgtgtttgacaatcactagccgtcaaaacggaatagccgaagctatctgattgagtcaactcgtcgcataaaacacactttaacacagaatagtttggatagcaagtgatggtaattattcgttatcgaaccattcttgataaaaactttcaacaattttaacggttgctatcgttaattctttcgtcattactgggctagttaactttttgtcttgtaaacattgattcacatgattgatttcatacgtaaattcactagtgaattgttcagaccatttgacagtgttgccttgagcatctgtataataagcacaatctgttttccagaaattaggaataacgatttgccctttcgtcccacaaatggtcatttcactaggtatctttaaaccaacattaataaaaatattgcccagcgtcccttcagcaaatttcaaagctaaattacattgactatccgtcgccccttgctgatacgttgcggttcccgtaacctcttgaatctctttccctaatacgtattgtaagtattgtaatggataacttcctgagccatgaagcgctccaccacccgcttctctcgagtaaaaccagggaatatgatccacattgggataggcagtaactgactgaacccataaaatctctcccaatcccccttcttgaatcgttgcctttactttttgggtaattggtaaaaagacagacttctgagcttccattagaaaaaccccttgctcctgtgcgattgcaaagagttcttctgcttcagcagcatttaatgtaaatggtttttccagtaggacgggttttccttgtgataacgcaagcttagctgctgagtaatgtccttgattgtaggtgggaatataaataatatcaattgtttcatccttacataactcttcataactgccataagccaccggaatcgctaattctttagccattttttgagcattctctaaacgccttgatgcaatcccgcgcacttcagcttgcgcgctttctcgaagccctgctacaaatcttgggacaatttgggcagtactcataattccataacgaattttatccatgtgatcgcctcctctttcactatacgagaaaaacgaatatttggaaaccatttcaacaaaaaaagaaaccgtttccccaaaacgatttctttatatgtaaattaacggataccaacgctaacttttaaagcttgattgacctgttccatctcttcacgagaaagttgacaaaccttgtgtagcattcgttctttatccaatgttcgaatttgttctaacaaaataagtgatggcgtcctgcactcgttatggggaatttcgataaggacttgcgttggttgcagccgcttgcttacgttacgggtaatcggtgcaacaatcaacgttggactaaataagttacctttgttattttgaataatcaggacaggtcgaatcccaccttgttcagaaccaacaactggtgagagattcgcataaaaaacctcacctctttttatcattcagattcccttccctccttttcctttaaaaaattatagcatattgtttcttgcaatattttcaactttttagctatcccttaaaatatttgataaaaccaccctttaaaagtcaaaaaaagcttaaacagtcgactctgatatagagacggctatttaagctgactattacatttttgttaaaatactatccacttttgtattaattaaatcaatagcgacgtggttttcgccaccttctggcacaatgatatctgcataacgtttcgtaggttcaataaattggtgatacatgggcttgacgactgtcaaatattgttcaatcacagaatccaacgtacggccacgttcttccatatcacgcttgattcgacgaataatacggatgtcatcatctgtatccacatacactttaatatccattaaatcccttaagcggcgatcttctaaaattaaaatcccttcaagaataattacttctttcggttcttgtatcaccgtttctgtacttcttgtatgcgcaacgtagtcataaactggcttttcaatggcttgataatttaacagttgttcaacatgttgaatcaataaatctgtatcaaacgcaaaaggatgatcataattggtatttaaacgttcttcaaaactcaaatggctctgatctttataataagaatcctgttctaacatcataattgaatgatcgggaaaattattaaaaatcgcacggctaacactggtttttccgcttcctgatccgccagtaacaccaatgataattggctgactatctttcatgtataaacctctttcttttcaaaaacttcattgtcttttactattataatgaaaactctgaagaatgccagaccttttccaagacttttcatgtgatttttatcttcttatgaaaaatctgcccacacttctttcaattacagtatacttatcaataaaaggagaatcctacctatgattaaaaaagtcaaaaaagaagcacttacaacggcgcattacgctcktcctktatgagggcagatycctcaaaaaaaatggggggcagattaccatacccgcgggnatttggctttggactatccgactggaagaactttccang

SEQ ID NO: 216 - DNA, 7750 bp; double-stranded, linear
tgantatgaacgacgttatgatgagcaccaaggactaattttgggttcagtgacaacagccattcctttatcaaaagaacaacatcaagcaatggaagaaaaagctgcccaattattagggtatgaacaagcgcatttagtcaatttaattgacccgtcaattgtcggcggagtggttattgaagcaaaccatcaagtaatcgatggcagcatccgcaaacaattagaacatatgcagcagaagttattaaaataatctttaggactacaaagaggtgaattgaatggctatcaaagcagaagaaatcagtgccttgattaaagaacaaatcgaaaactatcaacaacagcttgctgttgaagaagttggaacagtcacttacgtcggtgacggaattgcccgcgcccacggtttagaaaatgccatgagtggagaacttgttgagttttcaaacggttcatacggaatggcacaaaacttagaaacaaatgatgtagggattattatccttggcgattttgaaaccattcgtgaaggagataaagtacaacgcacaggcaaaatcatggaagtacccgttggggaagctttgattggccgtgttgttaatccattaggtcaaccattagatggtttaggcgaaattaaaacagacaaaacacgtcctgtggaagcaacagctcccggtgttatgcaacgtcaatctgttgctgaaccaatgcaaactggcttaaaagccattgatgccctcgtaccaattggtcgtggacaacgggaattagttattggagaccgtaaaacagggaaaacatcgattgcaattgatacaattattaaccaaaaaggacaagatgtaatttgtatttatgtagcgattggtcaaaaagaatctactgttcgtaaccaagtagaaacacttcgtaaatttggtgccttagattatacaatcgttgtgactgcaggggcttcacaaccagcaccattactttacattgcaccatatgcaggaactgcaatgggtgaagaattcatgtataacggcaaacatgtcttaattatttttgatgacttatcaaaacaagccgtggcttatcgtgaactttctctactattacgccgtccaccaggtcgtgaagcttatccaggggatgtcttctatttacactcacgtttattagaacgtgcagctaaattaagtgatgaattaggtggcggttcaatgacagccttaccattcgttgaaacacaagcaggcgatatttctgcttatattccaacaaacgttatttcaatcactgatggacaaattttcttagaaagcgacttgttctatgcaggcactcgtccagccgttgatgctgggttatctgtttctcgggtcggaggatcagcgcaaatcaaagcaatgaaaaaagttgccggaacgcttcgtttagacttagctagttaccgtgagttagaagcctttacacaatttggctctgatttagatgcggcaacacaagctaaattaaaccgtggtcgtcgtacggtagaaattttaaaacaaaaactacatgcgccactgcctgtagaaaaacaagtcttaattttatatgcgttaacacacggctttttagatagcgtgagcgtagataaaattttacactttgaacaagatttattcgattattttgatggcaaacatgcagacttattggaaaccattcgtacaacgaaagacttaccagatactgatgcattagatgcagcgattacagagttttctgaaatgtttgcagcggcaaacaatagcggagattcagccaaagaagctttagaaaaaatcgataacgcataagagaggtgagcgacattgggtgcttcattaaacgaaatcaaacaacgcattgcatcaacaaaaaagacaagccaaattaccaaagcgatgcaaatggtttctgcagccaaattgaccaagtcagaaggcgcctctaaaagctttcaagaatattcttcaaaaattcgtagtgtcgttacgcatttagtagctgctcagttaagtgaattacgtgaaacagaacaatcttctcttagtgaagggaactatcatgtgatgttagcacaacgacctgtcaaaaaaacaggctatatcgttatcacttctgacaaagggttagttggtggctacaatagctcaatcttaaaacaaaccatgagtatgattcaagaagaccatgattctaataaagaatatgccttaatcgctattggtggtacaggggcggatttctttaaagcacgcggaatcgatgtttcctatgagctaagaggcttaacggatcaaccaacgtttgaagaagtccgtaagattgtgacaacggcaacgactatgtaccaaaacgaagtgttngatgaattgtatgtttgttataatcaccacgttaactcactaacgagtcagtttcgtgtggaaaaaatgttgccaattactgatttagatccatcagaggcgacctcttacgaacaagaatatcttttagagccttcacctgaagcaatcttggatcaattattaccacaatatgcagaaagcttaatttatggggcgatcattgatgcgaaaacagcagaacatgctgctgggatgaccgccatgaaaacagccactgacaatgcgcaaaatattattagcgatttaacaatttcttataaccgtgctcgtcaaggggcgattacccaagaaattacagaaattgttgctggtgcagctgcactagaataatctagtcttacgtttgaacgtttataaaaatgttcaaagcgtgtgactttatgaagactggaggaaagaaattatgagttcaggaaagattgttcaagtaatcggtcccgttgttgacgtggaattttcattagatcaatccttacccgatattaacaacgctttagtcgtttataaaaatggcgaacaaaacaaaaagtagtacttgaagtcgctttagaactaggtgatggagtgattcgttctatcgctatggaatcgacagatggtttacaacgtggaatggaagttatcgatacaggaaaatcaatttcagttcctgttggtaaagatacattaggtcgtgtgtttaacgttttaggagacacaattgacttagaagcgccattccctgcagatgctgaacgtagtgrgattcataaaaaagcgccagcatttgatgaattaagtaccagtaatgaaattttagaaacagggattaaagttattgacttattagcaccttatctaaaaggtggtaaagtcggacttttcggtggtgccggtgttggtaaaaccgtcttaattcaagaattaattcataatattgcccaagaacatggagggatttccgtctttactggtgttggtgaacggacacgtgaagggaacgacctgtactatgaaatgaaagattcaggcgttattgaaaaaacagccatggtttttggtcaaatgaacgaaccaccaggtgcacggatgcgtgtggccttaactgggttaacgattgctgaatatttccgtgatgtggaaggacaagacgtgctattatttattgataacattttccgtttcacccaagccggttcagaagtttctgcccttttaggtcggatgccgtcagccgttggttaccaaccaaccttagcgactgaaatgggacaattacaagaacggattacttcaacgaaaaaaggatcaattacctctattcaagcaatctatgttccagccgatgactataccgatccagcgccagcaacagcgtttgcccatttggatgcaacaactaacttggaacgtaaattaaccgaacaagggatttatccagcggtagatccgttagcttcatcttctagtgccttggctcctgaaattgttggagaagaacactacgaakkggctaccgaagtgcaacatattttacaacgttaccgtgaattacaagatatcatcgctattttagggatggacgaattatcagatgacgaaaaagtacttgttggtcgcgcacgccgtgttcaattcttcttatctcaaaactttaacgttgctgaacaatttacaggtcaacctggttcttatgtaccagttgcggaaacagttcgtggctttaaagaaattcttgaaggtaaacatgacaatctgccagaagaagccttccgtagtgtcggtaaaattgaagatgccatcgaaaaagcgaaacaattaaactactagaaaggcggcaaacacaatggatagtcttactgtgaatgtagtaacgcctaatggtctagtttatgaccaccatgcaaaaatcgttgtggcgaaaacaacagatggtgaaattggtattttaccaaaacatgcgccaatcatcgttccgctagcgattgatgaagtccgcatcaaacggaccgattcagatacacatgttgactgggtagctgtaaatggtggtatcatggaagtccgtgataatgtcgtttctattattgccgatagtgccgaacgtgaacgagatatcgatgtacctcgtgctgaacgagcaaaacaacgagcagaacgtttaattgaagaagccaaagcaaaagatgaccgcgatcaactacgtcgtgcgactgttgctttgcatcgtgcaatcaaccggatcaacgtatcgaaacatgggtaaaaaaggctgaaggattcagtcacttttgtagagtttaaggcgcttgctattgagtcagttgccttaaactctatttcttcgtattttttaataaatagtgtcaaattttggcatttcaagtggattaattatcggtttttattattttgtgataaaatgttcctacgttagaaaaaaggaggctccttatgcaatactatggagtagatgctattgttcgaatcgttagtcatcttatgttcatttacataagtttttgggcgttgcaatcattgcgtattgagcaatttttcaaaacccaatttacaccgcaaatcagaatgttgatggtatttttcgccatcgctatcggatacacagttagctcgtttgctttagaattgattgcgctttgtcgaaatcttttcattgtgtattttccttaaaaattgaaaaataaaaaaaggtacaatttttagttgaataatggtataatagtaaagattttgaataggaatacctattctcatttttttggggggaacaaaatggaacaaattattgttcatggtggtaatacaaaattagaaggaactgtaaaaattgaaggcgccaaaaacgctgttttaccaattttagcagctactcttttagctgaagaaggcgttactactttaaaaaatgtaccaattttatctgatgtatttacaatgaatcaagtaattaagcatttgaatgtagccattgattttgatgaagacgcgaatgaagtaacaatagacgcaacacaacctttagggatcgaagcaaactatgagtacgttagtaaaatgcgtgcttctatcgttgtaatgggacctttattggctcgtaatggtcatgccaaagtggcaatgccaggtggctgtgccattgggaaacgaccattgatttacacttaaaaggcttccaagcattaggtgcaaaaatcatccaaaaaaatggttatattgaagcaattgcggatgaactaatcggtaacactatttacttagacttcccaagtgtcggcgctacgcaaaacattatgatggctgctgttcgtgcgaaaggaacaactatcattgaaaacgttgctcgtgaacctgaaatcgttgacttagcaaacattttaaacaaaatgggtgccaatgttatcggtgctgggacagaaacgatgcgtatcgaaggcgtcgataaattacatgccgtagagcattcaatcgttcaagatcgaattgaagcaggtacgttcatggtagctgcagcaatgactgagggcaatgttttaattgaagaagcaatttctgaacataatcgtccgctaatttctaaattaactgaaatgggtgcaatcattgaagaagaagaaaacggcatccgtgtaattggtccaaaacatctaaaaccaacagatgttaagacaatgccgcatcctggtttcccaacagacatgcaagcacaaatgacagcgatccaaatgtttgctgaaggaacaagcatcgtgacagaaacagtctttgaaaatcgttaccaacacttagaggaaatgcgtcgaatgaacgctgacttaaaaattgacggcaacattgccgttattaatggtggcaacgagttacaaggagcagcagtggaagccactgatttacgggcagctgccgcattgattttagtagggttacgtgcaaatggcattacacgtgtctctaatttgaaatatttagatcgtggctattatgagttccataaaaaacttcaaaaattaggcgcgaacgttgaacgtgtcaatgatgaaaaaattgaagaaaaacaagcaacgacagtaatctaaaggagtcaaacgtatgagttcatttcgttatattttagtaacattattgaaaattctagtggtcmtttcgttagtcattatcttatttgttgtgggamcaatgattggttatggtttgattggaaatgggaatccaatggatgtctttgatgaaaaaatttggactcatattatgaacttctttaaataaaaacttattttaaggcggtgaacaaaagtcaattgacgattgttcaccgccttttctttttcctgaatatctattttattctatgctataataatagaagtaagataatgaaggagtgggatggaagatgcaagcaaccgtaacagaaataggcaaacatgcaatcgatgattcagaaaaaatgattattctttttggagaaactgctaccgataccttgaagcaacatgcagttattcaatcattcccagaaaaagaccaagttaccttggcagaaggagatcatctgaaaattggcgatacaaactatacaatcacaaaagtgggttcttttgccaatagtaacttgcaaagtatcgctcacagcactttaatctttgctgatgcaccaaccgatgaggatgatgttatccggaatggtgtttatttaacgccccatcagttaccaaagataactattggaacaacaattgattatttagtaaatggagcgtgaatcaatggataaaaaacaaacgactgataaacgcctgtcttggttttggcgttggtttttaaataatcaagtagtaacagccttactgattgtcttattggtgctgttaattattctaacttttacgaaagtttcttatttatttaagcccgtctggcagtttttcggcgttgtcggcttaccagtaattatggcggggattttatattatttattaaatccaattgtcgattatttagagaaaaaacaaatctcacgtgtctggagtattatcggcctatttattttaattgtggcactactcatttggggtggtattgtaatcgttcctaaaattcgtgagcaatctgtcagctttgtgaatcattttcctcaatatattgatacaattgatcaaaaatcgcaggaaatattaagtgatccacttttcgcgcaatttagagaacaacttgaagcggcaggcgataaagttgtcagctcgttaggtaccatcattaaaaacgtctcaacgtycacagtacmaggaattggtaatttcnttggggcggtggctacg

SEQ ID NO: 217 - DNA, 8395 bp; double-stranded, linear
gcccccagaatgttccaaaagaaattttgtatgcatttttaattgtgctggcgattgatagggctggtgacttactgagttgatataatcagccaaactttccgctttcgttaacagttctcgattttgttcattccaattattgccaaagtctttaaacggataaagtaaacctagctgaacttctggatattccgtttttaattccccaactacttcagctgtccaaagttcaacacctaaattgccagaaatcaaaatccattctactcccgtttcaatataactggctaactctttttttaagacatttttaataactgtgattttcgggtcttttccttgaaatatccccaattcaaagctgcgataaccggtgacatagagggtttttatcatttccataagtcatcccttttctttcaggtcttttttttggtataatacaggctaggagtgtgataaacgtgacgttccattatcctaacggaataccttataatcatcatgaagcacaatcaccaaaaaaacaagtaaaaaagaaacgccccgttgaatttggtaatcgtgggatggatttcgaagaagcgatcaatcaaagcaatcaatattatctattgaataagcaagcagtcgttcataagaaaccaactcctgttcaaattgttaaagtagattatcccaaacgaagtgcgggctgttattaaggaggcctactttagacaagcttcaacgactgattataacggtgtatatcaaggccgttacatagattttgaagcgaaagaaacgaaaaataccacgtcctttccctttaaaaattttcatcaacatcaaattgatcatatggaacaatgtatagcacaacaagggatttgttttgtgctattatggttttcaagcttaaaacgctgcttcttttttagtggtgaaaatctaataacgcattggaaaaaccaagcagttactggaaaaaaatctatgccgcttgcactcatcgagaaagaaggaattgaattatcttttggaatcgcaccgcgaatcccttatctcgacgcagtggaacaatatattcagacacactagattcataaagttttgaaagtataacaaaggagttgctatttatgccaaccgcaaattcaggctcgcgagctgctagacatgcatccaacacctcatcgaagtcaagttacaagaaaaagacacaaccgccgaaaaagaaaaaacggcttgttttaaaaatctttcttggcttacttatcgctgggatggtcgcttttttagcaggcgttggtcttttttggttctatgcacgacaagccccaaaattagaagatgacaaactgaatgcgacagtttcatcgaagctttacgatattaataatgaaatttttgaggatttaggcgcagaaaagcgtgaattaattcaaccaaatgatgtgcctcaattattaaaagatgccattgtttctgtcgaagaccgtcgtttctataaacacattggtgtggatccgattcggattatcggttctgccctttcaaatgtcaaaaatggtggattacaaggcggaagtaccttaacccaacaattaattaaattgtcctacttctctacaaaagaatctgaccaaaccttgaaacggaaagcacaagaagcatggatggctgttcgtttagaacgtgaaaaatcaaaagaagaaattttaacttactacattaacaaagtctacatggcgaatggtttttatggaatggaaacagcggctgaaaattattatggtaaacatttatctgaacttgatttaccacaaacggccctactggcaggaatgccacaagcgccaaactcatatgatccctatacaaagccagatactgctaaagaacgccgggatgttgtactttacacaatgtacgacaataaaaaaatctcgaaagccgagtacgaaaaagccaaagctaccccaatcgatgaaggcttagtgccattaaaagccagtgatgacaatcgaaaagtcgtagataattacgtcaaagaagtaatcaatgaagtgaaagcaaaaactggtaaaaatgtttacacagacggactagatatctacacaaacttagatatgaatgcccaaaaacaactttacgatattgtcaacagtgatcaatacgttgcgtttccagatgataaaatgcaagtggcttcaaccgttattgatgttgcctctggacaagtccgagcacaaattggtggtcgtcacattcctgatgatgtgcaattaggaaacaatttagctgttaacacccaacgtgatgttggttcaaccgtgaaaccaatcatggattatggtcccgcaattgagaatttaaattattcgacaggtcgcctcatggtggataaaccaacgaaatatcctggtaccgacattgatgtcttcaactctgatttgacataccaaggcgtcattactatgcgccgtgcgattatgggttctcgtaacacaaccgcggtccagacgtttgatgaagttggtaaagaaaacatcatgcctttcattaaaggactaggaattgactataaaaacttagaagcgtcaaatgccatttcaagtaacacaagcgatgtagatggcgataaatacgggatttcctcattgaagttagcagcagcttatgcggctttcgccaataacgggatttataacaaaccgtattacgtaaacaaagtcgttttcaatgatggaactagcgttgattatcaacctgatggtaaacgtgcgatgaaagactctaccgcctatatgatgacggatatgttaaaagatgttttaaacggcggaacaggatttaacggcgccattccaggcttaatccaagcggccaaaacagggacttctaactatactgatgaagatttagcgcgaatgggcacaacagaaaaaggaattgccccggatagtacctttgttggttatacaacacactatgccgtttctgtttggactggatacatgatcgaatacaccaatctatcaagaatactatggaattgcctcggatgtttatcgtgaaataatgagttacttgtctcaaaatgtttcaaacgatgactgggtgcagccagacagtgttgtgcgggtaggtaatgaattatacgtgaaagatgcctatgaggtaccaaatgtacaagttttaccaagtactacctcttcagcaccacagccggaatctagcagtacggtggaatcctcttccacaaaagaagcggaaagttcatcaagttctagttcagaaagtgcgccttcttcctctgaagcgccaccatcaaccgaacaaccggcaagctcttcctcagcagagcaaccggcaacatcagaacaaccacctgaaccttcaagttctagttcacaagaaccgccgcaaccacctgaaagtagttctaaaccagatgaaaataaagcagcataaaaagtacggggctcatgatgagccccgtacttttttagattaaaaatggacgaagtgaactgaatcacttcgtccatttttgcttatttactttctttatttgccaaagctgcaccaacaaatcctttgattaagcgttgtgggcgatttggacgagaaattaattctgggtggaattgacaagccacaaaaaattgtttttcaggaatttcaacaatctcaactaaacgattatctggtgaaactccagagaaaactaagccattttcttcaaataattgacgatatttgttgttaaattcataacgatgacggtgacgttcttggacaacatcttcatttccgtatgctgccgcagttttcgttccttttttcaatttacatggatataaacctaaacgtagtgtgccacctaaattctcaatgttttcttgatctgccattaaatcaataatgttatttgtcacgtcaggattagtttctgcagaaccagcatcttctaagcccacaacgttacgaccaaattctacacaggccatttgcatacctaagcaaatgccaaggaatggtacgtcattttcgcgagcaaaacgaatcgcttcaatttttccttcaattccacgatcaccaaaaccaccaggaaccaaaataccatctgctgaaccaattctttcagcgacattttcagcagttaattcttgtgaatcaacccaatcaatttcgatatctgaatcaaaatcaaacccagcatgttttaatgcttctacaacagaaatataggcatctggtaattcaacatatttaccaaccagcgcaatttttgttttctttttcaagttargaactttttcttctaatgcacgccactcagtcatgtctgcagccggtgcgtccaattttaaatgatcacaaacaatttgatccatgttttgtgcttgaagtgctaatggaatggagtacaatgtttcaacatcacgagattcaattaccgcttctggattaacatcacagaattgtgctaatttgtttttagtgttttgagaaacaggtaattctgtacggaccactaaaatatttggttgaatccctaaacttcttaattctttgacactatgttgtgttggtttagttttcatttcgccagccgcttttaagtaaggaatcaaggttgtatggatgtacattacgttgtcactacccatatcagctttcatttgacgcaatgcttctaggaaaggtaatgattcgatgtcgccgacagtaccacctacttctgtgataatcacatcggcatccgtcattttcgctgcacgcataattttttctttgatttcattggtaatgtgtggaataacttgcactgttgcacctaagtattcccctttacgttctttacgtaagacttctgaataaattttcccagtggttacgtttgagtatttatttaagttaatatcaataaaacgttcatagtgacctaagtccaaatctgtttcggcaccatcatctgtgacaaaaacctctccatgttggtaaggactcattgtccccggatccacattaatatatggatcgaatttttgaatcgttacttttaatccacgattttttaataatcgtcctaaagatgctgcgacaatcccttttccgatagaagaaaccacgccacctgtaacaaagatgtattttgtcataatagttaaaaaccctttctttgataatattttgtagagagaagtaaaacaactttgagactcttacgtttctccaaataaaaaagaaacaaaaatagaaaagctccctatccattacgaatagggagcttgtaagttcgttcaaacttctgaccttcttaaaggtgcccaagtagtataatacaagcaaacggacatcaggtcaagtacttctattcaagaaaataattttttctattttctcatttttcttggacattcaactaaaaagcttgactccttcttaggaatcaagctttttggtttcttactcttcagaatattcgtcatcaaaatcgtcttcatcttcaacatcatcgtcatcaatgatcgttaaatcttcttcgatttgcggaatgtcttcttcatcatcgtctgaatctgcaccaatctcttgtaagtcagagttgtatgctttgatttcttcatcttcatcttcttcatcatcgtacaagatgtcttcttcatcatcatttgttaattcagcatcttctggatcgtcatcgttatagtcaattacatcttcatcgtttggattagtgatgaaggcatttacttttttacgttttctacgacgtggtgcatcttcttcgtcttcttccaagccatgtgtaacttcttcatcgattgaatcgattggataccatgaacgtaagccccaacgattgtctcccaatgagataaagctaccgtcgatgtttaaatctgtataaaattgtgctaattggtcacgaatttcactatcagacttgccaagataattttggatttggttaactaaatcagaaaaatccattacatctgcatgttgttctaaaatagcgtgtgctacttcaatcatggataattcttttttgtttaacccttcaaatacattaatttccaagaggtacacgtcctttcacagtctactccttatcatacaaaaacattgaaaaaaaatcaattctattctgcaatatttatgcagtaaattctaattctaaatgatattctccgattcgctctgtttgagagtataaatcataatcaactaaaatcttaccagacattggttggtcttttaaactaacacgcaaattatgtgtaaacgtactaatctgtagcaagccataaggggttcgataacttgtatctaatttttcctgatagccaaatcttaaacgcatccgtaattcaccggcacgaatcaactgaacatgcccgtctggttcaattttaatggttacgggggttggctctgtatcctctaataattcttctttgtaacgaatgtataatgtatcacccatttttactaattgaccttctaagtcaaagaaaaaatctttttgttcgttgccttgttggacaatcgtttttagttgaatcgatacaggaacgcctgttgataaatccataatggtcactccttttccaaaatataactttcttattgttgactttttcaatgtatttgtcaactaaagtcaatttttccttgtttatgtaccttttcttattgtataagctcttttcacgggttgcaagcatttgtttcatctatttaataagaaaaccgtttactattttagagaattccttcagaattcgkttatataacatgcttttttgcgttttttgtatataatataagagagagtaagaaaataaacgtattaaatgacgtaattataaatagacaggacgttttttatgagcacaacttttccccttcacaccgaatcatttatgctccttgattcaggttgtttaacaaacagtgactattttttaccttttgctttgaccgatgttttaactactttttcaggaatgcagcaccaaccaatcattcatttctggcaattggatcaagcaatgattcttggcatgaaagatacccgtgtaccacatctaaaagaaggcatcgcttctctgcaagaaaacgattattctgtagtcgttcgcaatgccggcggtttaggggtgattgccgattcgggtattttaaatgtttcacttattttaccaaataattctgaacacaaattaagtatcgatgcggcttatgaattaatgtgggcttggctccgtcagagttttccggagaaagagattgacgcctttgaaattactacatcctattgtcccggtacttatgatttaagtattggcggtcaaaagtttgcagggattgcccaacgacgcgtcaaagacggtatttctgtcatgatttacatcagcgttaacggcaatcaacttgctcgtggagaagtggttcgagacttttaccttgctgggttacaagaacaatttggtgaaaatggctatccacccgttgatccagcagtgatggcaaatttagaaaccctgattgagactccattaacaatagacgccgtaaaaacccgtttaatcgaagcattacctcaacaatttgaaaaatctattgatccaaacttaaccgaaccaattataacctcagaatggttccaaacaaatttaactgtccagctggaaaaaatggcgcaacgaaacgccttaattaaaggagagatcttatgacgattccgtataaagagcaacgattaccaatcgaaaaagtttttcgtgatcccgtccataattatattcatgtccaacatcaagtgattttagaccttattaattctgctgaagtgcaacgattacgtcgcattaagcaactaggtacttcttcttttacgtttcacggtgccgaacatagtcgtttttcccattctttgggtgtttacgaaattacacgtcggatttgtgagattttccaacgtaactactctgtggaacgattaggtgaaaacggctggaatgatgacgagcgcctgattacactttgcgcagctttattacatgatgtcggtcatggtccttattcacatacattcgagcatatttttgatacaaaccatgaagcaatcacggtccaaatcatcacctcaccagaaacggaagtctatcaaattttaaatcgtgtttcggcagattttcctgaaaaagtcgccagcgttattactaaacaatacccaaatcctcaagtggtgcaaatgatttctagtcaaattgatgccgatcgcatggactatctgttacgtgatgcttactttacagggacggaatacggaaccttcgatttaactagaatcttacgtgtgattcgaccatacaaaggaggcattgcc

SEQ ID NO: 218 - DNA, 5360 bp; double-stranded, linear
aaactatatcactggaatccmaaaggcggtaccagcacttggtcattggataagaaaatgcaaggaaaaacgaatttacatttatatgaattaacagatcaagggcgtattgacaaaggcgcaattgccactacaaataaccaagtgaccatccaagccgaggctaatacaccgtatgtcattgctgaacctgacagtattgaaccgatgacatttggaacaggaacaccatttaaagatcctggatttaatgaagccaataccttaaaamataactggaaagttttccgaggtgatggagaggttaaaaaagatgccaatggtgattatgtctttagttcagaaaaagaaagaaccgaaatcaaacaagatatcaatcttcctaaaccaggaaaatatagtttgtatctaaacacagaaacacatgatcgtaaagccacagtaactgttaaaattggtggtaagaaatatacgcggacagtgaataattcggttgcccaaaactacattcaggcagatattaaccatacaagcaggaaaaatccgcagtatatgcaaaatatgcgaattgattttgaaatcccagataatgccaaaaaaggctcggtgacattagcggttgataaaggcaattccgttacaaaatttgatgatttacgaattgttgagcgtcaaacggatatcatgaacccagacaaacaaacagttattaagcaagattttgaagacacacaagcagttgggttatatccgtttgttaaaggctcagctggtggtgtagaagatccacggattcatttatcagaaagaaatgaaccttacacacaatatggttggaatggaaaccttgtttcagatgtattagaaggcaactggtccttgaaagcccataaacaaggagcaggattgatgcttcaaacaattccgcaaaatattaaatttgaaccgaacaagaaatatacggtccaatttgattatcaaactgatggtgaaaatgtctttactgctgggaccattaatggggagttgaaaaataacaatgactttaagccagtcggtgagttaacttcgacagcagcagatggtcaaaccaagcattatgaagcagaaataattggggatgcttcaggaaacactacgtttggtatttttacaacaggtgccgataaagatttcattatggataactttacggtcacagtggaatcaaaaaaataaatttagtctatctaagcaacttggtctacaagttaaacgtacttgtagcccaagttgcttcttttatgaaaagaagcaaggtctagtgcctcatttttatactgcagaataaaccgacacattttttaaagtgtcaggcttctttgtgtatttcatcaagaacgaatggacaaacttgccttttgccacaaatcgtttacmattacmatgataggcataatttatttagaggtgaagtgattgaagaaatacaatgttgattggaaytactgggttgtccgctttttatttgtaatggcgctgattgttggctatttattaatcacgaattatcagcactttgtccatagtgtttcgggtttattaggcatcttatccccattcattactgggtttgtgattgcttatttattgagtggaagtcagaaaaaaatcgagggattactagaaagagttcctttaccagtcgttaaaaaagcgaaacacggcttgagcgtactccttttgtacctgattattttgtttatttttgttttgacattaaactatatcgttccgctactcattagtaatttagtagatttagcaaactctttacccactttttatgatcacatggttcagtttgtaatgagtttagaagataaagggattttaaaaacagccgcgattgaaaaatatttaaatagtgtccttaaagatttgtcgccagaacgttttttaaatcaatggacacaagcgttgttttcattaggaacgttgactaaaaatgtttcatcattctttttaaatgcatttttgacgttgattatctcaatatatgcgctggtatttaagcaatctattttgacatttgttgaaaaggctgcccacaaattgctgtctgaaaaagtgtacaagcaaacacaaacttggttaaatacaacgaataaaattttctataaatttatcagctgccaatttcttgatgcttgtataattggcgtttcatcaacgattttgttaagtattttgaatgtgaaatttgctgtgactttggggattttattaggtatttgtaatatgattccttattttggttcgatttttgcgtcaattgttgctggtgtgattacgcttttcacaggtggtgttactcaagcaattacggtgttactagttttattaattttacaacaaattgacggcaatattattggtcctcgaattatgggagatgccctaaatgtcaatccgattttaattattgtttcaatcacgattgggggagcgtacttcggcgtcttagggatgtttttagcagttcctgttgctgcaatcattaaaattattgtctcggagtggctaaatgaatcaaaagaaaatgataagattgtagattctattgaatcctaaagtaaaacttttcgtcgcgcgttgacgaaaagttttttagtggaaaagaaagtttaattatttggaatttttgatatgctatacttaaagtaaataaaaaatcaaaattgaggtgaatagatgcagtttttaaaaaaatatggcggctattttttagttttaggggtcttacttgatttttttacaccttattatgtcggattcaaagatcaaggttacaatcaattgacagaagtaattagcttattaggtgatgtgaatagtccagttagggaaaactttaatcggttaactatcattgcgggaatgttgatgttagcaagtttacctaggatatatgctattttttccagaaaaacgaaaaaaggtgcttggttagtagtggcaatgattggcgcttatggtttatttgattgtattttcagtgggctcttcagcgtagacacttcaagcgctggcacagttgctgccgcgcttcataacggaggatcagcagtcggttatacaggctttttgttgttatcaggcgtcttaaccattatctacagtaaatacggttcgcaaaaaaataaaaacctttttggctttttgtttattttatgtatgcttgcagccggcttatatggcttagcaaggattccacagttgcaacaggtaaaaccatttaattatttaggcttatggcaaagagtgagttcattttgtaattatctaccaatgctggcactgtgtttacaaactaaaaccaatgacaaatttgattgaacatttgtcattggttttttactagttaaaattgtctggtaataacttaattattggctacggtgacttcaccagtaacagtggcaccatctttttctaagtcagcagaatctttgtattcttgtttatcaaaagtaatattgccattaactttggtaccatttaaagtaaagccatttgctttcacctcaatatcacctttgacagtcccgtgaacgatgttgaaattttcagaagaaacgattagcttaggaaccgtgatttcatattcagcagttacttttttattatcatcttgggaataaagtgctaatttacgatagacatcgttggaatctttccccttatcatggaaagtaccagcaactgttacctctttatcaaaagtgacattgtcagtagctgcgacaatccaatttcctttatcacttaacgccatttcgagctcttcaggcttggcactaattgaagcaccagagactacttctgtacttgaattagctgtttctttgctactagaactactatctgtttttttatcagatgaacaagcactaagcaacacaagagcagcagttgccgtcaaaacagtggtgagtactttagacattttcatgaaaatccctccaaaaaatttatttatttcttcctttatcataactgattcaaagggaaatgagtaatcatacactcaaagattgagaagtttggctaatgggaaattaggcttattctctcaagaaggttcaggaaatattcaaagtaatcatttctttttcaaatgttccttttctgtagtaagctagtaatagacagaatttaaggaggagattttgatgccttggaatatgaatgattatcctacatcaatgaaaaatttagcacctttgattcggaaaaaagcgatagatattggcaatgcgttgcttgcggatggctaccctgatgatcgcgccattccaattgcgattagtcaagcggagaaatggtatcaagaggcaagtgcagcagacaaaaaggcatttgaacaagaagcaaatcctacgaaacaagattcgcataaacaggataaacatgcgggaaaattattaacggcggctgtcaacgttwmatmtaaagacggccaatggttggtgatttcagacagcgctgaaaaagcaagtaatacatttccccacaaacmagaggcgattgaacgagcccaagaaattgctcggaataagcaaacaaagctgaaaatctataagcaagatggtacgttacaagaaaccaaagagtatactgaataatttttcgaaaccttgatattccgttgcaattcaagaaacggttatcaaggtttttttgcgagggagaaatggacaagtaagaaaaaataacaaaagttaagaatgagaataagacttgcttttctagtttttggtgggtacaattacactaattaagataaaaaatcaaaataattgaggtgctacgacaatggaaaaagccaatcttgattggaataatttaggattttcttacattaaaacgccctttcgttatattagttattggcgagatggcaagtgggaagaaggcacgctaacagataacaatcagttaacgattagtgaaggttcgcctgctctacattatggccaacaatgttttgaaggattaaaagcgtatcaatgtgcagatggttctgtcaatttgtttcgtccagatgaaaatgccaaacggctacaaaaaagttgtgcgcgtctactgatgccacaagtgccagtagaaacctttgtttctgcatgccaagaagtggtgaaagccaaccttgcttatttaccgccatatggaacgggcggtacgttgtatcttcgcccttatatgattggtgtcggcgataatattggcgtanacctgccaaagaatacattttttccaatgattgcgtgccggntggttcgattttaaaaatgggttagcaccaaccaactttatcg

SEQ ID NO: 219 - DNA, 1644 bp; double-stranded, linear
tggccatgcttatctattaattcccgctgtgtttatcggcatttgcctttactttatttttaactcacgtacgatgcaacgaaagaaggcaaaagtgtcacggctaaattgtcggcgggcttagggctgaacttattaattgctttaccagcctttctatatttattatcagttggcacagcgcaaataccttatgtgctttttctgttcttactttttctattgttaatggatcttttgctgacctttctatttgctgcttacgtcttgtattcatggatgtaccaaatgattcctttaaaaaaagcggttgattatatcattgttttaggttcgggaattcgtagcgaggaagtacctccacttttgaagagtcggttagataaagggattgaatattatgaaaaaaatcccactgctaaatttgtagtcagcggtggtcaaggtcctgacgaacctgtggccgaagctttcgcaatgaaaaaatatttgctttcacaaaatattcctgcagaagcaattttgatggaggaccaatccacaaccacttatgaaaatatggttgttttctaaagcaataattcaggcagattggcaaaagatgccgtctgattctaaacaaccctctgttattttttcaacaaataactatcatgtcttacgaggagctatgtatgcccatcgtgtcggcttaaaagctgaaggtgtcggggcgccaactgccttatattttttaccaactgctctaatccgagaatacattgccttactggttcatgatragcgaattgtgctttttgtttttctacttgtcactcttcttttaggaatcagtatcttacccatctaaaaaaacarcgactcacatttttgtgagtcgctgtttttattcttttaatataaaaaggtttaatgaacgtaattggctatcaatgcaatcagccataaatggagcggatagaatccgtaaaataaatatttgaaaaatggtgctttgctccctctctcaccattgtaaagcgatataaagggtaacacagtgataaacataaaatcagaattataagctaacatttcaattgtcgttggccaatctcccaaccattgaaaacttgtaactaagaaaaagagcgctaatgcaccatataaacagttccgtaagacaagtctctttctggctaaatacgtaatcaacataaaaggtaacatcacaatgccaccttcagcaaacattgctcctattcctaaaattgctagtatactaatcaataaaacaatttttaaactgatttttggcatctctagcatcgcttttgtcacaattamcatactgacaccaagggctaaggtgaagaaaatattgttgtgaacagcgacagyggattattcactaaatgatttagaagcgtatttccaacaaacatgattgctgcccaaatatacaaacgaccattgtaacgataaacattccgtgtatagttgaaaccttctacagccatgtaaccmaaaaacacaccgacacmacgagtaattacatgaaaaatcagtgcccattctgggcggaacaaaataactaatatgggccaggaccattaaccccatcatcaataactttaagcgatttgcgtccaggaatcgcccctt

SEQ ID NO: 220 - DNA, 5926 bp; double-stranded, linear
nccncgtcactargaatcagctacgtcacgaagggaaagtacctgccattgtttacggttaccaaattgaaagtacaccaatctattttgaagaaaaagacttatcaaaaattttacgcgaacatggtgctaacaccgttattaaaatgacagttgatggcaaaaacatcaacacattaatgtcgaaagcacagttagatacctttactggtcaaatgcttcatgttgaattcttatctgtaaatatgaaagaaacaacagaagtcgaagcagaagttcaattaattggtgaatctgcaggtgtgaaagctgggggtaccttagctcaaaacttgtacactgttttagtggcagccacaccagacaaattgccagaatcaattgaagtagatattacaaacttagaaattggtgatgctcttacaatcgctgatttacctgaacacaaagactatgaaattttaactgatccagaagaacaactagttgctattgttgaagcacaaactgctcctgaagaagaagaaggaacagctgctgaaacgactgaaccagaattagccgaataaagagtacacttttgttcagctgattctcttaagttttagaaatgggatgtacgttgaaacaacgtacgtcccattttctttttactgcatgtcgtgatttcttcacataaatgatgacacctgcaaagctaggaagctacagaggaatattaaatttttgctaatctacgcaatattttcaaacgaaacaatttcttttttttaaatttgcagtatactaaaagtaagtaaacaaaaaggaggtcatccatatgtttgaacgttttgatagtgaccgtagccgctatgcttcattaggtgttgtttctagcttacctagtggcttaattgatagtatttggttgattattgacttaaatctaaaaggggttatccctttaaacgacttacttcactttgatttgttgaacaataatggcaaagtgactgtccatttttctcaagaaaatagttcagtagaaatggccatcgacttaccatttagttattctacggcatatccgtcgcgaatttttgcttttgatgatggccatcgtgaaacgattttattacctgcagaaatgttagaatcttaaataatttcaacaaagtagcctcaaattccgattaaactggaatttgaggctactttaatttcttttagttattctacaataatttgtttactacttcctgcagcattttcaaaattaatagtaaaggtttctgttgcatcatcataagtgattccgtcactttgactaattactgtgctgtaatcttttggtatttttaaagtcagtgtcttagttgtttgtgtgggatcagaraaagtatacgttttttggtgttgttgtgtctttctcattaaagaaatagctttatttgaggtaatccctgctattgtaccgccagtttctgaccaaatgttaactccaagatagccttcttcttcttgcttaactgcttgaatttcttctgtatttgagagaacttctactgtttttttggcagcatatgtttttaaatcagtttcatcgattcctggtaaaactacataagcataatgctcgttcgttgggtgttgaccatgttgaatcgtaaatgttcgataatcacctacatattctttatcacttggaaatgcttcattaattgctttataggttccttttctagtttcacttttaacatttaccgttgtttcttctggaaaataataacccatattagcattggaatgatccgactttagtaataaccattgttttttactcgtttcatttttctcatgaatctccccaatatttgatagcacttgatactgatacgcatcatttaacaaacgattatcaacaactgtctcaatcgaagcttctgtatcccctttaattcctgcgcctaatgcgataatttgcccatttaatacaaaccaagattttttagcttgtaggttcataggtaaaagtttcccattatttttggtcccgtctttattaagagccatccctactactgcctgattgtctgacgttactccaccaacccattgctctttcgatgtgattgttgtaaatgctgaaacttcatctgccaaagaaatggtatctaccgttgttcctggtagtcgatagggatctacagttggccaatagctggaattaaattgaacctcgtcatcattatatacgtacatcattccgtcaccagtgtgccagccacgtttattttctttattccctgcttcaaaagatgcagtgcgctttgaatacaagcctagcccaaacatataactaggtgtgcgttggacaaatcgatccatcgaagcataaagtttcgtgcctgtaaaaggaagttgccctcccgtaatttctggattagttaaaagttgcatagtcatctgtaaatcattaaaatcacgagcatttgtcaaataataatctgggttctccttcatccaatatttaacggcttcttgaaatttcttttgataattattaggggcaaatttagccacaattaataaattatacatggtagttgagccgtagcctgtttttccaactgctggggctcttgagatggaacggccattcacggttggtagcatttcacctttataaatcaaaggaagaaaggcacgatcaacattttcaacaaattctgtcacaagagttgcatccatttgaaaagatgaatctgctgtaatggccaaaatttgtccaacccctttcaccaaaacattgccatacgaacctgtataaggaatgttattgtgctggataaaagaaccatcttggtaaaaaccatcaccttttgtgactaatttaaatacatcgacgatactactggatgcttggttaattttcccgctatccttttgtaaaattcctaaccccaaaacagttaaagctaagtccgttcggttcgctcctgatgtcacaaaatttgggataaaagctaaatccacaaacgttccttgtggttttgtatacaactgtttaaacggatctgggacataactgctcagcgcatttgtatagatttgttgcttttctggagaaactttatcctctaaaatcattagaatattaagaaacttctgtggcacaccaatttgccagtcccaccaatttccatggtactttttcccatcatatcctttttgcgttaccataaaatctaagccatcaataatggttgctgccaatttgtcatcttggtaaagcgtactccccttcgttccataggntaacgctaatttttgcaatttggtaaattgagtcgttaaatcagccgatggcgtattgccaggctctagtggccataaatagctgcggttcggctctttattcatcgtttgatcgagttctgttgcttcattggagattttttggacgtagtctacaagcgcttggttagttgaatcatattcttttgaaacaagctgatttcgccatttttcttttaattctcggtattctgcagatgaatcgataacaggaatgctaccaacggggccacttttcatagaaatgatattcagctttgatagattaccaaatagtctaattcctacagcacccatccagtcatcattaatggacgtaccatcaggataatgaacctcttcattttcataaaataattgatcattcaggaatgtttgaatttttttcccatcatagcgaactagcagtttatattgttgaccacttagtaatgttggtcccggaatattagttagccatttaccgcctggttgtcctaactgccagcgaccgtcacgattataagcaaaagattgccattgactcgtcttttgtttatctccgcgaaaaaccaatccgaagttactttgcccttcatataaaaaggttagttcaagatctcctgaagattgttcgcgtgcatcaagattgatagagacagattcgaggtttgtcccttgcttcgtgtttgcgatccataaaccagcagaatcattctttttttctgctgttcctaccaaatcttgccaatgcccaacttgattggggaaatctgaaatgtaagagggttgctcaatcgtttggctcgcttcgttttcttctgcaaaagtaagggtggttcccataaatccattcgtcaaagcagtaaacagtccgaccagcattacccatattttcctgtttttcattctttctcctcctaaaaaattatcgtaaaacgcttacatccgaattagagaaaaagagtgaagaaaaatactttctacactctccgactctctgaaaatcacttaatatactttttacgccaaaataccaaaggcactcaaaacaatcgataaaattaaaataatccaaatcactcgtgtggaatttagtttcttttgacctaacatccaataagtcaaaagaacaagtaagattggaactaaggaaggcaaaatcgcatctaacgtatcttgaataactaattcgaccccgttctttttataaacaaaaggaactgtcgccttgataactgaaggaattaaggcaccaatcacagtcacaccaagaacagttgctgcattcgtaaaggcagataacttgtcttttaaggtcgtcactagtttgaccccttgcttataaccaagtggtaagagcgcggcccgaccaaacaatagtgcaatatttgcaataatccaaataacacagccaaccaccgaaccattttgagccagtgtccctgcaacagagccgaaaatcgtcccccaaataacgtggaataaagagtccccaacgcctgccaaagaacccatcagagctgtttttagcgcaataattgtttctttcgctttatagccatcttgctcttcaatcgcaacatcaatccccataattaaattcccaaaaatagcattggtgttaaaaaattgattgtgtgtgcgcatcatatcttgaaattgtgcttcatcatgaccatagaatttttttaaaacaggtaagatgccgtataaatatcctgaactcatcatacgttcatagttccagtttaattggcttcctaaaatataacgccagctaattgcatttaattctttttttgtcagtttatgcttactcatcgccgtcatatcctccttcaaaatcaccatttcctgttgttgcttgtgtcgtgctttttgccccatcacgtttaaatacaagcatcgctgctaccatcccaactatcgaaacacctaacattggaacttttaaataagccgctaagaaaaagcctaatagtaaataggggatatattgcttcgttggcaagtaacgtaataaaatccctacaccgacaacaggtaatactcctccagctgtttttaagcccgtcattagccattctggcatgttatcggtaatcgttgttactacagcatcccccgctaataacattaataaaatcggaatggcacgagacagtccccatagaacagaaccagataaaactaaacgtggaatccgttttacttgcatcttatcaatcgctttatcgacactatgaagtaaaaagacattacaaaaacgggcgactacatctagttgcaacatcaacagagmaacaggaacagctaaaccaatgccatactccgctccttttccagagattacagcgaaagcggttcctaaaacagcccctgtgaaataatcaggtaccgatgctccaccaaaagcagcaattcctaaacgcattaattgaagagtgccgccaaccattaaaccagtttttaaatctcccataatacattccagaaatcattccagcaatagctggttgcgtcaacgtatttgaaataagtggtcattaatagcnataaacgcttaatagtaattaagataatttgatacggctgctaaatgctt

SEQ ID NO: 221 - DNA, 9121 bp; double-stranded, linear
ggatatagaaacccaacggttncaaacagcaaaaaaaatggcaaaaatattacaagttccgtggacaattttttttgatgaagaagtactcgaaacgtatgatttttgataggrggataaaatgacaaccaaagaaaaaattgaatttatcaaacaagtaacacytcattcagattcagaagtagagaaaattattaaaggaatgagcgataccagtattaaccgctggtatgaaatagagaaatatcgcattgatcaagaattagaagaagcggtgttaactatctattgttaaaagaatacacctatatcagtcggatagaaataacaaattatacgaaatgaggtaaaaatgacgaaatctataaaactaaacaaacaattaagaaaagcagcttttaaaaaaggattaagccaaaaacaagtggcccaattagtatattttgcacatactacaacaaatggtcactttaatggctacccagtaccgccagaaagtgctatagcctataacgaattatttaacgatagtgagttggcatttgcattaggccaagagttattgggcctaatagggctagcaactggagtgaaagtaaaaaaagagccattagcgctttcggtactaaaggaaaaagaggaacgagaaagagaaaaaatcgaagtggaaaacgaaatcgattatttaatggcgattccagttgaagaattgaccgaaaaacaaaaacaggcaatattacagtattgtagcgaatattcagatgaattgttgtttgaagtttctcttatttgtaagcaattagaactaatagggatgtcctttatggatttaatgatattaagaacaccttattggaaaaataaagaatggattgaataaaggagggaagtaatttggagtcaaacattagtatgcaagatgtgtctaagagactttctaggaatctatatatgatgatgggaactcctagagaggataccaaaaaaatttggaaggtatctgagctttcaaaagcaagcggagttacaccatgtgttattagtcggattaaaaatgacactgaaggaaaagaaaaaccgactattgaaacagttgttaagcttgctaaagcattaaatgttgatcctgcagaattattgaaataagaggtgaaaataaatggaaaaagaaaatatccaagaaaattatcacgaatcattaaaagagcggaaaatcaaagacactttacaagaaattaaagagagattaaatggcgtaaaactaacctaaaatgaaaggaagttaraaatgaataagaggaaaccacgtagtttatatgaagcaagaattttagggactttgttagtattcttcatacttggtctagtaataaagaacagtattccgtttaactacttacttttaatacttggacctattattgcaatttggtttatgaaatatgacgatgctaaatatcragaaaatttaaataaaaatgaaaaggaagtgtattaattgaatagaaaaatcagaagtctaataaaagaattaacagaggaatgtgacaaagaaaaagtttctcttatttgtacagctaataaccaaggtgagacagttagcgcaatttgtggcggattagtagatctatcattttgtttaggagtccaagaaaaaaagctaagtgaaaaattgccgatacatccagaaattttgcgcaaatcagcagttgaagcattggaagaagttaaatccgataatcataaacatacttttgtaatcgaaaatgcagaagatttacaagatatattaaacagaattgcttcaggtgagtttgatgaataaaaaaatgcccaatcgtttgcagacgatttaggcactaacaaaaatatactaggaaaattataacataaatttggagggagttaaatgcaaaaaaacaacaataagctaaccatgtcagcccgattcggtgaatggtacaaagaggcgactgaaaattgtgcagaacgggaattatacgcaacgtcgttaattgcacgtatggattgggtagttgatccaataagtagtaaaagttatagatatgatttaacaacagatctgaataaaaatcatagcagcgcttggtatgatgttgccactgaaatttgtaacaaacgcaaagaaacagttatacgagcaatcctagaagacaatatcaaaattgaaaatttctaataaatggaagaggaggatttcaatgtattatccaactacaaaatttgatcagtatggtgctcgccaattacctaaagaagatgtatcagaagagatagacgaaacagcagattatgacaaggatagtatgggagaaactatcgcccaagaagatggtgtatttgaaatattgtatacagtaactactgtcatgagtaatagatgtctcaaaattaaaacagagaaagcgattgttactcaacaagatattgtagattttattttagaaataggtgaagaaaaaataacatctataaaatttgtaggattaggagaaaagtatttagaaattggaggaaattataatggggaatgaattaatagtaagcgttcaaaatagaattcaggaaatgcaacatggtgaaggattgagattacccacagggtattcggtaggaaatgctttaaactcagcatatctaattcttagcgataattctaaaggaaaatcattattggaaaaatgtcaccctacatcagtgtcaaaagctttactaaatatggcaatacaaggacttagcccagcaaagantcaatgctactttgttccctacggggatcaatgtacattgatgagatcatacttcggatcagtaagcatattggaacgactttctaatgtaaaaaaagtacatgctgaagtaatcttcgaaggagatgaatttgagataggatcggaggatggtagaaccgtcgttacaaacttcaaacctagttttctgaacagagataacccaattattggggcatttgcttgggtagagcaaacagacggaatcaaagtttacacaatcatgacaaaaaaagaaatatataaatcatggagtaaagctaaaacaaaaaatgtgcaaaatgattatccgcaagagatggccaaacgcacagttctatcaagagcagcaaaaatgtttatcaattcaagtagtgacaatgatttactcgtaaaggctattaatgaaacaacagaagatgaatacgataataatcagccacgcaaagatattacacctaatccaccaaatattgaaaagcttgagaaatcaatttttaatcaagatgaaaataaaaaaattgctcaagatatgattgattccattgatttaaatcaagctgacaaagatctacaagaagagctaaatattgaatttcctgatcctagcaaaaactatttagctactggggaggtaaatggagatgttgaaaacgaagacggcccttaccctttctgataaaaattattattcaactgaagctgactggcattatatgtcggtcagccaatataaaaattttaatgaatgcgaagcagccacaatcgctagattaaaaaaaatttggttaccctgttcagatccaaaagcattgcttgttggtaattatgttcattcttactttgaatcatcaaaaattcatgatctattcaaaaaggaaaacaaagacaaaatgttttctagtagaaaaccatatgggcttctaaaagatttccaaatagctgaacaaatgattcaacgactawaagaagaacctgcttttatgaatttatataaaggggaaaaagaagtaattgttacagggcaaattgaaaatgtaaattggaaagggaaaatcgattgtctaaatttagaggatggttattttgttgatataaaaacaacaaaagatattcatgaacgtaaatggaatgatagctacgcggagckttgtacattcattgaaaactatggatatgtacttcaaatggcagtttataaagaattgcttagtcaaaagtataatagggaatttgtaccaattatagccgctgtttcaaagcagactccttctgaagtaaagctaattaccctagatgaagacaagatgcattttgaaatgatccaattaaaagaaaatattgaacatattattaaagtaaaaaatggcgaagaaaaaccaacactgtgtggtaggtgtgaatattgcagagggcaacaacgaattactcactttactaatatgaatgatttataggagggaggcagatatggcaagacctttaaaacaaggaattgactactttccgctttctgtagattttttaagagatataaaggttcgtaaaatcaaacgtgcgtgtggaccttacactgtcgaaatactactttgcctgctgggtaatatttatcgggaaactggttattacatcgggtgggatgaagatacgatgttcttagttgctgacgaagttggggcgaaagagggtctagttgaagagacggtaaataaggccgttcaagttggattttttaatcaagagaagttcaatgagtatagaattttgacttctaacggaatacaaaaaagatatctcgaagccactaaaaaaaggaaagaagtagttatttccgacatttacttagttaatgacaccataaaggatgaagaaaccctagttaatggtgtcgataatgaacaaagtaaagtaaataaaagtaaagtagataaaagtaaagtaaataaaaacaataaagaaaaacctgccgttcagttgtcgtctgaaaaggattttttggagaatcctttaggagacaaaaaaacagcggagctaatcgcttattattcaaaaaatgttagtcttgctactcctgtaaatatgacaaatcttgcatatgatttgaaagactttaatggcgatctggatttactaaaagaagcgataaacatttgttcaagcaatgtaaaaacatatgcttattttgctggaatattaaaacagtggcgagctaacggaattaatactcatgcagattttttgaagaaagtaaataaaaaatcaaagcaaaaaaataaacgagatagtgaaccaccgctaaatgattattcaggattgttttaaggaggaatagctaatgatgaatactaaagttgcattaaagcaattaatggctacacattttattacagttgatgtcccttgtcctgaatgcggaggagcaatgacagcatggaaagaaccaactccagatactccaccaagatgtcctcccgtatgtatggaatgtggctatcgttcagtgaagaaaaaagaagcaaccactgctaagaacctttatgratctagtctgataaaaaaggcaaaagactattttttaaacggatctgtattaacggatagaaaatcactgcataaaaaaattagtaattattatccaagcaaccaagaatcaaccaaagctaaaaatattagtatggaattttgcgaaaaaacactgctgggagaaatacaccatctgattttaacagggggagttggggttgggaaatcacatctagcaattggatgtctcaacgaaatacttgttaaaagtaattattctaagaaggtactatttgtcagctatcgagagcttttagaacagttaaaatttgcgatgaatgacgaagaggcacgaaaagcaattactggtgtagcaatgtccgaaatcaaagcagcagacgtcgtagttctagatgatataggggctgaactaggcgactttaataaaagagatgaaaaaggcaatctgattcttagtagagcatcaaactttgatattgatacgctgacaggaatattggaaagtcgcatagataagccaacaattatcacctctaacctaaaatcaaaagaaattaaatattgttacggcgaaagaatagtctcaagaatggctacccattcaaatggatttatgcataggtttacaaatacaaaagattatcgattgaaaacagcgtaggaggtcatatgaaaactactataccaattacaccaaaaccacaaagccgtccgagatttgctagacgtggaaagtatgtacaagcctatgaagatagcaccatgaagacgtataagcaacmagtaaaaaactatcttagaagagcaaaacctaaattgatagaaaaagggccaatcatggcacacgtgacgttttatgtacaagcgcctaagtcagccctaagtaataaacagaagcggttagacgtaaaattagagcgcaaatactgcgataaaaagccagatttagacaactatttcaaagcagtcacggatgctgcagaaggtattctttacmaaaatgatgggcaaattgctgtgatagtttgtcaamaactatacagcttaagacctcgaacagaactcgaaataatgaaattggaggttgattcatgaaagcgcaaatggaatcttggcaagatatacaagagtatgtaaagaacaacaagaaaaaacataaacgtagaatggctaacgatgcaatgaaaaacgtcaacgagttaggatttcctttcacctatttcgaagatacttaccaatttgcaattaaaacatctatcgggatggtcgactattttggaacaactggcacatgggttgtgcgtaagaatcaagatcgtggtagagggctaaaaaaattaaagaagtatttggaacatccagttccaacaaaagaaataaaaaaaacaaagggtaatcagtcatggatgaaaaataatagataggaatgggaaaaatgaataggaataaatggcagagagtgcctgcaccaaacacacgtggtgcaaaaatgcatggatgggttagagaaatggatgaagcctacagagaggtgaatggggaatacgctgttcttgtccgaactttgaatactaaattaggcacagttaagcatgcagctatcagaaatgctacagaaactgacattacttggagtgaaaaaccagcgtattaaaaatgraatttttggagaggaaaaacaagcgattgaattttttccaaaacaatcagaattaatagatgaggctaatatgtatcatttatggattttagaggattgcgaattggaatttggaatatacgaataatttggaggtaatacttttgggtaaaaaaggttcaaagattaaaaagaaaaaacgccgacttaaagaaaaagctattgcaaatggcacatacagcaagcgagggaaaagcgatggtatgtataaaatgcaagggacagatgattgtttgggaaaaagataagttgaaacatcaaaaaggtttttattgtccgttatgcaacaaaaatgggcaaagtgttgcgaaaaagttagctgaaataaagaaaaaataagcgaaaggagtggagttttgcggccgcataaaaagctttttgctcctttgaaatgatgaaaaaaatacttgatgcatgctgtggtagcagaatgttttggtttgataagcaaaacgaccaagttttgtttatggataacagaaagcattacgaaaaattagagagtggacatattgttgctgttaatcctaacattgttgcagattttagaaagatgccgtttgatgataattcattctatcatgttgtatttgatcctccgcatttattgagagctggtagtaacagctggttggccaaaaaatatgggaagttgaatgagcaaacttggaaagaagatatccaaaaaggtttttctgagtgtatgagggtcttaaaacctaacggaacattagttttcaaatggaatgaggatcaaatcaagctatctgaaatattaagcataattgattacgaaccactttacggcaataaaagagcgaaaacgcactggttagtgtttatgaaagagagtgaagaaaatgaatcgaatggttgaagttggataggtttataaattagtcgatgcaaatccacctgcatttggaaaagtaaaaaaatctttggaggctaattatgaaattaatctatgttttatctggaaaagaagaaaataaaaactatgtaaaaaaatttgttggaaattattgcagttttggacctaaagaggatgcaaaagcatttactagtgaagaagctgaacagatgagaagactgttagagaatagtgtaggcaatgcgtttgttattgatgatgacagagaggtaaaaaatgggtttcaagtttagcgattattataatgctgaaaatatttgtctgtcagaagaaaacattagagagttacttattgcttatttagaaaaaggagaggaagaaaatgatttatattaaaaattttgtacatgattttgattcttcaacaattacctttgaagtagagcgtgatgggatcacgaattatgtaggaactagagatactggttatggaacgacttctacagatattaatgattttactgaagattggtcagattctgaatacgatcaattagaagagtttttaaacggttgtcaagaaatagtacattcattttaccattaattttttaggttggaggaataacaaatggcttatgaaaaattacatttagtaacagcgatagtaagtggagatatttatgttggtagagtcaagacggcttgatggacacaagatatcgtcgaataattacaggtgaggctattcagtcggtggcagattggttttatgtaaataaaaaaaagacagtccaatttaaaggtattgatggtaaagagcatagcttgttttatacatctgataaagaaaaagcaaaaaaaattctagctattttagaggaggaaaaacaaatgaaattttataaaatgaaagaaccttattttgcattaatcgctgctaaagatgaaaaacaatgtttaaaactttacaaggatattgtttgcgaagtagaagacgaaaaagaatttttcgatgatatgaaaacaattgataaatacgaagcgttcaaaatgcttgctaaaagtcgtattgaagatggtggagaattgggggcagaagaagctttcaatcaattagaaaatcttgaagaaaacggcgaagtattgttaatcgacggtagcttgctttaggaggrgtaatkgtgctatctattctaagaggttataaagaag

SEQ ID NO: 222 - DNA, 11597 bp; double-stranded, linear
agcccaaaattagggaaggtcttctttgacacctactttaattttcccygctttttttaattgttctactgtgaccgttttgtttgatgaagcacttttggaagttgagtcattgttgccgctaccacagccaacaatgatgcctgctaatacaagtaaggagagtccagctagccatttattttgttttttcattgttcattcctccaattttttgtttttttattcattacccgttatgaataattttacttagaaattcttttgcacgagggttttcagtgcttgtaaagaaatgttcaggcgttccttgttcaataatctgtccttggtccatgaagattacacggtcagccacttgacgagcaaagcccatctcatgtgtgacacaaaccatggtaatattttgtttggaaagatcgaccattacatctaaaacttcttgaatcatttctggatcaagtgccgaagtcggttcatcaaaaaggataatctcaggatgcatatttaaggcacgagcaatagcgacccgttgttgctgcccgccagaaagctgcgaaggataagcagaagctttatcagccaaaccgactcgttctaaatactccatgccagtacgaaccgcttcgtctttggaaacgcccatcactttaatcggtgctaacgttaaattatcaataatcgttttgtgagcatataagttaaaattttgaaagaccatggcaactttctggcgaaccttttgaatcggtgctttcggtttggtgatgtcaatgttatcaattacgacggaaccatcattgactttttccaattggttcatacaccgaattaatgtacttttgccagagccagagggtccgataatgacaattttttctccttgctctacattcaaagtaatatcttttaaaacgtgatgctccccaaaatacttatttacatgttctaaagaaatcataggcagtctcctttgcaatcatttggtagaaaagataacagaggattcggtgagaaacgtgttatttaaattaaattaaccaaatgtatttctaattgtattctcaatgtcaggaattataacatacaaaaaaatgaattactagttttttaatcgaaaaagatttccttcaaaaaaagaaataaatgagagcaaaacaggaaaaattgacaatagtccttaaaaagtagaaaataaaggcagtgaataaaaggcaaaggtaggatgagaatgagcaatcaagaagccattggattaattgattctggcgttggtggattaactgttttaaaggaagcgctaaaacaattaccaaatgaacgattaatttatttaggagatacagcccgttgcccatatggtccacgaccagccgaacaagtcgttcagtttacttgggaaatggccgattttttattgaaaaaacgaataaaaatgctagtaatcgcatgtaataccgcgacggctgtcgcattagaagaaattaaagctgccttgccaattccagttgtcggtgttattttacctggcgcacgagcagccgttaaagtcacaaaaaataacaagattggtgtcataggtacgttagggacaatcaaaagtgcttcctatgaaatcgccattaaaagtaaggcaccaacaattgaggtgactagtttagattgccctaaatttgtccccattgttgaaagtaatcaatatcgttcttccgtagcaaaaaaaattgtggcagaaacacttcaagcactacaattaaaaggacttgatacgttgattttaggttgtacccattacccgttgttacgtccggtgattcaaaatgtgatggggagtcatgtgacattaattgactcaggagccgaaacagttggcgaagtcagcatgcttctcgattattttgacattgcccacacgcctgaagcgcctacacagccccatgaattttatacaactggttctgcaaaaatgtttgaagagattgcaagcagttggctkggwatagagaacttaaaagcacaacagattcacttaggaggaaacgaaaatgattagacatgatagtcgtgcaccaaaagaattgcgaaagatcactattgaaaccaatgtttttaaacatccagaaggttcggtgggttatttcgtttggcgatacaaagtaatttgctcagcccactgtcgaagaaaagnttcccccatttttacgaggcgggggaacaggttgggtagcagctgaatatagcatgctccctcgcgcgacgaacacaagaaatattcgggaaagtgcgaaaggaaaattaacagggcgaacaatggagattcaacgtttgattgggcggtcattgcgagctgttgttgacttagaaaagttaggggaacggagcattgttgtcgattgtgatgtgattcaagcagatgggggaacccgtacagctagtattacaggcgcttttgttgctctacgcttagcagtcaatcatttattgatgactggtgcactagcggaagacccaattaaagagcatttagctgctgtcagcgtgggtattttacccgatggttattgtgtgctggacttagattacgcagaggactcgaatgctgcagtggatatgaacatcgtgatgaccgagtctggtgaatttgtggaaattcaaggaacgggtgaagaagctaccttctcaggagatgagttaaatgccatgctcttttatggaaaaacagggattgaggaattaattgcgtatcagaaagaagcgctttatgctttagcctctgaagaagtcccttcgcaagattcagaagagaaagtgattgtcattgcgactagaaatcctggtaaagcgaaagagtttagttcaatttttggtgaaaaaggatatacagttaagacgttattagattatccgaatttgccagatgtagaagaaactggtcgaacatttgaagaaaatgctcgtctaaaagctgaaacaattgcagaaattttacagaaaccagtactagcagatgattcaggattaattgttgatgccttaggaggaatgccagggatttattctgctcgttttgctggtgagccaactaacgatgcttcaaataatgcgaaactactacatgagttaacgggcgtgccaaaagaaaaaagacaagcgcgtttccattgtacattggtttttgctgaaccaaagaaagaaagtctggtggtcgaagctgaatggccaggagaagtcggtacgattcctcgtggtgaaggaggctttgggtacgattcacttttctatgttccagagcttggtaagacggcagctgaattgtctggagaagagaaaaataaagttagtcatcgtggacaagcagtggcaaaattaaaagaacaatgggaagaatggctaaaaaaataggagttgaaacgtatgaaaatcttggtagtaagcgataatcatggcgaccgtgactgtttagttgatttagtgaatcattatgaaggacaagtcgatgcactctttcactgtggtgattctgaattagaaccgacagatgaactttggcaaaaattcattgtagtccaaggaaattgtgatttttatgatgaatttcccaaaactgtgactaaaaaagtgggggatcaagttatttatatgacacatggtcatttggccaatgttagaatggggctcacgacacttgctttacaagcggaagaagcaggagcgacaattgccttatttggtcacactcatgtactcggcgcagagcgacacaataacattctctttgttaatccgggaagtattcgtttacctcgtggaccagttcaagagaaaacatatgccataattgaaagtacacctgaacaatatctcgttcagtattataacaaagagcaccaaccgttggaacgattaaaggcaacgtttacgaagtaagtgaatgttaagaaataagtgctacttttttatttatcagattttgagcgtaggacaaaaatctctttttgatttttgtcctacgctctttttttagtcgacttggataacctttaagccggtcttacgaagttctgtaattaaagttgatgagcaatgtttgtctgtaatcaaacaatcaaaagcggtaatatcagcaattttaaatttagacgtcaagccgatttttcgatggtccgcgaccagaatttttacttttgttgtttgttttatcataagctcattaatttttgcttcattgaaaatttttgtagtgacgccatgttctaaactgaccccgctacagccaattacgcaaacatcggcatgcgttgcggtgattgtgttaatggcaatatctcctaccagaacttctttgggaaaacgtaattcgcctccggtcaaaatataattgtattgagaaacatgaggcttggtggcaatttttaaattattcgttacgatggtcagatggtcggcctttaaataatggagaatattcaaagcagtggaacttgaattaatgaaaacggtatcataatcacttagatagctacaagcaacacgagcaatggcttgttttaataactccggtcctgattgatcaaagtctttctgattttggtcgttgtaaatacaatacccatattttcgaatgatgtcattcttagtttctaagacatttaaatcacgacgaattgtgcttaaggaaacatttaaagcatctgctaatttataggtagtcatttgtttgtttttttgcagcagcgcgagaatgttttgttgccttttttcaatggtttctaatgaacttttcaagtaatacaacctcctttagttatttttttggacacggtcccccatgaaatagtataactcataggaaaacaaaacacgtaaaagaatcattaaaagtgcaaacaatcatataaaagggttttcattgtgattttttgcggctatgattttcttataaagcataacacaatcatttgagaagaggagtggtagcatgagcaaatcgattcatgaaattacaaaagaaagttggttgaaggcgacatttccagaatggggcacttatttaaacgaagaaattaatcagacaactgtgcttcaaggaacggttgcactctggtggcttggttgtacaggcatttggctgaaaacgcatgagaacacgaatattttatgtgatttatggtgtggaacaggaaaacaaacgcacgggaacggcttaatgaaaaatggccatcaaatgatgcgcatgagtggttgccaaaaaatgcaacctaatttaagaacacaaccttttgtgattgatccttttgaaataaaagaggtagatgctttagttgtcacacatattcattcagaccatttggatattcacacagctgctgctgttcatcaaaattgtcctaaggctctatttattggtccaaaagaagtagtgaaaacatggcagcgttggggtgttccggcagaaaaaacacgggttatagagcctggtcaagaaataaaagtgaatgatgtgaatgtagtggccttggaagcttttgatcgaaccgcgctaattacttctgatgatcctgaaaatacatttaaaggtaaaatgcctcaggacatgaatgaactagctgtcaattatctatttgaaacctcaggtggtacggtatatcacgccggagactctcattattctaacttgtttgcgaaacatggtaatcaatatgcaattgatgtttgcttaggagcatatggcgaaaatcctcgcggtatcacagataaaataacttctgttgatatgttgagaatggccgaatctttaaatgcgaaagtagtcattcctgttcattatgatatttggtctaattttatggcggatccaaaagaaatcatggaaatttggaaatttaaaaaagatcgtttacattatcaatttaaaccatatatttggcaagtgggtggcaaatttgtttatccagatgacaaagacaacttagaatttaactttgatcgtggctttgatgatgtttttgttaaagaaaatgatacaccatttccttcattcttgtaagaaaggctggatgtacaatgttaacttatttttgggagcaagagcttattcattaccctgataaagaaccggttagttggcaagaggcgattcaggaaagttgtttgattttactccaaaaacacatcatcgatcagagttacgtcgatgagattatccagtgtgtcgaaacgtttggaccttatatcatcattgctcctgaagtagccatgccacattcatcagaggaaagcgcaggcgtttttggaacggccatttcttttacaaaatttaagcaagcagtcacttttgctggcgatcaagaagcaaaaacagcaacattattttttacattggcagcccaaaatcccgccgaacatctggaaaatatccagcaattgatggatttattgatgacggatggcgtgattgctgacttgttagaaacaaacacgccaatggattttaaagaagttatggagaaatatcaattatagggggaaaaatcaatgggggagttcttgttaaatagttggacttattttgccacgaacgttttaacacagccagcatatttgattggtttcatcgtgttattaggttatctcttgttacggaggcccttttatgaatgtttagcaggttttctgaaagcgacagttggttattttattttgagtgttggttctggtggtttggttaataattttcgccctattctagtaggattgaaagagcgatttaatttacaggcgatggttaccgatccatatttcgggcaaaatgcagtcgatgcaggattgatgaaaacctttggacgaacctttggtgatgtgatgattttgttattgattgcatttattatgaatattttgttggttcgttttcaaaaatatacaaaattgagagccgtttttacaacagggaatgttcagattcaacaagcagctaccgctttctggattttactcttttgttttcctaacttaggtaggatcgaagtactaatttttatgggcttaattcttgggtgttattgggcagttgcttcaaatttaacggtagggattacgcaggaattaacagaaggtgctggttttgcggtagcccatcaataaatgtttggcatatttatttttgcaaaattagcagaatggttgaaaaaacgtgatcaaaagaaacatcgttcagagaaggtcgataaaaaattggaagatatcgaattaccaggatttctatccatttttaatgaaaatatggttgctacgtccattttgatgctctttttctttggcattatcttgcttgttttgggacaagattatttaattcaagctaaatttatgcaagaagggcagagtttcttcttttatatcatgaccacttcattaaattttgctgtctatttagctatcttacaattaggcgttagaacctttgtcgacgagttgacgcagtcattccaaggaatttcaaataccattttaccaggcgctgttcctgggattgatgtagcagcgactttcgggtttggctcgcccaacgcagtaacaattgggtttctctttggcgcattaggccagtttttaatgattggcttactgattctattaaagtctccgacaatcgttattgcgggttttatcccattgttttttgataacgctgtcatagctgtttatgcaaataatcgtggcggagtaaaagctgcttgtttattccccttcctttcaggtttaatccaagtaggtggctcagctttatttgctacatggattggattatctcaatatggcggttatttgggtatgttcgattgggcgacagcttggccgttatttacaatcattatgaaagttctaggctatgttggcgtagcagtggtggtgattgggttactaataattccgcaacttcagtatcgaaaaaatccagaaggttactttatgattgtcaatgattatgaacaatatgctaaaaaatttcaagagaattaaaggaggaatttgaaatgagaatacttgtttcctgtgccaatggttctggcacgagtctaatgatgatgcggagtgttgaaaaagcaatgaaagaattaggtgtaccgattacaaaaattcatcattgcgccatttcagaaggaaaaagctctgctagccaatacgacgttgtttttactccagtcaattttttacaaatgtttcagcaagcagaaaaacgcggagtcacagtgattggcattaaaaatgtaatgtctgcaaaagaaattcaagaaaaatatatggcttcagatcgttatcaaaaatctgaataaaagggtgggaaagatgaaaagaccaaacttacaaatcgctttagatcataatagcttagaagacgctttagcagattgtatgaaagtcggagaaattgtggatattatcgaagttggcactattttgtgtttacaagaaggccaaaaagcaattcgttgtttaaaacgcatgtttcctaataaaacgattgttgctgatacaaaatgtgctgatgcgggcggtacagttgctcgtaatgtcgcacaagcaggcgctgatttcatgacggtcatttgttgcgccaccttaccaacgatggctgcagctcaaaaagaagtccgagaattacaagtagaactatatggaaattggacaatgcaacaagctcgacaatggcgagaattagggattaatcaggtgatttatcatcaaagtagagatgctcttttagctggcggcagttggggagagaaagatttgaataaagttcaagaactaattgacttaggctttgaagtgtccgtcacaggtggtttaactgtcgaaacgcttgaattgtttcaaacaatggcagttgcaacatttattgcgggccgtgggattactgaatcaaaaaatcctgaacaagcagccaaagattttcaaaaaaaaatcgatcagatttggaagtgataaaatggcacgaattggactgtatgaaaaagcactcccgcaaaatttaacttgggcagaacgattaacatgggccaaaaagttagggtttgattttttagaaatgtcaattgatgaatccgatgaacgtttagcacgattggcttggacaccaagccagttacaagaattttctcaattaatggtgaaagaagatttttttatccattctttgtgcttaagtggtcatcggcggtttcctttaggctctttaaataaagaaacacgtgaaaaagggcggaaaattttatctcaagcgattcgtttggctcatcaattaaacatacgggtgattcaaatagctggctatgacgtcttttacgaagaaaaaactgccgaaacaagggaattttttcttcaaggtctgaaaaagggcgttgaggaagctgcacaatacggtgtcattctggctgttgagattatggatgacccttttatgaatagcatacaaaaatttctagaaattaaggaacaaattccgtccccttttttgcatgtttatcctgatttaggtaatttgtctgcttggccggaaaataatccggcggttgagcttgaaaagggaattgctgaaatcgctgctattcacttaaaagataccttcgctgtaacagacacatttgaagggaagtttcgggaagttacttttggagaaggctgtgttgattttacaggcttattgaaaacactcaagcggttaaactatagtggtccttttttaattgaaatgtggaatgaaacggatttgaattttcaagaaaaaattcaagccgcgcagcagtatctctatcccaaattagcagaggtgggttattatgaacaataaagcgatcatccaagcaatgaaacaacgtgtttatgaagcgaatctggctttgccaaaactgggcttagtcaaattaacgtggggcaatgttagtgaaatcaatcggtcattagggattatcgtaattaaaccaagcggcgtcaagtatcaagaaatgaccaaggaacagatggtagtgactgatttaaagggacaactattggaaaccaatgcattaaagccgtcttctgatttacccacgcatctttatctttatcaaaaaatgccagaaattggagcgattgcgcacacgcactccctgaatagtgttacgtgggctcaagcagggcgagccttacctccttacggtaccacccatgcggatgctttttatggcgctgtaccttgcacaagagcgctctctgaaagtgaaattaaagaaaactatgaagaagagactggcaaagtcattgttgaaacatttcatgaacaagaattagatcctttagcagttccaggagtgttagtttatggacatggcccatttacttggggaatgactccggaaaaagcagttgaaaacagtttgattttagatgaaatctgttcaatggcacgtttgacggaaataattaatccagatgttgaaccaattgatcattttttattggataaacactatcttagaaaacatgggatttccgcttattatggtcagtgatggctgtgatgaaacgtgtgaaaaagaaggataattgactgattaattggtcttttataaaaacttagttgtctgttatgggacaactaagtttttatttttttaagaaagcgttctcttttttgggggagaatagaacaaaacgttaattttcgtttgttaagttatgaagaatttgcgaattccaagactttttccgcagaattaggtacaataagttacgtgttaaagaattagaaatggaggcaacccaatcatgatagggactgctgtaaaagaattattattagaaaaacaagaaacgtttttagtacccgccgaaaatgtcgccaacgtaatgtgtttaaatccattaagtcacgcggcattagtcttatcgcaagttcgctattccaagattcctgtgttagataagggagatcgctttgttggcttaatcggcttgacagacgttgtagataaaatgtttgatttgacttcagtggattttgaaaaattgaatgaatttactgtggccgatgtaatggaagtcaatgttcctgtaattggtgaatcgtgggatttagaagaagtgttacatttattagtagatgcttcttttttaccagtggttgatgataatcaacgctttaaaggtatcattacacgcaaagaaattttaaaagcggtcaatcatatggcgcatgaattagaaaaacatcatcttgttctgcctaaatcagaagaagaaatgaaagtaatttaaataaaacgcaagaaactctttacttttttctcataaatgcgttattctgtatgataacacgaagtaaaggagtgctgtgattggacgcatatgagattattcagtatattggcgatgccaaaaagcaaacgcttgttaaagtaacactgaaagggcaattaaaagaagtcacgtttccagaaacaattaaggtctttaataattgtaaaactgggacattgtttggcgattgggctgacgtaaaaccttttttagaagcaamcaaagaaaaattgagattatgttgtagaaaacgatgc

SEQ ID NO: 223 - DNA, 24601 bp; double-stranded, linear
ttattttttaattcgtaatagtttttttaaatcgtttcacagaattactttaattgttatacagtttttttagttgtnaaaanggggaaatnggcctttaggaggtaatcatgattgagttagtgaatgtgtcgaaagtctatcaagagacacacgcgttaaaaaatattcacttttctgtccaaccaggagaaatcgttgggattgttgggaaaagtggctctggcaagtccacgttgttacgtttgttgaatttaatggaacaaccgagtgaaggggagattcgtattgatggcagaaatgttcaaaccttctctaaaaaagaagttcgccagcagcaacaacaaatggggatggtgtttcagcattacaatttgttagaaaatttgaaaatttatgataatgttgcgttgcctttgaaacttttaaaagagaaacagcctgaaaaaattgagcgtttattaacgtttgttgatatggcccataaggcagaagcgtatcctgctcagctttctggtggggnaaaacagcgtgtctctattgctcgagcgttgagccgtaatccaaaatggttattatgtgacgaggcaacgagttcattagatgargraaatwcagraagtgtcgttcgactattacataagacgcatcaggaattccgaccgactattttctttgttagtcacgaattagaaaccgtgaagcgcttatgtaatcgtatcttagtgatggaaaaaggtcagttaattggcgaatttctgaataatcctcagcaatatgaggaagaaccgctttcctatttagaaaaagtggaaaggagtttgcgtccatgactttttcagaaacctttgccgaatattggccatctatgctgattggtttaaaagaaacagggattatgatgtcgatttcgatggctatctgtttgcttgtcggcttacctttaggcttaggactatttttggctaatccgaaagtcaaagggcatcaaccttggctgtactgggttttaaatttcattgtaactgttattcgctcgtttccttatttattatttgtgattgcgttgattccagttactcgttctgttttaggaaaggcgtttggcccaattccttcatctgtgccattgagtattgttgcgatcgcgatttttgctcgcttggttgaacaagtgctgttggatgttccagaagaaatttattttttagctaattcgttaggtacctcgaaagtccaatacatttggcactttttattggtggaagcacgtagcggattagtccttgcttacacaaccacgacagtgagtatggtttcatattccacggtgatgggtgttgttggtggcggcgggattggcgattttgcagttcgtgtcgggtatcaacggtatgaatacggtattatgtatgttgccattgtgattatgattgcactggtcttcattttacaaatgcttgggaacttcattgcccaaaaactagacaaaagaaagtaggaggacaaaagaatgaagaagttttatttagcmacattcgctgttattgcaacagttattttagctgcctgtgggggaaataaacaagcagaccagaaagaagacaaggagattaccgttgccgtgcaattggaatcttcaaaagatatcttggagattgccaagaaagaagctgagaaaaaagggtacaaaattaacattatggaagtgagcgacaatgttgcctacaacgatgccgtgcaacatgacgaagcggatgctaattttgcgcaacatcaacccttcatggaaatgtttaacaaagagaaaaaagctgatttagtggctgtgcaaccgatttattattttgctggtggtttctattcaaaagaataccaagatgcgaaagatttacctgaaaatgccaaagtggggattcctagcgatccaaccaatgaaggtcgtgctttagcaattttaaatgcaaacggcgtgattaaattaaaagaaggtgtcggctttaacggcacggtggcagatgtcgtggaaaatcctaaaaacatcacttttgaaagcattgatttactgaatttagctaaagcctatgatgaaaaagacatcgctatggtgttctgctacccagcctacttagaacctgctggtttaacaacgaaagatgcgatcttgttagaagataaagaagcaagtaaacattacgcattgcaagttgtgacacgcaaaggcgaaaaagatagcgaaaaaatcaaggttttaaaagaagcgatgacaacaaaagaagttgctgaatacatcaagaaaaattctaaaggcgccaatattcctgcgttttaatgaatagaaaaaatgaagcctcttttttgagaagcttcatttttttcttttctttgatttatagtatagttaataggaaggaggtgccggtgtggtcgaattatttattttaatgatggaacgggtgggcttaattattttactggcctttcttttagtgaatgtgccttattttaagcgtgttttattaagtcgtgaaaaaatgtcttcaaaagttcagttgattttgatttttggtttatttgctattatttctaattttacaggtatcgaaatcgctaagaatcagattgttcccaataatttactaacctatttaagcagcaatgcttccattgcgaatacgcgtacgttagtaattggcgtttctggattagtgggtggtccgattgtcggcagtgcggttggtttaattgctggctttcatcgggttattcaaggcggggggcatagtttcttttatgtgcctgcttctttaattgttggcttaattgccggttttttagggagccgcatggcaaagcaaactgtttttccgtctgccggcttttctgccattgtcggagcgtgcatggaaatgattcagatgatttttattttctttttcagcggtgatctatcggatggggccacgttggttcgttttattgcgctgccgatgattttgttaaatagcgtaggaacgttcatttttatgtcgattctaacgacgacattgaaacaagaagagcaggccaaagcggttcagacgcacgatgttttggaattagcagcggaaacactgccatattttcgagaaggcctcaataaaaattccagcaaaaaagttgcggagattattaagcattatacaaaagtcagtgcgattagcatgacaaacagtcatcaaattttagctcatgttggcgcaggaagcgatcatcatattccagagctagaagtcattacggagctttctcgggaagtgttacggacgggccgaatgaccatcgcgcatgccaaagaagaagttggttgttcggaccctaattgtccgttgcaagcggcgattgtgattccattattttcccatcagcaaattgttggcaccttaaaaatgtactttacagatccagcgcagttaacgcatgtcgaggagcagttagcagaaggtcttgggacaatcttttcttcacaaattgaattaggtgaagcggaagtacaatcaaaattacttaaagaagctgaaattaaatccttgcaagcgcaagtgaacccgcatttcttctttaatgccatcaatactatttccgcattaatgcggaaagacagtgaaaaagcgcggaaactattgctccaattaagcaaatactttcgaggcaacttgcagggagccgtgcaaactacgatcccagtttcacaagaactagaacaagtaaaagcctatttgtcattagaacaagcacggtttccgaatcgttatcaagtaacatttgacgtggaagaagcggttgcttcagaaaaagtaccgccgtatgcgattcaggtgttagtggaaaataccatcaagcatgcatttggcagccggaaggagaacaatcaagtccgggtagtggtcaaagcaaaacaacacaaattacatgtggatgtgtatgacaatgggcaagggattcctgaagaacgccgcttgctattaggaaagacgacagtgacttcggaaaaaggcaccggcacggcactggaaaacttgtcccgcagaatggcgaacctttatggatcagaaggttgttttttaattgaaaatttagagacaggcgggagccatgttcatttagaaatcccgatggaacaggaggaattagatgcacgtattaatcgttgatgatgagcccttagcacgagaagaattgagctatcttgtttcccaacatccgcaagtgacgagcgttgcagaagcggattctgtggcggaggcaatggaagagatgatggatcaaaagccagatttgttatttttagatattcatttgaccgatgaaagcgggtttgatttagcggaaaaattaacccatcttaaaaaagcgccctacttggtctttgcaaccgcctatgatcaatatgcgttaaaggcctttcaagtgaatgcaaaagattatattttgaaaccttttgaagaagaaaaaataacacaagtcattgaaaaagcatcgaaagaaatgggtcaagctgtcccagaaaacactgccgaaaaaggaccaaaatctgaagcaatacctattcaaggggaagaccgcatttatcttgtggcgccagaagatatttacctcgtttctgtcgaagaacggcaactgagcatttttgtagatcaacaggtctacaagatgacagggaccctcaacagtatcgaacaaaaattacctgccacgctctttattaaaacgcatcgaagtttcatcttgaatcgaacaaaaattcaagaaattcagccgtggtttaataacacgttgcaagtaattttaaccaacggctcaaaagtacctgttagccgttcatacgtcaaagaatttaaagaaaaacttggcttaagttaaaaaatcaccacttgaaatgtcgaatgcatttcaagtggtgatttttgcatttggtgaagaaattctggcatttcatgaaaaaaagcccttaaaaaaacgttttctttatatacttaacccatagaaaacagacaaaagggagcgaagaagaatggaaaagaaagtatattcatttttacaacaagcagcagtttttgccattattatgttaatcgccaacggcttggcgttcatttccccaataccaatgcctgcttcagtaattggcatggtgttattgttcattggtttatgtacaaaagttgttaaattggagcaagtggaagggctaggtaatagcttatcaacggttattacatttttatttgttccttcagggatttccttagttaattctttagggattatgcaacaatttggcgttcaaattatttttgttattttagtagcaacattagcgttactagcaacaactggttggacgggcgcctttttattgcatatgaaagatgctcgaaaagaaaaagaacccgcagcaacgaagaaagcgaaaggagaggttcgcgcatgaatccgtatgttggcattattatttcattagctgtatttggcataggtacttggttgtttaaaaaaagtaaaggtttcttcttatttacgccattattcgttgcgatgattttaggcgttgtcgttttaaaagtaacaggaattagttacgagcaatacaatgaaggtggcaaatatatcagcttctttctagagcctgcgacagtagcgtttgcgattcctttatataaaaagagagacgtgttgaaaaaatattggttagaaattttaacggcgttaacaattggttcttttggttcgctagtggctgtttattttgcaggaaaagtgattggcatggataatcatttagtggcctcaatcttaccacaagcagctacaacagcgattgccgtacctatttctcaaactgttggcggcattgcttccattacggcgtttactgtaatcttcaatggtgtactaacctatgccttgggtcgaattgcattgaaatggtttaagattaacaatccaatcgccaaaggtttagctttaggtgcggccggacatgccctaggtgtggcagttggcatagaaatgggcgaaacagaggctgctatggctagtatttctgtcgtagtggttggcgtagttactgttttagtagttcctttctttgcaacggtcattggtctataaaaaagtgggcttcctcactttttatgagtagctaatttctatcagctaacagtctctgcttattctgtgaatgctagttatcactaatccgtaggctcggagttaaaatgagtgtaaaaaagccaaccttatccatagtaaggttggcttttgcgttgttcacaggattttttgaatatagataggtcggattgaccagtctttttatagaatggttgctcctaaagtttgtttaaagtggcgtaacgcccattcgtgtccttgttcatcaaaactagcaacggcgcgttcaggaatcattaattgatagcctaaattataggcatcgacagccgtatgcaacacgcaaatatctgtacaaacaccagttaaacaaagctctgtaattcctcgttctcgtaatcgaatgtccaaatccgtgccactaaaagcagaatagtgccgtttgtccatccaataaatggttgcctcatttttgtgagcttgataaaaatcagctagcgagccaaacagattacgcccgtcagttcctaagacattgtggggcgggaaaagtttattttcaggatgatagcgatctagggggtcatgcccatcaatggcaaaaaccacaaaatcgccattgtcaaaatagtgctttgtttgttgaacaagggccgtttcaatggcttgcccagcggcaccagtggttagttttccgtctgtggcgacaaaatcattcgtataatcaatggaaatcagagctttcatttggcaacctcctaaaggttaaagtcattttgttcattttacagcttttaagaaagcatttcaaatgataaaagtacatcaaattctaaaaaagctgtttcaaaataaacgctttggctaaaaaacatgctataattttgctacaaattaaagcaggtgaatagagtgaaaagaaaaatcgtacgttttatcctttggttgttaggaatcattgtggttatttgcttaggcgtgtttctcgcctttcaattatcccctaagccaggcgcttgggtcatcaaccagttattcgcaggcgaagttgaaataaaagattcagcttcctatgataaagcattgcccaatgtccaattgcaagaaaatcmaacataccctyctycargaaaaaagaatacctttgatttgtattatccccaaacgtcaaaacaagcggtaccagtcgttttatgggtccatggtggtggctatgtgggaggagataagtctgggatgaaagagtttgcgacacgtttagtggctgattcctcagttgcctttatttcaatgaattatgaattagcaccagacgcaccttatccaagccagctccagcaggtcaatgaacttgttcaatttttattagaaaagaaacaagcgtatcccatgttagatttatctaagctttttattggcggggacagtgcgggtgcacagattgctctacaatatgcaacagttcaaaccaatgccaactatgccaaagaactagggatgactgcagcattgccggctagccatttaaaaggcacgctctcgtattgtggtccggtggatttgaaacaaatggccaaccaacaaagtgataatcgttttatgaaatttttcgttaaaacagtggcttggtccttgctcggcactaaagactggcagacgagtgcagaactgcaagaagtgagtttagtggataaagtcaccaaagaatttcccccgacgtatctaacagatggcaatagcttttcattccaagagcaaggactagccttggttcagcggttaaaaactttaaatgttccagtttcagctctctttttcaaagataagaaagcarcgatcacccacgaatatcaattcgactatcaaacaaaagaagctaaacaatgttaccaagaaacagtccagtttgtgaatacgtataaataaacagaggccttagaaatatttctaaggcctctgtttatttatttttgtcattttttcagctgagaaatatgtataaattaaacaaaaatgtttatttaatgatgtttacatgagaaaaaatccgtgctatactacgaactcgtttgttaattttaatgttaaaaacaacgtttttgttatttttgtgaacaaattaacatttttatcttacaaaaacagcaaaaaattcgtttagttaacaaaaagaaaattaaaaaataaattttttttttgaaattaagaaaatatctttaaaaaaatcagaagaaaacttcgtatacttgagccataggttggttgtggaaagtttacttcgagggaggagtgatgaagttaatgaaaaagaaaatcgctgttttattggcaacttgtttacttgtacaaccatttttatctgtttcagcgtgggcgattgaaggggagcaacaaacagaacgtacgcagacacagccaaaaacagcagaaaccagtacaagtgaagcaacaaaagaaagcagcgcacattctacagaacagtcatcaatgactgaatctagtgctatcacagaaaaagtaaccacctcttccacagaaacaaaaccaagcgaagagcagaagcaaatcacgttgacctttgaaacaacggatcaagctttgtttctaaatgatgccaaaagttatcaagtggtaaaagaaaaaaatcagccacttcggacagaagaattaccaaaatgggcgaatagtgaggaaaatgcgactttcgttggctggtcttatcaaggcaaaacatatacaaatgaagaacttcttcaattagagttttcagaagatacacaacttacggctgtctttaaacagaaactgacacgcatggccagagctgtttcaattgatcagtccattgcggacacaattgctcctgcagataaaacaaaagtgattgttgtgccaagtcctgcaggagatggagcagcgtacaaagaatatgcatcgacagaggctggcttgaaagaagccttgtttgatttgtatcaacaggggaacaatggcgatttcactctttatataggaaacaatattacgacgagtgcggcgaccaccgctaaagtgattcctgacaccgttacggcaagtaatatgaccttttacgccttgcaaggtaaggtcaatcatttagtgattactggaaacagcgcggatccgattagtatggatcaaacggcgccaacgggttctaagacgttaggatttaatcaaaatatctattttggctcaaacatcactttgagaaatctaaactatacaggtacgaatatgtatttaaatggttacagtttgaacctgaatggcggctctagtggaaacggtctgaccgtatacggtggaacggatacaggagatgtttcaggaaacccaactttaacagtaaatagtacaggtacagggacatggaatttctatggcggaaaccaaaatggtggtaatttagctggaaatcctacgattgttattaacaatacacggagcggactaaatacattaagtgggggcgccaatattgggacagtgactgggaatacttcattggttgtcaatgattctggtggcagaattgcttcaatttatgggggcggttatgggaccaacgcaaccaacacagcgaatgttactggtaacgtctcaacaaaggttgcgattacgaatgctgctacaggtttccaattaagtacgtattatggcggtgttcaatacggaaatattggtggaaaagtaacaaacgatatttctggatatggccgttggtatacagcgggtcaacgttttattggtggctcttcccgcggcgatataggaacgaatcgtgcgactgatggaattactacaaatttaaatacacagttgtatagtgcgggtcgtgcagattttgaaggaggcaaccaatattctggaacgatcatcggagatattacgaatgtggttacagcaggaacgaattccgctggtggtattaatgattttaacggcggtgctggtaacaatgtttcgaaatttaacaagagtcaaattggggcctcaaatgaagcaacgtatgatgcttatacaccacaacaaagagcagaattagccaaatcagcagcagcttttaaagtttttggaaatatttcttctaaattagtcagcggttcgtttaataatggtgcaatttactcaactgcagctggccgcggcggttatatcgaaggaaatacaacaattgaagtgggaacagcgaatggtgatgggtccttaggtggcgatggtatggcttattcaggcgcaaaaccgacaagcttagattattcaacgaccgataaaagtcgtgggtatagttcaggttgggatattgttggtggcggcggctatcctgctagtaatgatacttgggatatctatataaaaggagatactaagactgttttaaataataccattgctcgctggacatatggtggctctttttcaggtgtcgttgaaggcaatacttctaacacattgaatggcgggattgctgacacattagaaggaacaggctatcaagcagctcgagtttatggaaacggtcaaacaatcgttaataatggtcaagtcgattggtttctttcaggcggtggctggaatgatgccaaaaatgttgggaatgtcggtgtaacggtttatgaaggagtaattaatgcttcgatgggtgcttcttatggagcaagcggtggccatacaattactggtaattcagacaatcgcatctacggaggaaatttctcaggaactcctcggacaggcgcgaacggtttttcaggtgggattaccaatgcgggctcacttcttggaaatgccaaactcttaattgatttaagaaattacaacggagagtttaagttgcctggtaatacctacattactggtggtcggccctatggtcaaaatacgacactaggaacggatgaatcaaacacaattactttaaatattttcactaaaacaggtgtggaatctctaaatggggccagcatttacggtgatggtggaaccaatgctgcgtataccaagaacggcaagattacaatgaatattcaagcagcgggttctagtattggaaatttatatgcgacacagtattccaatatcagtggcggaaaaatcttacgtgatgttaccgcaaatgttcaaggtgcagttagtattaacggtttatccggtggttcatcaacagataatttcactaatgcaattgtgaatgctagttcaaataaagtggcctttaactttgggactaacgttgacggcaccaataactatcaaacagaaccactaaatgcgacaggcttaggcgttgtcaactttacggaattaaatgtcaccaatggcattaaattaatggctaatggtgggaacatcaaaaatggcgtttctgctactgccgcgaaccacagtacgacttacaatgaattcggatcaattcatctatctaaaaacgctggaattgggatcaccaacacagccaatttaatctcagctagcaaactaacggttcaggatcatgcaacattagaaacaattcctggtacaggtaaagtaaacattgcggattttgaagctgtcgatccaacaaaagatgaacttttatggattaaaccaacgacagatacaactgctttggtggatagcacagggacttggtttggaaatgtcaaagcctatcaggtcttgacgattaatccaacggtcaataatgctacaaaacttacgccaacaacgtttcatgggattgaaaaagcgactggaaaaacatttattggcgataacgatgtgaccaagggcgccaatggctatgggatagcaattcctggctccatcatcgattacgaagtggaaacgcctggaattgtggcaggtgcaggtactatttctcatgatgtaaaagaggtcaaagccggcaatgcgccattaaccttacaagcgtggggcaccgaagtagctggacaaaaagttcaaaaaggacgtttgatgattccgacctcaagtgctttaacaccaaccctaagcttccttcctgacgaataacaggttcttggttgcaccaaggaacggttaagtctagtgaagttgggagcgcgatagagcaaattccagagcaaaaagataccaccccgctttcatggaaagcgacgaatatgaactacagttatcaggtgaaagttcaattttcaaataaagtggaactttcggggcaatcggtgattgtcacagaagatgaggcagcacagctaacaactgttgataaggtagtggaaatgctcggcgcaaaaggtcggccgtttttcaagacctcattaaaagagacggatttaccacaaattcaagcgccgttagcagaaaaaactgtatcgcggacacatgatattcaattagaagcagggacgtcaggagataatttgcaaaacaaaacggttcatttagttgttgtgaaaaatgaaagtatccttgccaaagatcgttcgtttgccttgtatgcgacaagtgcgcatttgaaattaaaagaagcaaatggcttaacgaattcagacgagttggcacaatggacacaagcaacggtgattttcgcagatggtcgggccaatcaaacaccaagtcttgatgccgcaaccttccaagccattcagcaagcgaaaccagaagaattagccaaaacggtgccagccaattatcaatttacagaagctggtgaaacgttaaataaaaaagtcaatgtgtctatttcaggtgaattaacgttagaaaaagtacctaaaacaattgattttggcaaacaaaaaatttctgccaagccagaagtttactggccaactctttcagatgatttagtcgttcaagacacacgcgggtcagaaagtacgccttggaaactgaatgttcaggtaactaatcccttaacgaacggcacagatcaattggaagatttgtcattggttacagacaaaggagaatttttactcaataaaggagatacggttgttacagaaaatgaaggctcaggttcaggtagttatacaattaaccaaggttggggtgcggcaaaccaacggggacttaaactatctgtgccagtcgagaaacaaaaagttggcgaattcaaagggacattgtcatggtcattagtcatggcaccataacaaggaggagagaagtgagatgaaaaaataccttttgcttagttgttttttaggtcttttcagcttctgtcattcagacactgcgtttggagaagcagcttatgaaaatagtggtgttgtctccttttatggaacgtatgaatatcccacagaagagtcgacaacagcgactagtaattcttccacaacgaccgaacccaccaagccagctgacggaggcgcttcatccgtcctttcttctggcgtatatggatcgcgacaaggaagattaccagcgacaggtaccaccaatcaagcaccatttatttatttgggaatcagccttatcactataggcatattatttattaaaaggagaagagaagatgaaaaaaacagtattagcagtagtagggattgtaggatttagcggtgtcctagcgacacaacaagcatttgcggaagacattaacgtgaactatacaagtaatggcgccattacatttgaaccagatacagatccaacgaagccagttaacccaaccaatccagatgaaaaagttgaaccagaagatccaactgacccaactggaccaaaaccagggactgcaggccccttatcaattgactatgcttcaagctttcaatttggcgcccaaaaaatcacttccgatacgaaagattattacgcacaaattcaaacatttaaagatggaacaacaggtcccaactatgttcaggtaacggataaacgtgggacacaagaaggctggacgttaagcgctgtacaaaatgggcaattcaaaacagcccaaaatgaagaattagtgggggccgctttatcgattgccaatgcaggtgtgacatcgattgttgatgccgcatacgcgccaacaccaacagcagcacatacctttgttcctggaacagaagtagaattagtcaaagcagaagatggcaaaggaatggggacttgggtctatcgttttgggaaagatgcgacagaaggtgctactgccgtgaaattaaatgtcccaggtaaagcgattaaattagcaaaagaatatcgtacgaccttaacatggacattgaaatctgtaccaacgaatgttggaggctaagtaaatgaaaaaaacagtcgtctactccttgttattcggaacaatgttgcttggcgccactgttcctgctgaagcggcgacggtcgtttttgatagcgaacagtcgattgtttttaccccaagcacagatgggacggatccagtaaatccagaaaatcccgatccagaaaaaccagttcgaccagtcgatccaacgaatcctgatggacctaatccaggtacccctggtccactttccatcgattatgcctcaagtttggattttgggagtaatgagatatcgaataaggatcaaacgtattttgccagagcgcaaacctatagaaatccagatggttcagcaagtgaattggcaactgctaattatgtacaagtaagtgatttacggggaaccaatgctggctgggttttaaaagtgaaacaaaatggtcaatttcgtaatgcagaaacattacacaaagaattaacaggcgccaccgtcgcctttactgagcccagtgttcgctcaaatgcgacggacgtattgccgccaactgctaccgcaaacattcaattagatgctgcgggcgcagaaactgttgtcatgcaagccccagaaaagaccggcgccggaacgtggatcacgctgtgggggcaagcagaaaaagtgaccgaaaaaaatcaacaaggacagcaagtaaatgccacaatcacacgggcaatctcactaactgttcctgggaaaacccctaaggatgcagtacaatataaaacaacattgacttggctactttcagatgtaccagtaaataatggagggaaataaatgaaaaagacaaaagtaatgacattgatggcaaccacaactttaggcgcactggcacttgtaccaatgagtgcattagcagtcgacggtggtgaataccaaacaaacggagcgattcaatttgcaccaaatacgaacccaacgaatccagttgatccgacgaatccagacccagataaaccaattacaccagttgatccaactgatccgacagggcctaagccagggacagcaggtccgttatccattgactatgcatctagcttatcttttggggaacaaacgattacctcaaaaaatatgacctactatgcagaaacacaaaaatacaaagataacgctggtgccgaccaagaaggcccaaactttgttcaagtctcagataatcgtgggactgagacaggttggacgctaaaagtaaaacaaaatggtcaattcaaaactgaagccaaccaagaactaacagcggccaaagtaactttaagcaacggacgcgtggtttcagcttcacaatctgcaaagccaacgacagcgccagctacgattgaattaaacccaactggggctgaatcagtggtcatggctgctggcgataaagaaggtgcgggtacgtacttaatgagctggggcgatagtgtagataccgctaaaacaagtatttcattagaagtacctggttcaaccacaaaatatgcgaaaaaatacacgacaacttttacttggactttgacagatacacctgctaacacaggaaactaagaacgacagcatacacgcaagatcgggatataggtcaaaaattttttggcttatctttcggtcttttggtgcttataatacaacaaagaatgacagacataggagaatgaatatgaacagatggaaagtatatgcaacggtaatcgcttgtatgttatttggctggattggcgtggaggcgcacgcttctgaatttaattttgcggtcacaccaacaattcccgaaaatcaagtggataaatcaaaaacctactttgacttaaaaatggcgcctggtgccaaacaaaccgtagaaattcagttacgcaatgatacagatgaagacattaccattgaaaatacggtgaactcagcgacaacaaatttaaatggcgtagtagaatatggccaaaacgggatcaaacctgacaaaaccttacgttttaacttaaaagattatgtggaagcaccgaaagaaatcatcttgccgaagcattcccaaaagaccttacctttaaccattacgatgcctaaagattcttttgatggcgtgatggctggcggtataacactcaaagagaaaaagaaagaaacaacgacttctgcggatcaatcaaaagggttagctattaataatgaatactcctatgttgtggctattattcttcagcaaaatgagacaaaggttcaaccagatttaaaattactgggggttaaaccaggccaagtcaacgcgcgaaacgtcatcaatgtttctttacaaaacccacaagcggcctatttaaaccaattacatttaatcaacactgtttcaaaaggaggcgaaacgctttaccaatccgatactgaggatatgcaagtggcgccaaactctaactttagttacccaatttctttaaaaggggaacgattaacgccaggaaaatatgtcttgaaatcaacggcctatggtgtaaaagatgaaaagggcacctatcaagtcaaaggcgccaatggtgaagaacggtacctgtacaaatgggaatttacaaaagaatttactatttctggggacgtcgctaaagaattaaatgaaaaagacgtaaccattaaaggaaccaattggtggttgtatctactgattgcattaatcattctagcgctgctcttattgattttcttcttgtatcgtaaaaagaaaaaagaggaagaacaacaatctgagcaataaaaagggctatctattgacaaaaagggttttccttgtaaaagtaaaggtacttttacaaggaattgcttcccataaagtagaggtagagagagtgagaagccatgagaaaaaagtatctttttttatttagttctttgctaatttttacggctgtcgaaatagaaccaattcaaacattggcgacacctatttataatcccttagaaccaacggaagaaattcaaccaaaaccagaatcaatcacccctcaggaaaagtcagaaccggaacaacctgcgccaacccctccggaagatcaaaaaactacggttccttctgaagaaaaaaagccttcacccaagaaaaaagacaaacctgtggagaaaccggcaatgtcaaaagaaaaaaagaaacaaacaaaagaaacaacggctcatcccttacaagtgaataaagattttgtctttcctaacggacttggtgcaggcggcgatgaagaatctgaaagctatttagcagcggttgggtactttctttcaggaaatggattgtatgggaaaaaaatggatgtgagagaagtctatgatattgatgatgtttttaaataaagtggataaaagaaaaatcgccttatttcagttactggaaaatgcaccgatgttaacagagtcaaaagaaaccgtaatgcaggagttagaattatctgaatttattgtgaacaaaacggtcgctgaattaaatgccgattttattgaatttggtttatcagaggattttcaaattgtgagcgatggtattttcttaactcttaatgaatcaggaacggaaacttccgctaccttgattgattgctatattaaagagtcgttacgttttgctatgtttcaagatttcttttttcagcgttttgattctgtgaatgagtttgcgttagaacactttgttagtcacacattggcttataaggagttcaaggaattaaagaaaatgctggaaaattatcaaattacaattaataaagaatttcacttagtgggaaatgaaaccaatttacgcgaagtaacaacactggtttttttacaattataccaacgtgatttttcattgtacggtaaaaaagttttagagcagattcggaactttgagctatttttttctgagaaggttcatcttaatcagcgtgcgggctatgcacaagctaaatgttttcattttttggcggtttctttagtacgaacgcagcaacagttttatgtagagaaaaaagtagattcgcaagtgttaaaacaattagccggtgacaatcagcagaatgttttcaattggttagagagtcttcaaatcccagaaccacaacgaacaaacgaaggcaattatttactcttatttttaattgctgaagagtggcttcaagtagcttcagcagcactttgccaaagatttgcagaaattcaacaattgaatcgtgacttgttaagctatttaaaaatacaatttcagctttccgaggaagtcctgcaaggttttgaacaaaaagtaacaatcgtacattttaaattgttccattttccaatagaagcaaactatagttatctcaaaatggatataacctactttgcagaaacgtatacagagtatttttctgctagtcgacaatttattcaagaacaaaaaacgaatcccgctgtttgggatgccagacggtttttattttatcggtatctgttgttaatggtggatgcgttaccattgaaaaaagttttggctccgattacattgtgtgtcgacttttcctttggtgaagcctataatcgtatgatacaaaaaaatattgaaaaaattacggaatggaatatcattttcaaagcacatgtagatgaaagtgtacaattaattttatcggatattcattttgtcgattggcctgagattactcaaattatttgctagcgccaccacgtcctgttgattggtcgcattttattaaaacgctgagtgcactaagaccgcactcgggagaagagaaaaagaaatcatcgtagactagacggtgatttctttttcttttagaatataaaaattaaaaataataaaaaagttgaaactttttatgcttgtgattcgtctatataagtgtacaggaaaggaggttccagaaatcgatggttttcgatggttggaaaagaaaaaaacaaattcgcgcgttagaaacgcttgtggataccaaatatgaaaaaatgtatcgcattgcctttaactatacacattcgaaagaagatgccttggatgtgattcaagaaagctttgaaaaggcactgaaggccatccaaaaaggacccgatattaaggattttgacgcgtggttctttcgaattctgctttctgtagcgacagattattggcgtaaaaagaaacgagaagctgttcatattgaaaaagatgaacatgttttagcccttttaaataatccccaacgcagttttttagaaattgaagaaattattaatcaattagatagtcccaatcgtgaaattattctattaaaattttttgaaggatttacgctaaaagaaattgccttgatcctggatattaacgaaaatacgattaaaacgaagatgtaccgcagtttgaatgaactccgaagtctattgaattagtaaaagaaaggaagcgaaaaaataatggaagattttgtaaaaagtgttgttaaaaacttttcaaaagaataccgccaacaaccgttgccaacggatctacaagcggaagtcaaagcgcgttttcataaagagaaaaagcggtacacctggcttcgttttagaaaccgctcactgcaaagtagtctagtagtggcttgtggctttgtcttatcagtcaatttgtttccaggctttagtgaagcagcccgaaacattcctgtgttagataaaattgttcaattagtcaccatcaaaacgttgacagcgaaaaaacaggaaagtgaagtaaacatcgatgtccctaaaattcaaacatcccaagaatcttcagtagccgacacgctcaacaaaaaatacttgaaagaagcccaaacagaatttcaacaagtcaaagggcaattgtttgatggttctcgtgtttcagtcactggagattatgaaaaagtcgtggacgaccgtcgcttcctagtggtcaaacgaaccttcacagaaattaaaggcagctctgcgacgacaacgaaatatgacaccatcgacaaacgagccaatgttgtcgtttcactccccttaatttttaaaaatgatttttacattgatgtcattagtagtgaaattaaacaacaaatagcagaccaaatgaagaacgatagcaataaaatatactggtccgaaaaagaggatgcccccagtgatgttcaacccttcaaaaaaattaaaaaggaccaacctttctatatcaatgaaaaacaccaattagtgattgtgtttccccaaggagagattgcgccttactatatgggcactcctgaatttgtgattcctgatcaagtcattgaaaatgaattggcagcgcctaattatttaaaataaactcagtaaaaaacacgcgacatttcttaaaactgtcgcgtgttttttgctgacctaaccaagtcagttgcggttttactgagagaagcgtacactagaattaagcataacaagaaagggcgaatggcaatggaaaaatcagaaaaaattagtattttacaagatgtggttaaaattaaatctgtaaatggaaacgaagaagaagtggcaatctatttacaaaatcttttgaagaaatatgagatcccttctgaacttgtttcttatgcaccaaatcgtagtagtttggttgcttatttaggtgaaaaccgagaaaaagtcttagggtttagtggccacatggacgtggtttctgaaggggacgaaagtcaatggactttcccaccatttgcggcccatattgaaggaaataaattgtatggccgtggcgcaacggacatgaaaagcggcttagtcgcaatggttttagcaatgattgaattaaaagaaaagaaagtcccattaaatggagcggttaaatttttaggtacagttggtgaagaagtcggtgagctaggtgctggccaattaactgaaaaaggctatgcggatgatttaagtgccttagtcattggagaaccaaccaattataacttgatgtatgcgcacatgggttcaattaactactccgttgtgtcacacggaaaagaagcccacagttcgatgccagaagaaggcattaacgcgattaataatttgaacgaatttattacagaagcaaaccaacaaatggcggaagtcacagcaaactatgaaaatcctgaattaggccgaacgattcacaatgtaaccgtcattaaaggtggcacacaagtgaacagtattccaggtcaagcagccttgcaagggaatatccgttcaattccagaattcagcaacgaccaagtcattgcattattacaaaaaattgtcgatgaattgaacaaaaaagaaaaacatcagttagaattaacgattgattacaataaaattcctgtaaaagctgagaaagattctgcgttaattcaagccattcaagcccaatttgatcaaccattaccattagtgacaagcgctgggaccacagacttagctgaatttactaaatcagacaatacatttgattgcgttgtctttggaccaggtgtgaccactactgcacaccaagtcgacgaatatgtcgaaattgataattatttagatatgattgataagtatcaagcgatagcaaaaagttatttaaattaaaaaaatgtcgcgcctgaatcataaaaatcaggcgtgacattttttataaggtttattccaccacagtccattcatttaaggttttgccgttctcatcaactagctctaaccagctgtttgttccagcaaaatagagaaacaagccgacttcattaacgctttttaagacgatatcttccgttgtgacaaagtctttaaattggcccttgcgttcatcacgaagtttttcaccaaatctagcggagaaaccgacagacccgtctttatttaaaggggcttcgggcatcattgtcgcgccagctttaataagcatttcattgcgcttttgccaaaaaacagttgctttgctttgtcgagtatcaatataaaaaggaatttggctaacttcttttgtccatttgtggcgtgctttggctggtctggctttcttcggcgccggttttttaaacagagagtagccaaaacgttccaagataaaggtgactgtttctttatagttagtcactgtcgctaccgcacttttcggaattttgactgtcgttggggttgcttccaatgttaaaccactttctttcgcatcatctaggaaagcttgcgctaaataggcaagttctgtgtcccaagtcggtttcaataaaatcgagtgatcaaaagaaacttctttatatgtagctttttcttcagcaagtcctaaagcaactagttggttatctattagcaagaaaagaatcgctgcctcttttttcggtaatttagttgtttgttcaatgattaagtgggcctgatcggctaagtcaatgagtgtctttgttttttttagatcaacggttaaatgtaagtccatgaagtctgctcctttatcgttagtttcttcattgtatcatgaaacagcgtcttcgtcttttaacgagtcagcgaccttacaatattgtttgaaacaaaaagaagctttcgtggtatacttactcacatacataatttttaatgaggaaagtagaggaacaagaatgaaaacacttggcaatattttatggttcatctttggcggcttttttggtggcttatcttggctattcgcaggcgtgatttggtgtattacaattatcggtattccgattggtttacaatgttttaaattagcggggttgagcttttggccgtttaaaaagcgagtcgtgtatagtgatagcggcgtatctttggttgtaaacattatttggctgattatcagtggactaccattagcaattgggcattgtattagtggcttgtttctttgtctgacaatcatcggtattccgtttgggcaacagtcctttaaattggcgaaattagcgttaatgccgtttggggcccgtgttgtttcaacaaatgatttttattttgaatagtcagaggtttctcattgacaaataaaacgaaacagcgtattctgtaaatgtaacaaataacgttacatttagtttggagtgattagacatggccatgtcaacgaaattaagtgttgcgattcatattttaagtttgattgaaacaggtcctcaagaacaagtgacttctgaatacattgcttcgagcgtgaatacgaatccagtcgttgttcgacgactaatgagccagttaaaaaaagccggcttgattcattccatgcgtggagccaataaaaataccttattaaagaaaccagaagagatctcactgtatgaaatttatacagcggttgaattggaacgagagattttcaatattcatcaaaatcctaatccaaactgttccgttggggcaaatatccaatcggtactagaaactgaatttactaaagtgcaacaaaaaatggaagaagaattgaaaagtatcaccttagcagatgtgattcatgaaatagaagttaagagagataagtaatctctctacttttaaagtattaaatgtaactattttagttctatttaaaaatgaaaggatgatttacatgaaagtagcagtattaggagcaacaggaaaagaaggacaattacttttagcagaagctaaacgtcgcgggatggacgtgacagccatcgttcgtaatgcctcaaaaataacagatggcacaccgaccattgaaaaagatgtttatcaattaacaacagaagatattcaagcgtttgatgtattaattagtgccttaggattccctgatgtgcaagatttcccaaaatctacccagcatttgattgagattttaaccaatcaaaaaacgcgcttgtttgtcgttgggggcgctggaaccttgtatgtggacccagaacacacaactcaattaaaagatacaccatcattcccagcagaaattcagccattagcttcggcgatgggcgaagctttaaacttattgaaagaagctcaaaacatccactggacctatattagtcctgcagccatgtttgatgctgatggtcctgcgacaggccattatgaagtcgctggcgaagaattaacaaccaatagtcaaggtgacagctacattagttacgcagactacgccgttgccatgttagatgaagtggaaagtaatgcacacccaaatcaacgaattagtgtgtatcaataaaagaamcaaganaaatggggctccgttaaacaac

SEQ ID NO: 224 - DNA, 1405 bp; double-stranded, linear
cttccattttggcacacaaatttttmcaaagrattgagcttcaggaaataatttttttatcaggaaattattaattattacgaaaaaaatgttcattttctcacaatwcattggtataataacgttatatcgaaaggagagaaatgaatgagtgtagtattagtacttttgggtctattagggttacttgtcagcgggggactgactatcaaagcattaattaagaaacaaccgaaaaaacaatatggctatgccgcgttagcaagtgccgctctatttattggtggggttgccacgacagattcttccccgacactttcacttgatgcagagagtgttgaaaccgatgccaatggctcagccaccatcaaaggcgaatacgacggcaacagcaaactaacggccaatggcaaggaagtaaaaacgaaagacaaaacgtttgcttacaaagtaaaactgtccgatgaaaaaacgcaaaaaatcacttttgttgctgagaagaaagataccaaagttgaaaaatcagtcgaagtcacaccgtcaaaagaatttattgcgagcatcacagattctgagcaagaattggccaaaacagaaaaagccttagcttacgctgaaaaacaaccttctcagaaaaactatgatgaagccgcaaccttagtatcttcattaagtcaagaatacgaggaatacaatgatcgccttgaaaaaatcaaagaagcagtacctgttgatgaagcagttacaactgctgaaaaatctaaaagtaaaagcgattatcaagcagctgaaaaattagtagctgctgccccagttggcaaagaaggatttcaacaacgattaacgactgttcaaaccgctatcgctgaaaaagaaaaaaatgaacaattagtcgccagtgcaactgccgctgttgaaaaagctgaacaagaaccaaccaatgaagcttactataatgaagcggtcaaacaaattgacgctttaaactccccaaatcaagctttaacaaaacgggtagccgttgttaaaactcaattagatgcccacaaagaaaaacaacgaaaagaagcagaagctcagaaactagccgctgaaaaagcgcaaaaagaacaagccgaagcggcagcaaaagcgcaagctgaagcagaggcgcaacaagccgcacaggcgccggcggaagtcgagacggctgctgcggaagcaccaagcggtaacgccttaattaaagggtcacgtaatggaatttatcatgtacctggaagtagatattataatagaactacgaatccagtagcttggttctctactgttgaagaagcagaagcagcaggataccgagcacccaaacagtwaatacttagcaataattaatcaamcagnaaatgggctccgttgtttaggaggc

SEQ ID NO: 225 - DNA, 6092 bp; double-stranded, linear
tattggattacaacagtactttttgttgcaattggtggatttttacgtttttttacaatatttgatgcttcaaacgaattatatctaaacgtccagaattttttagaaggctcagaaaactcaattagttttgaccacaatttattgattatcttgtatattatagttctaacagtcatcgcgctgactattgcaagggtaaataataaacgttggctaagactaggagtataaacgacacccacttcgcagataggattcatctacttattcgagacaatagattaaatcaaataaaatacaactagttgaaactaaaaaagcatcaattttgatacgccccaaactgatatttttctaaactttggggcgtgtaatcaaaatacgagcttcttagtgtggcactggatatttcaacgcatttttcttcaacttttcttcgataatttcgtccaaatcaaaccctaaattatcagccatcatgtaggagtaaatgagaacatcagccaattcttctttgattcgttcttcttgtttgatgccttcttctgctgttttccattgaaaaagttctaacaattctgctgcttctaaacaaattgagagcgccaaatctttttcattatggtgggggcgccaatttctttcatcacgaaattgattaatttttgccattgtatccatttgttcccctgctttcttattcatttgatggcaactgaaacccaycgaacgtttcaccatcatagtattttaataactgttctgtagacaataatgaggaggttatttcttcctcttcaacaactgcttgattctcttctctatacaacaaataagcctgtaaaagctgttggtaaagtttttttcgtgaagaggcttccgctgaaagaaacgttaattcttttaagtgtccgcgatagacaggcaaatcatcaacgaattcgattggtaattctactacagttaactgaaattcttcaaagacttsttcgtacatctgccattccctctttctgtcgatattgttttggggtcatgcccatttcttctttaaaacgtttataaaaaaaggctttgtcttgatagccgattcgttcaacaatcgtttgaatcgataaatctgtttgcttcaagtagtttttcgccaattggattcggtaggctaagacaatttccgtaaacgttttgtttgttttttcttttaaaaaattcgataagtaattcggatgaaaatgaaatttagcggcgacttctgctaaagtgacatgcgcaatctgttgctcaatatacgctaaaatcacctcgacacgttgatgattcgacaaataattatcttgcatctttaaagcttctctaggcagttgacctagttccaccactagcaaaacaaaggccgctttggtcactttattattaaaataggccattttcacaatttgttttagtaataatagcgaatagacgtgaacatccgaatttggctggctggcaaaaacgaaatatcgaggaatgttttcaaattcactgctagcaatttctgtaaaaaaacgatacatgactggttcttccgccagctgatttaagagcgtatcaagaaaatagtgctttttaaaataaaatataatcatagacattccttgcccctgatagctaaccgaggtggcctcattgacaatcatgacttggccagccgaaaacgaacacctttgttgatccaaataagcatagccgtcttgctctaaacaatagagcatccgaataaatcctttcggaacgtcaatggtttccgaagatgccagcataaagcccgcaatttctcgatgtggattttccttaaattgcgctacttcattctcaagagcattggtagtggttaaataacaatctaaggtctctaaaaactgataaaatgctgcatattgttcttctttgcttgccaattaatcacctcataatccaacactttttactttactccctctatttttttctttggcgtttccttctatactagatacatggtaacacgaaaaaagagattcaacagtttttaggaggaattttttatgaaaattagttttattggtgctggaaatatggcatccgctattgccaaaggtgcgctaaaaaagcaatttattgccgcagaaaacctttatttttatgatattcaagtcgaaaaaaccgccgcttttgcacaagaaattggtgcacacgcggttgcttcgcctcaagaagctattacagtagctgacttagttattttagcagtgaaaccgcaattcgttcaagcggctttacttgaagcaaaagaagcaattttagacaagcaaccgttaattgtttccattgcggcaggtacgactattgcagaattgtatcaactgtttgagactacccaaccgcttcgtctcgttcgtgtgatgcccaatatgaatgcgttgattggcgcgggtgcagcagctgtctgtggtaacgcttttgcatcccctgaagacatccagactgttttatcgttgtttcgagcagttggccaagcctgggaattagaggaacagtatttttcgatttttactgctattgcaggtagcactcctgcgtatgctttcttatttattgattcgattgcccgagcagccgttaaaaatggtatgaacaaagagttggccttagaaattgccacacaagctgtactaggcagcgctcaaactttggcaaatagcacagagaatccttggactttaatcgaccaagtcagttctcctggtggaaccacggttgctgggattgtcgaattagaaaacaatgcgtttatttcaacagtcatcaaagggattgaggccaccatccttcgggatcaagaattagccaaacaagactgataagaataattacatgagcgaataaataagaaaaagcgctgaaaattcagcgctttttcttattttagttgaatgagtaagccaaaatgatcactgactatcggtgttttcctaccatcaaaaattacttcatattttcgtacgtgccactgttttggaacaaatgcgtagtcaatccgcaaggctgcttcattttcttcccagccatctatttttttctctactgtcgcttcaccgcttgtctcttccgctacaacaaatgcatcttgaatcggcaagtaactattttccactaattgatagccagttgtaccagctgggttgtttaaatcgcctaaaatgactaacggttgttgccccgtcgctaagtatttctctaattgtagccattcataggcaaaacctgtacagggtgtttcccaccaagaaaagtgaccagagacaacagtaagcgtaccttttgaactctctgtctccgctactaagatttttcttgttcgataattcgttggttcttggctttctgaaataaggagagcttcactagtcaacggacatttcgaaagtagtgcgttcccttcttcataaatagcataaccaatgtggctcatttcccaactccaataatagtgttggcctttttcagctagatattgaacgattagatatgcaaaattatcttcatggatcggcgtttgggtcgctatgggacaaaaagtagttaactgttctaacggcactttcttggaagcgactttctgattcacttcttgtaaggcaattatttcactttcagaagataaaatcaccttggcaatctcctctaatttttttaatggttcttcttctaaccagctatgagtattgattgttaaaagattcatcttttccccttctcttacatgttattaggtctgtgagtgggacaaaaatcactttggatttttgcttcacgcgcaaaacctgataaacggcgggaacagaaccaactccttcggaaataagccgaaattatccaaaaattaaaaagcaatttccggaaattccttcttatttctcggagttaaacggttctgtcccgacctcatacctaatcatttaaatttcaatctgtccgatcacagttcccgcagtggtggttcctagttgattaataactacttgttccactttgtcgctgtttgtaaaggcgacaataatcgttgtttctttgccagcttgttcaatcacatccaaattcattttagctagtttcgtcccagctttcaatgattgtccttctttaacaaaagattcaaaagcaggtgttgccatttcaactgtatcaattcccatatggacaagtacttcaataccttcttctgtttgtagcccaatcgcatgtttgcttgggaaaacacttagaactttccccgaaattrgtgccaccacctctccttctagaggcttaactgcaaatccatcccccatcattttttgtgaaaagacaggatcattgacttgcgccattggaataacttcccctgtcgctacagccacgaaatcttttttcttacctaagaaattcgttgttggcactcctgctgtactttctgctataactggttctggaatgtcaacgccggaagctagtaaatcttcaatatcggattttaaaacatcggcttttggtccataaacggcttgaacgccattatctttcacaatcaagcccattgcgcctgcccgtttccacgcctcttccgaaccgactttttctcgatcctttacactgacacgtaagcgtgtcatacacgcatcaacttctttgatattttgtttaccaccaagtaagtagacaatttgcgcgatttgctgatcgacgacgcctgaaccagccgcgccagatgcgatttcttcgctgttatcattgtcatagtttccatttcttccaggtgttgcgtaattaaattttttaattaagaaattcgctaagaaataagtgacaacaccaaaaatgatgaccattaaaacaaaattgattaaatcgccacctaaaccagcttttattgctagcggtgttcttgttaacaattcaatatttccaaacgaatgcacacgcaatggtaaaatatcagccattgcaaaagcagcaccttggatcaccgcataaattacataaagcggcactgcagcaaacataaacatgaattctagcggctctgtcacaccagttaagaaaacagtaaagcagcagaaaaatacattgatttatatttagcttttttatctgcatcgacattacgatacatcgccaaagccatccccattaaaatccctgaagaaccaatcatttggcctactttgaatcgagctggtgtccaattttctaagacaaactgatacttgctcatatcaccagcgcctttaagattcactaagtctgttgcccaagccaaccataaaggatcttgaccaaagacttgggttccagcttgtgcgccagataaaatttcatacgttccacctaattgtgtatagttgattggaatcgtcaacatatgatgtaacccaaaaggtaataacaaacgttccaacgttccatataagaatggcgctaaaataggtgcactatcttgagattgcgcaatccataacccaaaattattaattcccgcttgaatatttggccaaataagtgctaatgcaattgagacaattgttgaccacaaaataacgacaaatgggacaaaccgtttaccattaaaaaatgatagcgcatctggtaatttccgataattgtaatacttgttgtaagccatcgcaccgacaaaaccagcaataatccctacaaaaacacccatatttaatgccggagcttctaagacacttgtaaagaatcccttcaccataatcttggtgccaaataaggtatgcgtgaaagcttgttcatcagccaacatttcatttgttacaccaaaaatggctccagtaatacggttgattaaaacaaaagaaatccccgctgcaaatgcgccacctgcacgatctttggcccaactgccacctatgtaacgcaaatagtaaatgtaagttgccaataattgcccaaccgatactctccagaactccgcctgttgttactaacaagcctaaattaggatcgattaaaggaagcgatttcccaatactaatcattaaacccgctgcgggcattactgccacaac

SEQ ID NO: 226 - DNA, 1089 bp; double-stranded, linear
ataaactatcagcatatttatttaaagtacgaaggcttagaaggagcctaggcgaaagctgaaaataatgcaccctcttatgagatatttcaacaaacgtgctttttgcacgtttgtttttttttatcaaaatgaaaacgtagaggagggatggaatgggtgaagctaaagtaactaaaactttccgattaacagaattagtggcaagtgatttaagttgtaaagatttatttgatgaacttattgccgttttagaaattttagatgtagaagttgttaataaaaaaatagtttatttctataaaagaaacgtgaaaagtaaacaagaaaaattagaagtttgttttactagagagagtattctgcacttaattgggataagttattatgatattaatgaaagagaaacctctaagtcaagaatgaaaagtaagtatgctattgaattttatagagactttaaaagraataaattgaacttttcaaaatgttgggtagaaagtacaagaaaagtaaaagataagctcaggtattgaaatacattaaaagcataaagacagatgtggtcagaataggcgctgacggacaattaagaacaattcctatgacgaacacaatcagtacgcctaagattggtttagggattggcttatatcatgatcatccagaattctcaattcctcgttcttgtttaaatcttgctcaggataaagaagcgaaacaacatacctcgtttcgtaacgcctgtcggtgtacaaaaatttggatatatgaaagaacagaacagggtacttggaaattagaagataggcaagaattttttaaaaaaatacaggcagaaaaaagtaagaaaaaaagaagaaaaaagtaagattacgtcattaacttagtttgtaatttgctatatatcgtcagctaatgatgtcgtagaatgaaaaaaggggttctcttatactaatttttgtaaagaattaaatttattttctattacaagtccagtatagaacttattacttacmtaacagtacttttagaaaaatcagaaccaaattaaagagagtagcccctttgnatttaaaatttaataac

SEQ ID NO: 227 - DNA, 3567 bp; double-stranded, linear
agggtcttttataatcaaggaacaatgagtgagaacgattctcaataaatgtaaaataacgacagaaaaattaaagaggaatggttatgaattattagaggcagaggacttaactacaggatatggtcgtcaagtgattagtgaagcgctgaactgttcatttgaagcgggaactattacaagtattattggaccaaatggttgtggcaaatcgaccttgttaaaaacacttgcacgtattttgccagctgagaaaggcaaggtgttcattaagaaccaagaacttcaacatttttcttcaaaagaagtagcgcaagaactagcgatcttatcacaaacgccagaaaatacaatcgatttatctgtttttgacctcgtctctttcgggcgatatccttatcaatcgggctggaaaagtgtcaccacagaagatcaagagtacatacaatgggcattagaattaacaggcttaactgagttagctagagagtctgtggcaattttatcaggtggacaacggcaacgggtttggattgctatggcgctagtgcaggatacagatattttaattttagatgaaccgaccacctatttggatccagcgcatcagctagaaattttaaatgtgttaaaacgaattaatcaagaacatcagaaaaccatcgtgatgacgattcatgatattaatttagcttctcgtttttctgatcgcgtgattgcgatgaaagagggaaagattatcaatgagggaacaccgcaagaagtgattactgttactggcttagcagatgttttcgctattcaagcagaaattagttatcatagtcagacacagcggccactagtgctttcttatgagttgatggaaatggagctggatggatgaaaggcataagcggattttatagacaccaatggcaagtgttgcttgtctgtctttttttgctactggggacaatgcttctgtcattgatgtttggtgcgacgtcggtttcgattcaaacgattattgattcatttacgcacttcgatgcgaccaatcaagcgcatcaagtcatccaaacggttcggttgccgcggattttaggggccgcttttgtgggggcaagtttagcggtgagtggggcgttacgcaagggattacacaaaatccattggcagattctggcttgctgggtatcaatgctggggctggcttgggcttggcgcttgtttttgctttcctccctcaggcaagttattggtggcttttagttgtttcttttcttggtgccggcgtgagtgtggcactgatttawtatctttctaatcattcaattcgaggagcaagccccatgcgtctgaccttagtgggagctggtattagtgccctttttttatcatttagtcaattcttagccattcagttcaatttgagtcaagagttaacgttttggtttcttggcggtgtcagcgttatttcttgggcacaattaaaaatagtcgtccctatctttctgggcgcatttgcattagcaattctgattagtccgtcggtgactattttacggtttggcgatgatgcaacaattggtttggggcgaaatccgcagcgtattcggttgtttgccagtataacgattttgcttttatcaggattgtctgtggcgctagttggctcggtcagttttgttggtttggtggtgcctcatgtgatgcgaacagtttctggagaaaattaccggcgcttgattccgttctcggcgttaggtggtgcgctcctcgttttggtggcagatttaatcgctcgaatggtgaatccgccttttgaaacaccatttgggattatcacggccttaattggcatcccattctttctttatttatttcgtaaaggagggaaactaggatgacacagaaaaaagtgtctcgttgggtggctatcttaatagttgggattatcctaactgcttgtatcagtttaacgcaaggggaattatctgtttccgtcatggatttaaaagcccttattttgggacagggaagtcaggccaaacaactgttagtttgggattttcggttaccacggattgtgcttgcggtcctagcgggcgcagctttaggcttaagcggcgctattcttcaagggattactcggaatccgttagcagatactgggattttaggtattaatgcgggtgcgggtttggcagtgattttgtttattagttttgttgagacgacaagtatcacaacgtttgcacttccactcgtggccttagttggcggcttgctagcggctgttgggattttggtaatcgcgtatcatcatcgtttaggattgacgccagttcgaatggtcttagcgggtgtcattttgagtacgggtatttcagcactcaccttattaattacatcaaaaattgacactgaaaagtaccgttttgttacaatgtggcaagcaggcagtatctggggcagtaattggttctttgtgggcgctttgttgccttggctagtcatcgggttcttttttgcgatgaagcgtcatcgtctgttggatattttacaattgggggacgaaacagctatttctgtaggtattgctgtgaaaaaagaacgaatcgtttcgttgctgttagcggtgatgttggcggcatcagcgatttccgttacagggggaattaattttttaggtttacttgcgccacatattgctcgcaaatgtggttttacgcaacaaaaacaggtattgccattggcggcgttgtttgggagtttacttttattggttagtgatacgattggtcggctattgcctggcaatggagaaatgcctgcagggattattattgcgatcatcggtgcgccttattttctttatttgttaatcaaaacaagcgattcgttataaaaaagaatcaaaagctgggtcaatcggtcgttgtgaaagcaactgtcatttgctcggcttttttattggcggatttttgaaaaaatagtatgataaatgcgtaagaggattgaatggaggatgaaagaatggaaaactttaatttttatgtaccaacagacatccgttttgggaaagatcgtttagacgaattacctgctgtgttagatcaatttggcaaaaatgtcttacttgtttatggtggcggtagtatcaaacgtaatggcttgtaccaacaaattactgatttggcccaaaaaaacgggcatacactgattgagttgagcggtgtcgaaccaaacccgcgcattgaaaccgttagaaaaggaattgagttgtgtaaagaaaaccaagtcgatgttattttagcagttggcggtggttcaaccattgattgttccaaagcaatagctgcgggcttttattcggaagaagatatctggacagttattgcagccagaaaagggtatactggtcctgctttaccaatcgtgaccatcttgactttagcagcgacaggtagtgaaatgaacgcaggtgctgtcatttctaacttagaarccaatcaaraattaggctttggtggtccgaatatgattccaaaagtttcgtyctgggatccaacgaatactttt

SEQ ID NO: 228 - DNA, 7893 bp; double-stranded, linear
tttagtggtttgttgatgtttttaagtaaaattggcacattgtttggctggctttcacttctggcagctgttattggctttgttattttttataaacgagcaacgaccgctgaacagccactagttcgtttgacaattttaaaaaatcccgccttcgttttatttttatgtggctttttagtttgtcaattcttattgttaggtatttcctttgtcttaccaaattttgttcaaatcgtccttggaaaaaatgcgtttgtagctgggctagtcatgctgccaggtgctacagttggggccattttggcaccactttctggacgagtgttggatcaatacggcgctaaaaaacctatattatttggcttaagtttggcgacaatcggttggctagctttaacaattttactagagatgcctgttttattaggattcgtcgctggacatgttacctatatgattggtctaggttttgcatacagtaatatgatgacgactggtatgagcttgttagaggagaaagattttggcgacggcaatacgttatttaatacacttcaacaattttctggcgctattgcgacggccattgtagcgacgattattaatatcgctcaagaccacgcagataattttgctcaggggacaacgatgggctccctcatttctctgattttcttgttaaccttattagtaattgttttaattgcttgctggaattatttccgcaaaaaagcttaaaaaaaagcagctggtcagttccatagtgaccagctgctttttttagttttctaaagatagttgtttttttgttcttcttgcttccgaatataaagtacgaacaagacagcaattagcacgataaaaccaccaaaaatcggtgtatatgttactgataaatgatctgtgaccaccccacctgtcattgagccgacggtaatcccaatattaaaggctgcaatattaaaagctgaggccaaagtgatatcttctggaacatacttttccgctaattctacaacatatagttgtaaaccaggtacattcataaaggcaaataggcccaacatcaaacttgctaataagcctagaagactgttatccattaaaacagtaatgaataaaaagactaaggacagaattaataagctaaacatttttactaacgaatctaaaggttttttatttgcccagtgaccacctactgtattgccaattgcgaccattacgccataaacaactaaaataatcactaccgcgttggctgaaaagcctaattttccmwtaacggtgacagtacgtatatgcagcaaacgttccaccataaccaaaagcagtaattagaaaagagaaaacgaggggtttgttcgtaaaaatccgcgtgattccttttatgtcaaccttccctggtatcggtaaatttttgggaactaaaaaataactagcaatcagtcccaccaagccaatactggctataaaaagaaaggacatatgccaagctgtttgttgcccaataaacgtccctaaaggtacgccagtcactgttgcaaccgttaagcccgtaaacataatagcaatggcgctggcacgacgtgatggcggcacaacatctgcggcgatgacagtcgaaacagacatgaaaatgccatgcgccaatgcagaaagtatccgccctaccaataaaataataaacgttggcgcaaacgcagcaattaaattcccactaatgaaaagaagcataatccccagcattaatgagcgacgattccattttcctgtcaaaattgttaataacggcgccccaatcgtcacacctaaagcgtacaaagaaacagtcaaacctgcttgggaaagactaatatgaaaacttttaacaatcattggtaataaacccacactaataaattctgttgaaccgattgcgaaagcattgatagctaatgcaaagagcgttaaatttggtgaaattttcttttccattctcttcctcctaaaaaacatttgaatttcaacaaaaattactatatactaagattgaaattttgataagtacctacttttttgtatcataggtaccttttagtaacttttggttattatcaacctattaaggaggaatgttttttggaaactcgtacatatgcgattggtgtcgaagcaacgatggatgttattggcggtaaatggaaaccaattattctgtgtaatttacggcacggcgccatgcgccccagcgatttaaaacgcggtattactggcattagtcaaaaaatgctgacacaacaattacgggaactcgaagaagacaacattatcgagcggaaagtttacaaccaagttccaccaaaagtcgaatattatttaagcgattatggtcaaagcctctctgctgtcttagataacttatgtaattggggagaatcccacgtggctcatttgcaagaacaaggccaagaaatttatttaaaatgtgaagattagtgaacaaaacgtttataaactatattaagagggagctttaagctatttaaagcctggggaaaaatcattttagatttttccccaggctcttcttatgctttaataacttgaatatcttgcgttaattgggcccaatgattagtaggtccgtgaccatgtccaacagaaattgcttggctaatggccccttgtataaactgtttgccaatcacaatcgccgcttctaacggcgtaccttttgctaattcggctgcgatacacgctgaaaaagtatctcctgttccatgagtatttttcgttacaattcgtggtgcacttagccaaaagctcgaaccgtcttccattaacacataatcagccgcttgttgatttgtgctatgtccgcctttcataataatattttttgtgcccaattgctgtaatttttttgctgcggtctgcatttcttgttctgtcttgatggtcgtctctagtaaaacttccgcttctggtaaattaggtgtcacgaccgttgctaatggcaacagttgctctttaatcgtttgaactgcctcggcttctaacaaatgatgtccacctttagccaccattacaggatcgacaatcaacggaccaaaatcaactttctgcaaattgcgaacaacagcttcgacacgctcactatctgctaacatccccgttttcgctgccccaattttaaaatcagccgccagtgattggaattgtgcatcaataaatgaactaggaatcggtaagctatcttgcacgccatacgtattttgtgccgtcaatgcaatgacaatatttaagccaaatgcctgccgtgcttgaaatgtttttaaatctgcttgcatgccagctcccccaccagaatcagaaccagcaatcgtgactacttgtggggtcaaattatattcggtcattttctcgcctccaacattcgctccgttacacgcatcaacccttgaactttctcggttatctgttcagccagcataatttcactgaccagtgaaacaccagccactcccgttcccataagttgttctatattttcttctttgattccaccaatcgctacaacaggaatcgtgactgctgcggcaatttcagaaagtgtctgcaaagaagttaacggactgtccttagtcgttgtggggaaaattgcgcccacgcctaaataatcggcgccctcgttttccgcttcaactcctcgtgccaccgttttggctgaaacacctacgatttttgtggacccaaccagttttcgcacaagagcaaccggtaattcatcatcccctatatgcacacctgctgcatccactgccaagcaaatatcgacacgatcattaataatcaacggaatctgatacgcatctgttaccactttaactttcactgctaattcgtaaaagcgccgtgttgacacttccttttcgcgcagttggaccaatgtcactccactgcgacaagcagtttcaattcgttttaaaaattcagtatcactaaaatcataccggcctgtcaccaaataaactttcaatttctctctcatagcactcgtcctttcaccgcctcaaaccaatccttctccttcattaaaagagataactgatttaacgtattttggcgaaaatcggccagcccttggctcttagtcttggctttttctccgcaaagattaaaatagctcactgcggctactgccgcagtcattggcgcgttgccttcacctaataaagcggcaactaatgcgccgactaaatcgcccgtgccagtgaaacaatccaactcaggaacgccattttgtaagacaatcacttgctcttggctaaccaaaacatcttgaatccctgttgctaaaaataccgtctggggaaacttttgcgtttgttgacgtaaagcctgaatcagttcctcaattgcttcttcactttgatccaaagggctgccatccactcctctgccatgactcaccaactggcaaaaagtccgcatttctgaaagatttcctttcacaacggttggctgattgtgcaccagcttttccccgacttcatttcgaatatcactggcgccataaccgactaaatcgactacggtcagtttattcacttgccgagcataatcactagctgctaacaagctttgctctcgttcttgtgataaatggcctaaattcaaaaccaaagcactggtttgctgaaacatctgcggaaattcccggggatcatctgccataatgggtttagcatcaatataaagtaatgcattcgccatagactcacacgtaatttcattcgtaatgcactgaattaatggtgccgttgtcagtggaaaaatcgtttcaaacttaacgcttgttttcataaaagtaccctcctaaaaataattcctgtgtttgtttaaatacccgagtttctttcagttttactaagacaagccaagcaatcactgaaccaatcagtgtggcaccaataaatcgtggtgtataaatgaaccaataaaaattctgcttactgccagtaaaccaaaccattacaggataggacaataacgagccaatgatgcctgtcccaaaaatttcccctagcatcgaccagcctaatttttgtccccattgataaaataaaccagcaaaaaacgcgccaaaaacggcacctgttaacgctaatggcggaatacctaagaatgtcatacggattaagccgcagacaagtgccatgagcgttccgtaaagaggacctaataaaactccggcaataatgttcatgacactggacataggggccattccctcaattcgcattaacggcgataatacaacgtccatcgcaatcattaaagccagtaacgtaactctgtggattcgatttttttccacgtaaaaaaactcctttctgcgagaagcaaaaggaggcgcgactgaaaaagacagaaaaacccaaccacaaataaacgtagttgggtgcaataatcggtcaaaatttcaagacatttccctgcgccagtcctaactgtttcaggttccatgggtataatctcagctaatagcaccccaaatgtttctcttcaattggctttagtatagcatagttttttggaagcgactactaaaattgccaaagagttttcccacaaaaacagaaaaaacatcatgcccaaaaagttcgattttttgggcatgacgtttttcatactttcgtttgtcttattttttagaatcctggcattcctttggtgtatttgcctaaagttgcttcggtttctttttcaatttttactaacgcgtcgttgacagccataatgactaaatcttgtagcatatcaacgtcttcaggatcaaccacgtcttctttaatgatcaaatctttcattgtgcgatcaccagtaaatgtcgctgtcacaagttgattggtggcttcaccgataaattctttttcatttagtgcttcttgcgctttggccatttctttttgcattttttgtacttgtttcatcatgccttgcatgttgcccattcctcgcatcataattcctcgactccttcatattaatcatctagtacttcgacaagctcttcaccaaacatagcgattgcttcatctactactggattttcttgtgaatgttcatttgttacaggcggttcgtccgctagacgagccatttcattttcaggttcagaatgattcaaactgccctgattttggttaataaaactttgtcttagttttggccagctttctctagtaatgcagaccatctctggtgtatagtccatcaaacggcttaaattattattgaaagctaactgcatctcttcatcgtctgttgcacgagcacaaacaatctcatagtcaaatgccaccacgatgcccttaggactcgctgcgacaggttcactagccttgagcatcgctcgttgagtcacagataatgtttgcagtaagtcttcccagacatttttcacattcattaaatgtgttctagtcgcttcgtttaggacttgatatacgcgttctgtgggtacacggaacgaactttttggcgcttgtggtcgtgcttgttgacgtggcgcatctgcttctttggcagctacaccgtgtttctttaattcagccagttctttcttcagttgcccgatttgattttgtaaatctgctaattctggatttccctctgcactaccatcttgattagctgtttctggcgtgttgtgtttattgggttgcaccgttttagctaatttgacagtggctacttccagatagatattcgcattgttggtaaagcggatctcattttgtgtgtcacttaaaatttggattagttggtagattttttcagcaggcgtttgtgtagctagttccttaaatgcttctgtcaaagttcctgctttttctgctaataacttcggtgcttgctgatacatcagcaaatctcgacaatataataacaaatcttctaagaaacggcgcgcttctttgccttcgcctaaaatactttccaagccttctaatgctcgttcaacatcaccggcgacacagcactgaatataatgatccatcatttcataggttaggctgcctgtcacttgcattgcatcttccagtgttactttttcatcactaaaggaaatcgtttgatccaagatactcaaggcatctcgcatcccaccttccgcagcacgcccaatcacataaagggcttgttcctcataatcgagagccatttcctgcatgatatgggccatatgatcgacgatatcttgcgtactaattcgcttaaaatcaaagcgttgcgtccgtgagataatcgttaacggaatcttgtgtggttcagtcgttgctaagataaaaataacattttgtggcggttcttccaaggtttttaaaagtgcattgaacgcgcctgttgatagcatatgaacttcatcaataatataaactttgtactcggcttgtgtcggtgcatactttgctttatcacgaatatcacggatttcttccacgccattattactcgccgcatcaatttcaatgacatcatttaaacgaccttccgtaatggctacacaggtttcacaaacattacaaggttcaccatcttgactatgtttacagttaatcgctttagcgaaaatttttgcggcactggttttacctgtaccacgagggccagtaaataaataggcatgagatgttttcttttgcactatcgcatttttcagtgtctgagtaattgctttttgtcctatacgtcatcgaaacgttgtgaacgccagacccgataaagtgcttgataagccattttttaccctcccttatttttcattcttatctattatacgtgattttnagtcattcggcatcttttttcttttaatgagtcactggcgcaaccattgct

SEQ ID NO: 229 - DNA, 17082 bp; double-stranded, linear
gcgcaaattggctaccaatctaaatnactttcagaagcgtattatacgagcatgattgtggtaattatcttaacgaccttagttgcaccgttcttattgaaatactttgttaaaaaacaagaatctgcgttgcaataaaaaagatgagcagaagttgttgacaaaaaaataaaatagctatatgatgagttcaagataaacgacggcatcaggacccgtggccccatgcgttttaatgactggcgcttttaagccaaataaaaccgctcccccatgttttgagtagtccatttcgtctttcatgccatgcaacgcattctttaataataaggcgcccatttttcctttgacaccttcagaaagaatcgctgttttcagcaagctcatcatgttcatagctgtgccttcgrtggattttaaaacggcatttcctgtgaagccatctgtcaccaccacgtcagctacgccatttaataattctcgtgcttcaacgtttccgacaaaattaatcgtttcatctgctgctaacaattcgaaggcttttttcgttaattcactgccttttgtttcctcagttccgttatttaatagaccgacacgaggattctgaacgttccgaactttttcagcatagaatgaacctaaaacggcatactgaaccaaatgttctggtttattgtctgcattggctcctaaatctaacatgtcaaaccctttgtctggttctcccatgacaggtaaagttgacatcaaaccgggacgttccacatttttgatgcggccgacaatgaacagacccgctgctaatagcgctccggtgttgcctgcagaaaaaatcgcatcggcttccccatttttaactgcttgcgctgctaaaaccatggaagcagttttcttacgacggattgctttaactggctcatcgtcactagcaattttttcatcggtatgaataatcgtaatgtttttttcatcggtgatgtatttttttatttcggcttcttttccatataattgaaattcaatgtctgggaagtcttgtttggctagcataaccccttcaacaattgcttgtggggcattatctccacccattgcatctacagcaattttcatgagtgattccctcctacttttttgtttcctaacaagtataacatatttttttcaaagaaatacgcattggcttttactttctggcttcaaaaattacctcttctaatcgaaaaattgggctgcctcatcttggggtttcactcgattggctaagccttgataagcaggatattgccaccactctttcactttccatagggcacttgcttcttggcgcgcaacttctaaaatgttaaagtccgtcacgatatctcctaccgcaaattgaggcacccctgattgccgtgcaccgaacacttccccaggtccgcgaagttccaaatcacgctcactcaagacaaaaccattggtggtctctgtcatgattttcatacgctcaacgcccatttcatttttcggattggccactaaaatacaataagatgcactggagccacgcccaacacggccccgtaactgatgtaactgtgctaacccaaaccggtccgcatccataattaacatcaccgtggcatttggtacattcacgccaacttcaataacggtggtagaaaccaataattgcagctgattgtctttgaactcctgcataatgtcatctttttcttggtttttcattttaccatgtagtaatcccacttgatatcttggggaataaaagctttgcatatgttcaaaaatttctgttgcgtttttcacatctaaggcttctgattcttcaatcaatggacaaataatataggcttgatgtcctcgagccagctctttttccatccattctaaaacagtatctaactgcggcggccgaatccaacgtgtttcgattggaatccgtccagctggcatttcatcaatgattgatacatccatttcgccataggctgtaatagccagcgttcgaggaatcggagtggccgtcataaatagaacatctggttttaagcctttttctcttaatatttttctctgattcacaccaaaacgatgttgctcatcggtgattaccaaacctaattgatggaaactgacatcttgttgtatcaaagcatgggtccctaccacaatgtcaatctcgccattggccagttcttcgagaattagacgacgttctttcgttttggtggaacctgttaataaggccgttcgaacttctaacggatcaaacaactgctgtaagctttccatgtgttgctgcgctaaaatttcagtcggaaccatcaacgctccttgaaagccagcggtcatggtggcgtatagcgcaatcgcagccactaccgttttcccactccccacgtcaccttgaagcaatcgttgcatatgcttcggacttcgcaagtctcgacaaatttcattggtcacttttttttgggcgcctgtcaattcaaaaggcagtccttgggtgaacgtttttaagcgatccacgtcatattgaatagctaaaccatttttttccgctttttcttgtttcttcaatccttgcattttaagttggaaaaggaaaaactcttcaaagactactcgtcgtttagcttgatggctttcttctggattactgggaaaatgcatcgcccacattgcttcttttctaggcatcaagcggtacttttctaataaatcattcggtaaaatctcttcaaccagtgaaccatactcttcaaaagcagtgcggattaactgaaccaacgtgctttggcggacttttttattcacatgataaatgggggcgaaatcttcattgtctcctttagaagctaagattttcatgccatttaatgattttctcttggcatcccatttgccataaacagcaatttcttcggaaagaactactttgtcttttaaaaaaggttggttgaagaaggaaacattaatgaccgcatgttcttgcatcattcgaaacgttaaccggctcttcttataaccgtaccgactaacgactgcttccgaaaccactagcccttttagcgtaactttttcctgatcctgaatctcacttaaatccttttcttggatatcatcgtagcggaagggataatacgtcaataagtcttcaattgtagcaatccccagttcttgtaaattttcagcacgttttgggccaacaccgggcaatacgctgactaaatctgtgatgtccataaaatcccctcctcattaatatacgcaaaaaaatggatcattcattaaataggctggttcattagccctaactaatgaaccagcctattcgtttttattttttcatcacgaaaacctattctgctgagaataagtatggatacacaggttgtccaccttcatgaagttctgtttctagttcatcgttttcagaaactaaaatagcgattagcttttcagcttcttcaaccgaaccatcttcgccgacaataattgtcacgatttcagtgtcttcatcgatcatgcggttcaacgtgtctaatgatgcattaaaacgatctgcttcagaaacgacgattttaccatcaatcattcctaagaagtcatcttttttaatttcaacgtcatcaatggttgtgtcacgaacagctgtggttacttgaccactcacaacgctgtctaacatttccgtcatacttgctttgttttcttctaatgattgttgatcattgaaagctaacattgctgtcattccttgagaaatggttttagatggaacaaccgctactggtacatcggcaacttctgctgcttgatcagctgccataaagatgtttttgttgtttggtaaaataatgacttgctctgcattcacttctttgactgcttttaaaatatcttccgtacttgggttcattgtttggccaccactaataatgtagcttgcacctaaacttcggaataattcttgaacgccttcaccggctgcaatagcaatcacagcaaacggtacgcgaactttttcagtcaacgcttcttgctgagcatcgcgttcaactaacgtttcatgttgtaaacgcatattgtctacttttatttttactaacgaaccaaatttttggccgtagttcatcacttcacctggatgctcagtgtgcacgtgaactttgataatttcgtcatcgttaacgactaatagagaatcgcctagttcatttaagtagtttctgaatgtttcataatcaaaagcgctgtccacggttgggccttcgccgatacgaaccataatttctgtacaatagccaaatttaatgtcttctgtcgcaacgtgaccactaacaccacgatgatgttcagcattaaccatttcgtccatttcggcaggacttggttcatacgtttcagttggtaaaaattcaccactaagcgcttctaaaaatccttcatagataaatagtagtccttgacccccactatctacaacgccgacttcttttaggacaggtaataaatcaggtgttttcgctaaggcacgtttagcacctgctacaacagctgtcataacttcgatacagtcatctgtttctttcgctttacgttcaccagaacgcgccgcttcacgagaaacagttaagattgttccttcaacgggtttcatcactgctttatacgctgtttctacaccatgtgtaaaggcagcggccaagtctttggcatttaatgttgtaacctcaggaatttgttttgagaagcctcggaataattgagataaaataaccccagagtttccacgagcacccattaataaccctttggataacgcacctgctaattctcctactttttcagagcgagaatcggccacagcctttgcaccactggtcattgataagttcatatttgttcctgtatcaccatcgggtacagggaaaacgtttaatgagttgacatattctgcatttgtgtgcagacgagtcgcacctgcctggaccatttcctggaactgacctgcgctgatttctgttacattcacctaaaaaatcctccttcagatttaccgctaacggcaacacacgacttccttgtgcaattgcatcgttgacagtacactacctctaatccggtaatacacgaactccttgaacaaaaacgttaactgaattcgcagtgacacctaataatgtttcaagattatattttactttttcttggacgttacgagaaacttcagaaatttttgtaccataactaacaatcgtgtagacatccactgcgattccgttgtcttcttgacgaacaacgacaccacgtgagtaattctcacgacgtaaaatatcgtttaagttatctttaatttgatttttgcttgccattccgacaattccgtaaatatctgtcgcagctccgccaactactgtagcgatcacatcattggtaatctcaatggtacctgcgggtgtttgaatttttacagccattgatgaaagcctccttataagagcacattcgccctatttncttccataacattttatcatatccagcctttaattaaaaggaagttcgtcagatatkttcattcttccacttttaagtgaacattctagcaagatttcaatttactctttttgattgctaaagtcaaatcatagaaaaaaatcttcttgcaaatcagtgcctaatatgataaattaagttagtatgagctgaatattatcgctccaagatcaaggcaaaggaggaaacttaaaatggcaaaagtatgttacttcactggtcgtaagacttcaagtggtaataaccgttcacatgcgatgaactcaacaaaacgcactgtgaaacctaacttacaaaaagttcgcgtattaatcgatggtaaacctaaaaaagtttgggtgtcaactcgtgctttgaaatctggtaaaatcgaacgtgtttaataaacttaaataagcaaagctggacgttcgttgttcggctttttttattgcataaaaaaagaggctggaccttcatcgcattgatgaaggtccaacctctttttacttgtctttactttgaataaccgcaatcatccctgcatcgaaggaaaaagcagcggcttcttcgataaattcattacttgcatacgatgttgggtaaggaacatcttgattggttaataaatatttactgcgtcgtagcgtcaagttttctacaggcgtcaaacagcagtaggccagatattctttatctggctcttttggtacgatatatgaaccaggggcgtaatactggatgctattttgacgatcgcatagacggatttgacgaagtacgccttgaaatcgtggttcaaagggtaaccaaagattggctaacaggtggtcaattctgccccctgtcgcaccgataattgtcatctctgcttgtggaaatcgttgtaaagcttcttgaagcgctaattgtgtatctgtatcatctttttcagcaggtgcttgaatgagtgtttcggtagtttcttggacaaaatggtattcttctcgtgataatgaatcaaaatcgcccaccgctaattgtaacggtaaatcggcctctaataaatggagacagccgcgatcaatacctacgaaataatcatacgtagctggttcaatggttggccaatcacttggattgccgccagctaccagtaagacacgactcatttgtctagcactgctctcagtgcatcgattcgttcttgaggattttcagcattataaatgtaggagcctgcaacgaacacttccgcaccggcttctttgcagcgtgcggcagtttcaggaacaatcccgccatcgacttcaatttcataggtgtatccttttgtttctttccattcttttaattgagcaattttttctagtgagttttcaataaatgattgtccgccaaagcctggattgacagtcattaccaagacttggtctgctaaatctaatacattttcgatcatcgaaagtggtgtcccaggattgatggttacgccagctttcacacccgcatttttaatcatttgtaaggcacgatgaatatggggtgttgcttcttgatggacggtaataatatccgcaccggcttccgcaaaagcattgatataattttcaggttgtacaatcatcaaatgaacatccaatggtagttttgtcactggacgaatcgctgaaacgatattcggtcctaaggtaatgttgggcacaaattgaccgtccatgacatcaacatgaatataatctgctcctaattcttctactaaacggatatctctttctaaattggcaaaatcggcacttaaaatggatggtgctagtttcatttggctcgctccctttatatttgctatgattttttcttataaacaggtcgtcgattctcgatttccattaaaaactgtaaataattttcgtaacgactcgtcgcaatggttcccgcttccacttgacgtttcacttcacaaccaggttctttgtggtgcatacattcacgaaacttacagtgagaggccgcggcaacaaattcaggaaattgctttggtaattccactgcttccatctccaagaaatcgatggcactaaatcctggtgtatcagcgaccaaaccgtcgtataacggaatcaattccacgtgacgggtcgtatgtttgccccgtcctaaagattgggaaatttccgcagttgctagttgtaattctggtgaaatttgattcaacaatgttgattttccagcgcctgattgtcccataaaaacagtcaaccgttctgggaaaaagcgttctaattctttggtggcttctacgtcttccgaagcgattaccgcataacctaacgcttcataaatctgtttaatttcagtgacttgttgacgttgcggctcatctaatagatcaactttcgttaaataaataactggttctatatccttatactctaagctgactaagaaacgatccaacaaattaaacgaaaaatttggcgaaaccatactcatgacaaccacacctagatccacatttgcaacaggcgggcgcactaattcatttcgtcttggtaaaatttccaacacataaccatctgttaaattatcgctttcaaaaagtacttcatctcccacgagtggcgtaatttttcgattacgaaaattccctcgcgctcttgtttgatatgtttctccatctgcgtatacataataaaaaccgcttaacgcttttctgatttgacctttcagataaaccactcctaactactttcgaatatacaggatagtggcagagaaatcaagggagcctctcgattctattaattaaaaagagcctaggacataagtcgaaatgacttaccttcctagacctaaatcttaagataaatggcgagacaggagcagcttcttcttattgctgagaaacactatttgaaaagcaaatagatgttaaacagtacctacttggttcttgaagctaaacactcctgtcccaacctcttgtcttaattactcgtactactttcactagtggtgctttttgaatcatttgcttttgaataataaactgtaacagagtcgccttttttgactttgctgccagcggatgggctagttcgttcaacgacttggccatcgccagagccagataatccttgttcattgattttaaggccagcgttattgatgctgtcttctgcagcttttggcgaataacctgaaatatcaggaacagttactgagtcactgcctttgctgacatgtaaagtaatcgtgtcatttttcggatcaacagcggtaccagaagctggttcttgactaatcacggtatctttttcaactttgtcgctttcttcgtccactcgtttaatttgagattctgggatacctaaagcaattaagcgacttaccgcattatcgtaagaaattccgctataatcagaaagtgtcactttgtcgctacctttacttacatataacgtcacttggccatttttaggtgtcacggtgccacctggtgcggggtcttgcgtaatgactaaacctggttctaccgtatcgcttgcttggtcgacacgcgtaatttgagagtcagaaatgcctaattgtgccagtgcatttactgcattttcgtaagaataaccggcgtaactaggcaaagtaaccgtttctggtccttgactgaccgttaaagtgacgttgtcttttttcggatcaacttttttacctgcagctggtttttgtttaataatgctatccgtagacacagaatcactgtattcttttttcgttgtaatttggtcttctgaaaaccctagttttttcaaggcttcgacagcagattcatacgattcctttgtataatcggccatctcaattttttctgttccagagctgatgtataaagtaacagatcggccttttttcacagatgattttgcttcggggtctgttttgaccaccttgccttcttcaatcttatcgtcgggaatttttttggtttcactatcgactttcagcccggcactttttagcgcttgtgaagcgtccgctttcgtttcatttgtaacatcaggaacttcaacgtctttaccgcccgacattgcaaaggctaagccacctattgctaaagaaattaatgccgcaattgctaagccaatccacaattttttacggtttttcttcggcggttgttcagctaaaatgtcatctgcgatatcttctgggacttcgacaggcgttgtctcttccggttcagcgatgtcttcgggaatcggagttaatactttcgtttctcctaataaagccgttggttcccacgcaggttcgtttaaacgactggctgacaaggacgtgtataagtcttctgccatctcattcgctgttttgtagcgatcgcttgggtcttttgcggttgcatgacgaaccacattttccaatgattgaggaatccctggatcaaacattttgacagagggaatttcttcttgaaaatgttttaaggcaatcgttacggctgattcaccatcaaaaggtacattccctgttagcatttcatagagaataattcccacagcgtaaatatctgattggttggtcgccatgcttccgcgcgcttgttctggcgataagtaatgcaccgaacctaacattgtgttcgtttgcgtaattgacgtttctgacaaggcaatcgcaatcccaaagtcagtaattttgactgtgccgtgttcgtcaatcagaatgttttgcggttttaaatctcggtgaataattctatgttcatgtgccattgcgacagcagataaaatttgttgcgtaatgtctacaactgtggaataaggaattgggaaatgcgtttggatgtaacgttttaagtccattcctttcacatattccatgactaaatattgtagtccatcttcttcgcctacatcgtacacactgacgatattcgggtgaaccagctcagttgcggctagtgcttcacgctgaaaacgtcggatggcggcttgatcgttttggaagtcaaagcgcaagacttttactgcaacgtctcggtctaaaattaaatcgtgtgctaaatagacgttggccatgccgccgcttccgatgctgccaataatgtgatatcgaccattcagcttcttgccgatttctatcattggttttcctccttctgttcgtcaaagtgtatcactaacacggtaatgttatctaaaccacccgcttcatttgcttgagcaacgagttggcttaatttggattctaaaggatctgacgtctctaaaatttctaaaatttttgtctcaggaaccatattggttaagccgtccgaacataacagtaaatagtcattaggcagccattcatgattggttacatcgacttcaacagtgccaggcattcccaaagaacgtgttaggacattttttcgtggatgatttgcagccatctcacgagtaatctcccctgattttactagttcattcactaaagaatgatcttctgttaattgtaacatgtgttggtcacgaactaaataagcacgactgtcccccacatttgctaagacaaatgaatccggtaaaagaatggcaccaaccactgttgtccccattcctaaatactctggtttcgattgtccgcgttcataaattttttcattttccttttgaattgcttgaattaaccactgtgcagatttttcagctgagtcgacagacgcattggaccaactctcacctaaattattgactgccatttggctagcgacatcacctgcttggtgaccacccatgccatctgctaaaacagcaaaggttatgtgttgttggttctcaaaaacgttggcataatcttggttcgtatttcttttgcgaccgacatctgattgaacgttgatttccaaattatttcacctcatttgaactaactttccgcatacagcaaataaagaagccatctgtcatgtattgatggggatacagaaccagttcttgctcttttactactgcttggacattttcatttgcaacaatttcaattttttcaaattcagggtgtttggctaaaaaggctgccaccacttcctgattttcttctggcgtaatagtacaagtgctatagaccattataccccattgttttagtgttggggcaacactttctaagatttctaactgaattttaggtaaattttgaaaatcattggccgttttatggtatttaatgtctggtttacggcgcattagccctaagcctgaacatggtgcatcaactaaaatccgatcaaaggtttctgcggggaattcttcggccacttgtcgcgcatcaagcttttctgcttggacgacatccgccacatggaggcgttgcgcattttcattaattagcttaattttgtgcgcatgaatatctaaagaagtcacacgaccacctgcttcagcctctaaaaaagttgcgatatgagtcgttttaccaccaggagccgcgcaggcatccaaaacacgatgatgcggttcaatttgcatcgatggagccacgagcatagagctttcatcttgaatggttaaacaaccgttaataaacagttcactgccagctaagtagcctttttcagcgacaacaccataaggggaaagttgactttccttcgcggcaatccctgtttcttgtaattcttccagcgcttcttctcgtgaaataaaccgtgtgtttacgcggccactcgcatggcttttttcaaataatgacaaacccaactgccgtgtttcttcttcgcctaattgggcaagtaatttttctgttaaccaacgtggcatactaatttccgttgctaaacgatcaactggatcgctaattgcggccaaactaggtgctccatttcgttggaacgcccgcagcacgccattcacgaatttaccaatcccaggattgccacgacgtttgccaatttcaaccgcttcattaatgactgcgtgatcaggcactttatctaaataaagtaattgatataacgataaaatcaataaatttttcacccaattatcgactttttgcggtttcttaacaaatggtgttaagtagtattccaacaataatttgcgactaattgtgccgtagacaagttctgtaaacaagcggccatctttctcgcttagttctgattttgtcatcatttcattaagtaaaagattggagtacgccccacctttatccacacgttcgatggtttctaaagcaacgtatcgaacagaacgttttaatttcttggggattttttcagccatttttgttagtccaccttatctttttctgcgacattttgaccaacgccatttaaaaattcttgaatcgttaattgacctttacctgctggttgcaggcgatcaatttgaaggactgtcccttcaccacaagcaatccacagcgcttttttactacgttggataatcgttcctggggcgctggttgttgtttcagtcagtggtgtcactgcccaaattttccagttggtcccttgataggttgtgaacgctgttggccaaggacgcataccacgcacttggttatcaattgcctcagcagttttttgccagtcaattcgttcttgttctcgagtaatatttggtgaaaaagtagcctcttcttccacttgtggaataggcgtgatttcgccagcaattagcttaggtaacgtctctaataaaagttcttttcctagaatgcttaatttttcaaacatggtgcctacatcatcttgtttcgtaatcggaattgcgcgttgcgataaaatcgcgccagcatccattttcttcaccatttccataatcgtgacgcctgtttctttttctccttcaataattgagtaatgtacaggtgcgccgccacgatattttggtaaaagtgaggcatggacattaattgcacctagtttgggcgcttttaagattttctctggtaaaaattgtccaaaggctgctgtcacaattaaatctggtgctaagtcaatcactttttccatttcaggagaacctgaaattttctctggttgtaagactaataagttatgttttaaagctgcttctttgacaggcgttggggtaatcactttttttcggccaactggtcgatctggttgcgtgacaaccgcttgaacgtcatagcctgcctcgattaaactttctaaaatcggaacagaaaaggctggtgtgcccataaatacaattttagtcatcaaaatgttcctccatatacgcttctaaatcttctggtgcaattttctcaatcattttatcgataaataactcgccattcaaatgatcaatttcgtgttgaaaagctcgagctaaatagccgtaagccgtaacttccatttcttcaccttcacggtcaaaataacggacagtcacttcatctgctcgttcaacggttccatatgtttctggaatacttaaacagccttccacatcaatactggttccctttttttcaataatcactggattaattagttcaaaacgaccagattcttcatcgatttcaatcactgccatttgcaaatttttaccaatttgcggggctgctaagccaatcccatcatgggccagcattgtttcatacatatcctctagtaactgcacaatttcatcggtaataatcgtcacaggttgagccttcattttcaagtgttcgttcgggtgaatcacaactggatagcgcataagtgctcctttcaaagctgtattttttaaataaaattcatgggttctgcatcaatggaaagctttaagccacgagccgttgctcgttgtgtatcggttaaaatttctttcaataatggttgaagcattggttcttgtttatacttgataatcacttgataaaagtatcgattattgacacgcataattgcgttgggtgttggtcccaacaaaatagcttgcggcgataagccttgttttaatttcgtcgcgatttgaaacatttgtttcgctgcttcattttcttcaggatggctagccgtaatttggaccgtaaaatagtacggcggataatccccacgatgacgaatatacatttcttttgtataaaaatcttcataatcttgggcttttgccaattgtatcgcataatgctcggggttaaaagattgaatgatgacttcccccggtttttcagcgcgaccagctcgaccgctgacctgtgtcaataattggaaggtccgttcactggaacgaaaatcgggtaaattcaaggcggtatcagcatttaagacaccgactaacgtcacatttggaaagtccagtcctttggcaatcatttgtgtgcctaataagatatccgcttgtccttcaccaaatgttcgcaaaatcttttcatgtgcacctttgcgacgggtcgtatcaacatccattcggagaatacgactgtctggtaacaacgtttgtaattcttcttctactttttgtgtgcctgttccgtagtagcgaattttatcttggccacagttaggacagcgataaggaatccgttcttcatgtccacaataatgacatttcattgttttactatccatatgcaaagttaaggaaatatcacaattcggacacggcaacacatagccacaatcgcgacacatcacaaatgacgaatagccacggcgattaagtaggagaacactttgttcgtttttctctaagcgttcttggagtttttcttgcaacgacatggaaaaagaagagacattgccattttctacttcttgccgcatatccactacatcaatcgtaggcaaggttgccgcttgattggcacgctgtgttaatcgtaaccgctgataaacatttttttgtgcgcgagcgcgtgattccaaggatggcgtggcactgcctaaaacaacagggcaatgatggtactccgaacgccaaatcgctaaatctctcgcgtggtagcgcggggtttcttcttgtttataacttgcctcgtgttcttcatcaacaatgatcacgccgatgttttcgattggcgcaaaaatggctgaacgcgcgccaaccaccacttccgcttctcctcgttcaatcttccgccactcatcgtatttttcaccttgcgataagccactgtgcattacagcaacatgttcgccaaagcgacttttaaagcgttgcaccatttgcggagttaaagaaatttcagggacaagcataatggctgttttgccttggttaagaacttctgcaatgacctgtagataaacttctgttttcccgcttcctgtaataccttccaataagtaggtttggctttgctgttcttggaccgattgtaagattgtttccacagccacctgttgttctgcattcaaagataacgcagtcgttttttcaaacgtctgattagcaaacggatcacgatacgcttctttttcaatgaacgttaaccagccgtttttggccgcttcatttaaaagcgcggtactgaaacctaattctttcatttccttcacagcggtgactttttcagtgcccaagcgttgtaaatagtaaagaagttgctctttcttcttagctcccttgcgtaaccccaaacgaatttcctctagttgttcaaattccttagcggcttgaatgaagcggaccattttgactttatttctcgtcgtaacttcgtagcgaatatcgactttttgctgtttacgcaacgccattagttgaggcaaaagcccacgttcttgcgcttggtcccacgaaatttcctctaaaccataaaataactgatcttgtaattcttcagaaagctcatccgttaaataaatatatttttggtaatcggcacgcattacgctaggcaacatggtttgcaaacaagtgattttaaaagcaaacgttttttccttcatataatcagctaaagccaacatttctgtatttaaaacaggttttaaatccaacaccgccactagttctttcaactgaacattggtttcgtcaagaaccgttgcagccactggttcaatggctagaacaaacccttgaacatgccgattaccgttaccaaaaggcacttctacacgcatgccgacagccaattgctcatttaaattttcaggaactaaataagtgaatggttgatcggtttgcatcgttggtacatccacaataactttggctactttttgcatggtgcatcctcctttttatgtaaattctctttgcctattgtactaaagattgactgatttgtcttgtgtgtctcgttggcacctttcagaataaacgaagagaaagcctctgaaatagacagacggctttctccattcgttgacaatcattcaattaatttttttcgtcacgtaaacggttttctaattctttttgttcttgttcacgttggcgtttgcgttcttcacgttcaatgcgtagacgttcgcgtttttcttcaggatttggatcactgatcactgttcctgcttcaatttcttctaacgcacgacctacactttttacagaatcaaaggattcaacggttggttgaacgccttcatctaattcatgcgcacgtttgcttgct

SEQ ID NO: 230 - DNA, 4594 bp; double-stranded, linear
cttttaacagagaacctgactattagtgaaaaaagaaagcaacagctagcctttgaagtgtcaccagctggagtagatatcacagaggatcagattgagtggtcgagtagtgatcctaccattgtgacggttgaccaaacgggtaatttaacagcagttaagagtgggtgaagcgaaggtaacrgtcaaaattaaaggaacagaaattagtgatacaattcctgtgactgttgtagcagaaaataaacaatatgcggaaatgcgagcaaaatggaaaatgcgattgttaggtacaacgcagtatgataacgatgcagatgtgcaacagtatcgtgcccagattgctacggagagtttagcattatggcaaacgcttaatcaagcagcagatcgtgagtatctgtgggaacgaaaaccatcggatacagtgtctgctgattacacgactcaatttaccaatattaaaaaattagcgttaggctactatgaaccatcaagtgagctttttgaaaaaccagaagtttatgatgcgattgttaaaggcattgaatttatgattgatacaaaaaaatacaatggaacgtattacacaggtaactggtgggattggcaaattggttccgcgcagcgctaacagatacattgattttattacatgatgacctattgaatacagatgcagaaaaattaaataaatttactgctccgctgatgctgtatgcaaaagatccaaacatacaatggccaatttatcgtgcaacaggagctaacttaacagatatttcaatcaccgttttaggtactggacttttgttagaagataatcaacgcctagtacaagtacaagaagctgttccgtccgttttaaaaagtgtttcctctggtgatggcttatatcctgatggttccttgattcaacatggttattttccgtacaacggcagttacgggaatgagttgctaaaagggtttggacgaattcagactattttacaaggttccgactgggagatgaatgaccctaacattagtaatttatttaatgttgtggataaaggttacttacaattgatggtaaatggaaaaatgccatcgatggtttctggtagaagtatttccagagcgccagaaacgaatccttttactacagagtttgaatcgggtaaagaaacaatagctaatttaaccttaattgcaaaatttgcaccagaaaatttaagaaatgacatttatacatctatccaaacgtggcttcaacaaagtgggtcatactatcatttctttaaaaaaccaagagattttgaagcgttaattgacttgaaaaatgtagtgaatagtgcgtcacctgcccaagcgacaccaatgcaatctttaaatgtatatggttcgatggatcgagtcctacagaaaaataacgaatatgcggtggggatcagtatgtattcacaacgtgtcggaaactatgaatttgggaatacggaaaataaaaaaggctggcatacagcagacggcatgctttatttatacaatcaagactttgctcagtttgatgaaggatactgggcaacgatcgatccatatcgattaccaggaacgacagttgacacaagagaattggcaaatggtgcttatacagggaaacgcagtccccagtcatgggtaggtggctcaaataatggacaggttgcctctataggaatgtttttagataaaagtaatgaaggaatgaacttagttgctaaaaaatcttggttcttattagatggtcaaatcattaatttgggaagtggcattactggtacgacagatgcttcgattgaaacaatcctcgataatcggatgattcatccacaggaagtgaagcttaaccaaggttcagacaaagataattcttggattagtttaagcgcagcgartccattgaataacattggctatgtttttcctaattcmatgaatacgcttgatgttcaaatagaagaacgctctggtcgctacggagatattaacgaatactttgttaatgataaaacctatacaaatacatttgctaaaattagtaaaaattatggcaagactgttgaaaatggtacttacgaatatttaacagtggttgggaaaacgaatgaagaaatcgcagctctttctaaaaacaaaggctatactgttctagaaaatacagcaaacttacaagccattgaagcaggtaattatgtcatgatgaatacatggaataatgaccaagaaattgcaggactgtatgcgtatgatccaatgtcggttatttcagaaaaaattgataacggtgtttatcgcttaactcttgcgaatcctttacaaaataatgcatccgtttctattgaatttgataagggcattcttgaagtagtcgcagcggacccagaaatttctgttgaccaaaatattatcactttaaatagtgcggggttaaatggcagctcgcgttcaatcattgttaaaacaactcctgaagtaacgaaagaagcgttagaaaaattaattcaggaacaaaaagaacaccaagaaaaagactacaccgcaagcagctggaaagtctacagcgaagcattgaaacaagcacaaactgtggcagatcaaacaacagcaacgcaagcagaagtagaccaagcagaaacagagttacgttcggcagtgaagcaattggtaaaagtgccaactaaagaagtagataaaaccaacttgttgaaaatcatcaaagaaaacgagaaacaccaagaaaaagactacaccgcaagcagttggaaagtctacagtgaagcattgaagcaagcgcaaactgtggcagatcaaacaacagcaacgcaagcagaagtagaccaagcagaagcaaaactacgttcggcagtgaagcgattaacattgaaaaatagtggggaaaataaaaaggagcaaaaaaatggggggaataatggacacttaaatactagtacaggagttgatcaaactggtacgaaacaagttaagccatcaagccaaggtggtttcagaaaagctagccaatttttaccgagcacaggagaaaagaaatcgatcgcgcttgtgattattggtcttctagttatcgccagtgggtgtcttttagtttttcgtaaaagtaaatcgaagaagtaaaaaattacggattcactaaaaacataataaaaaagcagacttccatacaagaagtctgctttttcattaattactccgcttctgcattttgcaagtcagcgacatcagtcagataagtggcttcatccaacaaatcttccgaatgtgcgacataaatcgcagtggcgctatcaccaaccacgtttaggctagtaacgagcatttcgattggacgattaatggctaaaatcaatgaatacgtcgcaatcgcaatctcattgttatagtttaaaccagttaaaatagtgaaaaggataatcccgccagcgccaggtgccgccggtgtaccaatggatgacattaaagctaaaatggcaatcaaggcaatattagctggtgtcacttcataaccagtacgcccgccacaaaaatagccgcaattacttgcataatcgctgtgccgttcatattgatagtcattcctaacggcaagacaaaggcggcaacatcgctgtcgacacctaactcttcaaccgttgtttttgtatttaacggtaaagtggctgccgaagaagaagtagaaaatccaaagaccacaactttcataatctttttaataaaaggaacaggatttaattttgtcgcaaataagataaataatgggtaaccgatcatcaaaaaggctaagagcgtcgctgtcgtggttacgacgtagactaacgctggttttaaataatcamtcccgtaagaagcaaacgtccgaactaacaacataaagacggcaataggagcaaatttagtaattacaaaggttaaaaataacgtgaccatcgcattgacttcttcaattaattttttgaaaacacgaattttatcccctaatgcattaatacataaaccagtaatcactgccaacacaacaacggctaaaattgcaccattgtcgctaaatgcagaaccgatatttttcgtgacagcattgacaatcaccattaatgggttgccgctcgtacttacttcgacaggagctagcgtttcagataacgacacattaaaagcgccagttaaatatacgctatagcccacaattccagccgttaatagagcaatcagtgacatcgataaaaagccaaaaattgttttataagaaattcgtcctaatttttgcgtatcggtaatatgacaaatggctaaagtaattgaagtaaagaccatcggcacaatcactaattgtaggccgttgataaatagttgaccaataatatagaaaagcccaatcgcagattgtcctttttcaggatctgaaatatcttggaaaagaatctgattgattgtctgccacacagcgccttgattgctgcgaataaggtgctctcttaaaaataaaaagccgagcccaacgattaatcctcccaccaatgaaatcaccatttttttggtaaatgagatacctttcacttca

SEQ ID NO: 231 - DNA, 2991 bp; double-stranded, linear
tttcggtcactatcaccatctcttgaaagaagttcaatggctacatctccgtttagctctgcttttgctttatctaaatactctttggcttttttggcgtctgttttgacaagagcgcctgcttcttgacgaaaatcttcattcgtttctgggttatatacaaatttttctggaatgtacccataaatttcttttgagccatctgctaaaatattatcgactaaactttttttatccaaagcataagctaaagctttgcggacattctcatttgcaaaaatggatggtttttcgtttcttttttggtttaaacgtaaggaatagacttttgaccgttcgattgcttcatagtctgggttgtctcgattttgtttagcaaaatctcctgttaagacagccacatctaattcacctgattcgtacaaattataaacggtattggtttctttaagaacttcaaaatgaatcgtttctgattttactttttctttatcgtaatagtagggattacgcacaaaatcccacgacatcgctgactgatcccaatttttcattaaaaacggaccattagatacaatcatttcactagaagtgccataggcttgtcctttttctttcacgaatgcttcgttttgtgggaaaaatggagaaaatgccaataacgacgtaaaatatggtacaggcttttctaaagtaacctccaaagtataatcatcaagcgctttgacacccaattcctctggtgctttttcctcttttgtaatagctgttccgttcagaatcgttccttctaacaagaaaaagtaattggcttggtttttgggattcgctaatttacgccaagcaaaaacgaaatcattggctgttacagcatcaccattggaccacttgccatcttctcttagtttaatggtatatcgtttgccatcctcagaaatttctggcatctctttagcagcagcaggtattagttgatctttttcatccaattgatataacccttcaaagacattggactgtgcgttaatactggcttcatcttgtgtaaaaatagaatccattgaaccgatttccgagttctccattaaatttaaaacttttttcgagacactggttttctcagttgctttctcgtctatttttgtwtctgctgttgtgccacaacctaccaagaccgtactaacaaataacataatccccatcatttttaactttttcatactattccccctatgtgtcaatcaaacggcaactcttccatggaaagccgttcttgcgaaactatcaagcatgcgtagggcaagccctcattttcgtactcaaattctccccgctggttgtcaattgggtctgcacgcaattgcatttttgccggctgaaagtctgcctggatctcactatttgcgaccattctaaaaacatctaaattgccgaaataatgattccaccgctgtctatccccgtctcggtaagcacctccgccaaaagacaaatccgcaaagagccagccgtacggttttatataaaattgtgcccaatcatgacagcctgtataatgtgtagaaacatataatcccgattgccatttggctggtatccctgcaatccgacaaagcgtgataaacaaaatcgcttgcacgccgcagtcaccttttaaattagttgcagcatactctgaaatattggaaattgtaaaatattcacgcatgaaagaataatgaatctttgtcgtcacaaagtcataaatcaagcgtgccttttttaagggattactttcatcgcccacaatctcatctgctaaatttcttaaataaggcgtgaatcgaatatgcggtaactgttcctctaaatcaaagcttggttgcattttgtctacgttattttcttctaactgttggtaaaccatccgattaacataacaatattcaactgtaaacgtttgattttcttttaagattgtttcaaaacacagtgttcgttgaggcgcatcttctgccgcaatataggttgcttcaggtgacgtagctaggatttcaatttctgattgttgttgacacgctttgggcagcggcaaatggacacgaacacgctcacctggacgctcaaattcttttttcacctgaatggtggctttaattgttgttctcacttttctaccaccgtttttttgcatttgttcgatgttctcttttagttcttttttgcggagaatttctaattgattgctttctgcttcccgcaaacgtgcaacatatgccgcatttgttttaattaaattggccaaaaatcgaagttggaaatacggttcaccatcaatataaacccagtccactaatcccgtttcttttaaacgaattaattcctctgtttgataatcctgaaaagtatctctcatcatttgatcagcttttgcaaagctatgaggatactcattcatacgcatcattttaatggacatctttttcaattatcaaacgttcttttaatgcctgcggaagttcttttgtcaaccaaaamtcaatggcaatatccgcacttgcaaaatcgccaaattctttcaccctttgaatttcctcaggcaaaggaacactaagatactttaaatcatacttcatttactttactccttttttaatgagaaatgcctaatccagctgcttctcctaattccaataatggttttgcttctaaggatacgcccccagttacgggcgcagtttctaaaccgaatgtcgcatctaaatctgctcgtgtgatattcttttgagcagcagctaaatgggcagcanccgtgatgccaatggttgtttcttccgccatacaaccaatcatgcattcgatgcctgctgtttcacaaatctgattaattttcagcncttcatgaatgccnccacacttcattaattttatattgataacatcgactgtgccttttttactaattccaacgcatcttgagcatcaaaacagctttcatcanccataattgtc

SEQ ID NO: 232 - DNA, 4346 bp; double-stranded, linear
ttggaccccccaaattcttccttcgtcgaaattaaccactcccccttggntgattggatcaaggtctggnttcctttacgccccaggccattggggtgtttccaccaaancaaaccttggatcccgctggttaaatttcacatatcacccattgattggaaatcaaaagctatcttctttaaataagattacttataacgagaatttattgacaaattaagacaagaaaacaaatatacagaatcaactattcaaacgtggcataaaattgtaatgaggatgattaacgctgcggtacacaatcaaatcatccctagcaacacgctaacaggctttaaatttgatttaagtaataatgttcgttcgttctctaaaaaggaattacagcgatttgtggcggttttagaaaacgaagatattcaaacgcaagttatatttttaactctgctaaaatctggaatgaggaaaggcgaactgatggggctgcgttggagtgatattgatttaaccgaaaaatatttcgatatcaattctacacgtggtgattacggtgaaaataaacctaaaacaaaaaccagcatacgtaaagtttattttgacaactcgttactcactttaataaaaaaatacaaaaatcatgagaaagaacggcttttcagagaagggataattttaagcgataaggactattttattttaagttctcgaaatttacctatcaaacaatcaagaattacgtatatgtttcgcctgttatgtgaaaaagcagaagttcaaaacataaccgtacacggcctaagacatacccatgcaacgtttttaattgaagcaggagcaaacattaagtacgtttcaactcggttaggacacaagaatattaatataactttggatgtttatagcgatgtgctaaaagaagaagaaaaagaaacagctgatatgatggataaacttattgagaacttgtgatttgtggtaaacctgtggtaaaaacattaaaaaccattgatatataagcactttaccactccccatctgaaattgtaaaataagttgttgtttcttttcagtccaagtaaaaatatatttcactaaacggccattgttccctgacgaatgaagaaaactgagtttacttgggccactcactgtcattttttcaggtacagctagtaaagtcctccgagctgattggttcaatttatcaggaaatgaaaagctttgttgttcttcaaaaaaccaaacttcttgtgtttcctctaaaacaattgcttgctgttgcgcaaaacgaagttgtttttctaccgtagcaagaaactgttcaatttttaacgtttcttgccagcggtgaatagcgagtgtcgggagcatagtcataaagcaaacaatcgttaaactaacaagtgtttccattaatgtgaatcctgctgacttgttcattgcttttctgctgtatatttatctaactgctctttagtaatgtagccttcgttgactaattcatttaaggaaggcgtcttatttttttctagtgtgtagagctcgatttgtgattctacaatttttacgattgcttcattgccttttttatcaactgtttctttatgtttcgctaagttagggacaaaaagtaaaatcaatacggaaataatcaataagacaatcaacatttctaataatgtaaaccctgcgtatttttgtttctttttcattataaaactccttccatattgccataawtaggcagcaacattgccccataaacaccgataattaaacaagcaattatgataaaaataagtggttgaacgagagtaatgactcgttcaatttttttgaaaaaaccttggaaacagacattactataaaccatcaactccttgcctaattttccttttacttccccttgttgaatcattaaacccaatgctttcgtaaaaaaaggataagcagctaattgtctatgtaaggtttcaccaactagcagtccttcactaattgctccagctaattctttcattaaggggtaattggttgtatggcgcatcaaatcgatgacctctttcatttctaatccttgtgcaagcaacttcccccattctagtgcaaaaaaagcactgacgtattcccgataaaggccacggataattggcagtttcagatatacgaaggcccgctgaatagcagactgatgcttcaaataacggtttaaaatgaagaaactaaatgagaggacaaaaactaaggtaaccagaatgtatggactgtaaacaatcagaagaatcccaatatttttagaataactattggcatcattttccattaattggggcaataaaaattgccgaataccaacaatgacgagaatcaaaaaaacaatcaggagcagcggataactaattattttatagaactgttgccgatatttttccgtttgaaaaaaatgttcggaaatcgcttgtagtgtccccaccaaatccccgtgtgcagtagcaaacgacaattgtgccgagaccattgttgaaaatcctaattcttcgactaaagcttgtaaggcaatgcctgaggaaaagccttcaactaaaaaagttatactgtgctgaggtaaggcgtttgattttttcatgaaggaaaaactttcttgtatattaaaaccatttgcaagcaaatccgctaatagtttcagaaaaagctgctgttgttttttcgttaatttattcgatggcttgaaaatacgttttttctgtaataaacccatacgcccacgcctttcttagattcttttgccaactactctttataacggcttccttaaagaagaaataatcataaagaattcccgctacttgttccttattaatcgtggttgtcaaaatctgttgataaatgataccttgcaagcattcagccaattcatgctctgggccacctaattctatcaaacgccgttgcacccccaataagttacgggcgtgaattgtcgcaaaaatagtatgacccgttaaggcggctcgaataactgcttgagccgtctcgccatcacgaatttcaccaataatcaaaatatcaggatgatggcgtaagcaaacttttatcaaggcttcgtacgttaactgaattttttcatttgtttgcaactgtaaaaactgcttttcctcaatttcaacaggatcctcaatcgctatcacttgttgttcgccacttctttgtttagccacacgatacatggttgttgttttcccagaaccaactggcccactgaataaataaagtcctcgtttctgacaagatgcttcaatttcattcagctggtggggaaagaaaaaatgttcagcttgttcaccaaatcggtgcaaaaaacgaattaccaagctctctcgattctgaaaatctcccacagatgataaacgcaagcgttgcttcgtctcgccaattagataagttgtcgcgcctaattgtgcttttcgtctttctccgacatcccatgccgcctataaatttaaagtggaaaattaacttttcgcctatttctgcggaaacttgtgtgtaaagtgtccgttgcatccctgtccgaaaagagatggctatttcggtatcattgggtaaaaaataaacgtcttgcgccccatgaaggacgccccattcaattaattgatgagccaatttttttacattktcagtcattcatttcctcctctcactaataaactacgcatttattttatgatttcagcaaaaaaaagaaccttcaccattaagatgaaggttctttttttgaagtttgcgctgtccatctatcttccccaaaatagtggaactcctagacacttagtattatactaaaaaaatcttgcgtttagttttcaaaaatttctctgaatcacaaaatttttgagaaaaactatgataatccgattggatcgtttacgtttttggcttcgttttttgtttattaactaaataaactggaattcctagaagcgtaatccctataccaatcaatgctagaataggctgtgtaatactcgttgtaaccaagatgaagataccacctagacttgcgataattggaataattggatagccaggaactttatacggtcgttttaattcaggttctcgttttcttaaaataaaaacagctaagaaaattaatagattaaacagccacataacaaaaactaacatatccgtcaataaatcgaaggttccgaaaaacatcatgataatggctacagctaactggaaaattccagcaacgtaagggcacaacaaagcgtttaggacaacttttgaaactgaacgactaaaaggcatcagattatctaaggctaagggcataaggg

SEQ ID NO: 233 - DNA, 10555 bp; double-stranded, linear
cttcattcgattaataaattcatcccaatttacttcattgcctttaaactcaggtccatcaacacaggcaaatttcatggtgccatcaacagtgacccgacaaccgccacacatgcctgttccgtcaatcataataggattcaaggaaacataaattggtaattgatgtttttcagctgtcaaggtacaaaatttcatcatgatgctgggcccaatcgcccaactgcacgctacagattcacgtgcaataacttcttccatcgcttctgttactaagccctttttacctaatgaaccatcatccgttgtaatgattagctcatctgaatamcgacggcattcttcttgtaacagaactaactcagctgttcgtgctcccaaaatcgtaatcactcggttgcctgcttcttttaaagccttgataattggataaatagccgcgataccaaccccgccaccgacaaccatcaccgttccatattgcttcacttctgtgggcatacctaaaggtccagtgatatccaacaaagagtctgaagttttaagttgggaaagtgcagctgttgtcttaccgattacttggaaaataattcgaatactgcctgcttgtggatttgtctccgcaatcgttaaggggatccgttctcccttttcgtcaattcttaaaataacaaactgtccagcctgagcatgtgtcgctattcttggcgcttccagccaaaaatcaaatgtattactagataattgagtcgattgaagaatattaaacattgaaatacctaccttcatcgttccttttcattctgactcctactttcttaaacccttaggcaacgctatcagataaagttgtggcgacacttttaacaaatgtttttagcatttcgatgtcttcttcttctgcattgttttcaatttcaactgtttcagctacttttttagcaccagctttttcaaaagctcctacaaaatcatgcgctgatttacagaaaaattcaccatattcacgatcaccggagccaacaacaccaaatggcttacctgctaaatccttctcagttaattcatcaaagaaatcttcaaattcaaaaggcagttccccatcaccataagtatacgttgcgataatacaagcatctgcatcatcaaagaagtctacatcaacttctgaacattcttcacgttctacttcaactccagcttcttgawactgttcttccaaaatctcggaaatttcttctgtgtttccagtcatacttgcataaacaatttttactagtgccatcttcattcatttcctttctttttcctaaatatttcaatgcattcaaatgcaattgtaaccccttacattaatccttaaaaaaataacttttacaaatgattttattcacaactaatctaactaagtatgtactcttcccctttcgagatagagtattttttactacgtctttactataccacattccaaacctttttaacaatatttttaaggtaaaaaaaatattatttaggttcttttttataaaacgtttttccttcttccaatcataaaaattgcttctaaaaccgctccccctaatgcacgagctttgtcggagatcgtcaagcaatcgactttctcaactggtcgaggatctacatctgcacacttcaacccttgataacatgttaccttttctgaaatcaatcctctcaaagtccctgtcagaggcgaataaactggaacctgatcgattaaaaataatgcttcccctttcaacacgagatcccctatgtttttaaggtgggtaacttgtcctgaagcaggggcatggacaactcgttccgcactttttccgccaatttcacctggaatacctgtattaggtaaagctgttccttcaaagtataaacgtcccaacctatggccacgcattgtctcaatcacaacatcgacatcttgcggtgctgaaaagcctggtcctaaagcaatcgtaatcggtgccattcctcgatgcgtacctaaatttttcttagccaaaatcgcatcgataacaatcagtggtttcaattgttgaatagcacttgctgtttgatcgacaaaaacaggcagcttattttgctgccaacatttcgcgcaatcctttaatgaagtaattcgaacagcaaccaaatcttccactctttgttctttctgaaaaatagcatcacaaactgaaacagtccgccgaatggccagaggacattctgtttctaatactagtattttaaagccaacgtgccataatttttggataacacctgtcgctagatcgccccctccgcgaacaatcactaatttttcttggatgttttgactgatttctcccataaaataagtcctttctctaattccatattgcaagcaataatcttgtctaatttttcaaaacagcttttgggtaattgaagacagacattcatcgcttgaacgaactctcttcgcgtatgggtttgatttaaacataaaattcgttggccttggctctctttaaacaatccttttggatgatcaatcagttgagctaacaatgtttctgtgattggttcttgtagttgcgcatcggttaattccaaaaaaagcggcaaccgatgaatggtcgtttcatctatcttttgaccaatcacagaaatcggaagcacaccaattgtggtggttgtttcttttaatatcacgggttcataagaggaccagcctttcaaaggtcgttgtttggacccatccgcttctaaaaaaactttcgtgaagtgctgaaacaatgtttgaaacgaggtcattgcaggcatcgttagttttgtttggttgttgatagcggttcctgctaaagtgattccgcagatattcggcgttattttttcaaaatggtttgtataaaaataatcatacaattgacgttggggaaacccaatttttgtagttgtactaaccagaacagcttcctttcgatatgtttttgctagcgcccacattaagcttgttttcccaccgctaccaacaatcgacacaatctcctttccttgtaaatcaaaacacttttttaaggactccacagttggtacctcctttccccaaggtcatttttcacagaaaaaatagaggctacgcgtacttttgcttcttctaaaaaacatacactgtgagttatttccgcttcattaatgagtaaaccgatcccacagccatccgtcaatgatgggggcaaagtaaagacgcgaacagccacctttcttgccaacagtacttgttccgcctgaacagcataatgtgtattcggaaaggttagcaaatactccatcttttcaccttctttttttgttaaagcgtaattactttagccgcttgattcattgtttcaacaatttcgtacatattagtaatagagccgatagctaaggtgtctgttaaatgataaaaatctaaacaggccccacacgtttgaatcgtggttcccttctccgctaattgttgcaaatcagctaaggtattcgctgcttgattcgttaaaaacgcccctcgattaaagaataatagctgtgtaggaacagtttctgcttctgataatgattgaagataacttttcattaatagtcgtcctagctgctcgtctccagtacctaattgatcggagccaatcgtaattactaaatctgttgctgactgacttgtttgttgagtcgcttcttcaggtaccgtaattttgacagagaaaaccgtggcttctatntgcttcgcagtcaaagtggcctgttttttagtagctaatttttttaaattttcaatggctacttcgttatcgactaatacctcgatagtgcctccagctaaacctaactccgccaaagctttttttgtttcaatcacaggtattgggcaaggtttccccaatgcatctactaatttcatatttggcccttctctctataaaagtactactgcttgttgttcttttggcagaacctcgccaataattttggcaacagggtcctctttttgaatagctgctaaacaggctgccgcttcgtcagcagcgacactaattaacagtccgccagaagtttgtggatcaaacaaaagttcttgcatttccatagaaatttttgaataatcgattgtcgttccgattgtttggcggtttctttgcccagctgcagtgactaaacattctgcggcgtaggccaacgctcctgtaatggttggtaatgcttctgtatcaatcagtaatgttacctgattatcagccatttcttttgcatgaattaatagaccaaacccagtcacgtcagtacaagcatgtactgcgtaggatcgagcattcgcagcggcatatttatttaaacgttccatcgaatcttgtgcgattttttgttccgtctgcttcgccaattgcccccgaacagccgcttgaataattcctacacctaatgctttagttaaaatcaagacatcccccacctgtggcgtattattatgccacaaattttctggatgaacttctccggttaccgctagaccatacttgggttcatggtcataaatcgaatggcctcccgccagtaaagcacccgcttcctttaattttaagctgccacccaagagcatttgttccaaccattcttttgacatcttttgtggaaaacaaacaagatttagcgcataaaggactgttccgcccatggcatagacatcacttaaagcattagcgaccgcaatttttccaaatgataacggatcattgaccattggtgaaaaaaaatctaccgttgaaatcaaagctttttcagacgttatttggtaaacagcggcgtcgtcggcatgttcaaatccgacgagtagccgctcatttgccggtgtttcgggtaagtgttgcaacaattggttcagtacacgggattcaatttttgccccacagccacctgatgtacattgtgataaaaaatccatgctgtccgctccttctcaaattagtagttcttgtaaagcgtgaattgtccaagtaatttcttcaggcgttgtctgccaaccaaagctaaaacgtaaggtgccagttgctaaagtcccagctgtttgatgggctaatggtgcacaatgcaaacctgcgcgcgtcataatgccatattgttctgctagttgctgtgccactattgtttcttcctgattccacagtgtgatagaaacaacagggacagtttgtgccacgtccttggttcctaaaattgtgacaggtaaccctgataaaccatttaaaaaattctgcattaaggttcgttcatgcttttgaatcgctgctaaaccaattttattcaactctttaatagaactatttaagcttagaatacctaaactgtttaacgtaccagcttcaaatttatctggtaaaaaagagggttgatcaaaggaattagaatggctaccagtgccgcccgccatcagtggtttgaccgcttcagcccctcgctcactaaaagctaacccaccaatacctgctaatccatataagcttttatgtccagtaaaggctaacacatcaatggccatctgggtcatttttattggtaaaaatcccgccgtttgagccgcatccaaaatagttagtaatcctttctgttgagcccattgaaaacattcttcaatgggtaaaatggtgcctaagacattggatgcgtgtgtcatcaccaaggcttttgtattcgttcgccaagctcgctgaatatcttctacttctaacaggccagttttttgacaagcaacatatgtcactgaaatgcctcgttctttctcaagtaagtgaagaggtctagctactgcatgatgttctaacatagtcgtaatcacatggtcgccaggttgtaaaatccccgctaatgcaagatttaaggaagttgttgcgttattcgtaaacgtaatctgagccgcactgggtgcctgaaaaaagtctgctaacaattgacgtgtctctaaaagaggaagcccctctctaagcaaaggggcatttcttccgtaattcatgaactgattttctgctaaataggcagtcaaagcctcaatggttgctggaaattttttataggaagtcgctgcataatttaaataaaccaagtccttcatacgtttttcctctctaactattggtttcttgaattaatttttggtactcttctggcgtgtcgatatctttcaaacggccaggagtcgctattctcagcatctgaactgcttctggaaagcgttcataaatcatgcgtccgcctttttcaccagtcaatgttaatagttcttgtcgaaattgattaccgaataatactggactactaggacagccatctttttgtaatggcactacaattttatttctctgacatttatctaacacgagttgtagcattttaggtgttaacaatggttgatcgctaggtaagtataaatagccagctccccgagcttgttcggttcctaaacgaatactgctactttgtccttcttgccattgatgattgagaatcaactgaatgttcttaggtaaaggaaacgctggctgattctcaggcgaaacaactaaaatccgttctaatacgtctaattgattcactaaggttaacgtgtgctctaaaaatgtttttccttgatattttaagaacaatttattttggcccatccgttgtgaattgcccgatgctagaataatgacactaacgagtgacatgagttgtctccttttatctttttttcttttgataaggggtattttctaaaggcagacttggtcggagctgaccatccaaggcaaaatatgcgcctgctaaagctggtgcggtagggatcgttgctaactcacctacgcctttaattccataagctaaaccttcgtgaagattgtcagcatgaaccaaaattgtttcgattggtggtacttgagtggcgttcactaatcctagcgttgcatattttgctttaacatagccttcttctaaggcaaatttttcagttaaagcataccccatgcccattgcaatcccaccttcaatttgaccttcagcagctcgtggattcaccacttgccccatatcatacgcagccacaaatttagctacttttcctttgtcatctagaatagctacttcagcagcataaccataaccagcatgactaactggactttttttatcattaattaatggatccgttttcgctgaatattccccataaaattcttcgccttccaaatcgcttaaagcacgtcccatatcaagctcataccgtaattgcattgccgctcttctagttgcttctcctgtgaagagtgactgcctcgaagccgttgtcgttcctgaattcggtgttcttcttgtatcaggggcttccgcaacaatcatttctggtggtaaatttaatgtttcacaggcaatttgcgtcgtaacggttgccatcccttgaccgatacaagcagcacttgtgcggacatgtatttttccttcttcaacagaaataatacaacgccctgtatcaggtagccccacacccacgccactatttttaaagaaactagaaattccagcaacttccgcttgttcatagacgtctttaaccgctaacaaggcttcttttaacgctgcatttttcgagaccaattgtccattcggtaaagtatctcctggggcgacggcatttttaaagcgtatttcccatggtgatagtccgactttttctgctaacaagtttaaattactttcaattgcaaaagccgtttggcaaacaccaaatccgcgaaatgcacctgctggcggattattagtatatacagcaaacccttccacatcaatcgtttgatacttgtagggacctgccgcatgtgtacaagcccgttgcaataccggtcctcctaaagaagcataggccccagtatccgcataaatcactgctttcattgcagttaaattgccttcttcatcacagccggtcgtaaagtccatttccatgccatggcgtttgggatgaaccatcaaactttcttcacggcttagcagtacttttactggtttcttcaataaccaagcggctaaggatgcatgatgctgaacactcatgtcttcttttccaccaaaaccaccaccaacaagttttgattgaacatgaattttttccttgtctagccctagcatccgagccacttcccgttgttcatcatagatactttgacccgcactaaagagtaaaatgccctcaccttcaggttgtgcaatcgcacattcgggctccataaaggcatgttcattaayggtacggaataatgtyctgtcactacaaacgcagawttttctaacacttcctctgcatgccacgtaccaagtgttcatgagacaagatattgcccttttcatgaatagctggtgcaccttctgctaaagcagcttcacaagaagtaagcggtatcatttcttcgtaatcaacttccactaaattttttatctctggtaaggtttcttttctttttgaaacaacgagtgctactgcatccccaacataccgtgttatttctccttctggaatcattacatcccaatcggaaataaattctaaatgaccaattttattatttcctggaacgtctttagctgtgaacacagccacacagtcaggatgcgccaatgcttgggtactatcgattgatagaacttttgcgcgaggataggcactccgcaaagcagatgcatgaagcattccttctatgtcaatgtcatctacataaatccctgttcctaaggttttctccactgcatcgacccgttggaagtcttcccctaatttaccatttgaatgktcttctggaatgctcgcttcttcacaaaacattttagcagctaactgaatggcttctattattttcacatatcctgtacaacgacaaatgtttcctcgtatagctttctgaatgtcttcttttgtgggttcgggtttcttgttcaataatccttgtgccgaaataaccatcccagggatgcaatacccgcactgaactgcacccgtttttgcaaacgcataggcatagacatctttttgccgttggcttaaaccttcgattgtcgtgacttctttaccagctaatttttctagagtaaacaaacatgctttggaagcctttccatttactaacaccgtacatgcaccgcaagagccttggttacagccatcttttgttccagttaggcccagatcctcccgcaaaaagtccattaattttttgtttgtttcacaggtttcactttgaccatttacaataattgaatacatttcttgcacctcgatttctgatatrgtttagtgttcaatcacckrgattataccacaaatctccgttctaaaaattattttttagcaaaaaaagttttttatttaatttaaaggttcgcattattgatagcgctgttgaattaattctcccgcgatgctaatcgctaactcttctggtgtttcggctgcaatgtctaagccaattggcatgaaaattctttcaatttcagtcattgtataaccgacctcttttaaccgtcgaacttgtgaagcaattttgtgtttgctccccatcacaccaatatatttggctggtgtttccaataactgtttggcaacgatgaaatcaaaattgtgtcctctggtaattactataccataatcgtccgccgttatttcaataaacgcagctaaattttctaaaggaatcacccgtagttcttcagcttgtggaaaagcttgtgccgtcaaaaattctggacgatcgtccactacaacgcaataaaacgataaatagtttaaaataggtaccaatgcgcgtgcaacatgaccacttccaaaaatatacactttccctacttggaggatcgcttctgttaaaaaaattatgtcctctttttgctcacaatggatacctttaggtagcaaacttaattccccctcccaagaagtggaaccaatcaattcgcctgtttcactataaaaggatacttttcctaaattgttttgatctagttcagtcactaaccaaccttgttggttattttgaaaatgcgtttctatggattcacacaactcctttaaaaatggcgtttcccatgaaagataatggaaaaaaatcgtgacattcccgccacagaccatacctaaatcagcaatattattcggggctaaaataaattgacgttgtgcattttctttctcaagaactagcttttttgccacttgttcagcctgaaattcaaccgccccaccaccaacagttccggctattctaccttcggcggaaaccagcattctagccccttgacttcgtggtgtggatcctgaacttgtaccaatcgttaataacatcgtgtcttgcttttccaatattgcctgtttcaaacgctgaaatacttctctcatttcagttcctccgatactacatcctgttctttaaatatttcttcaaagcatgcctctacctgttgatacacttttttctcaaataaaagatattgatcaatcaactcttttccttga

SEQ ID NO: 234 - DNA, 752 bp; double-stranded, linear
cccactcaacgtacatttaaaacataccctattactatacaggattccctttactttttcaagatgtttttatgatttcaagacaatttttttatccgttattttcttcatgaaatgcgcatcatgctcaatcactagcattgcaggcttcacagataagattagcgcttctaattgttgatgattaaacacatccaagtaattaaggggttcatcccaaatataaagctctgctgattgagacaatgatttggctacttcgacttttttccgttgccccatactcatttgttcaattcgattagtgaaaacggncacgctccatcccaagttttcgtaagttatttaaaaattgggtgtaatctaactgatttttctctgcaaattcggataaagttccttgattgtcttcataatcttggcgcacataagaaatggttaattggtgagccaaagtggcttcgccttctgaatccccagaaaaattatccaataaatactgaatcaagctcgrttttcctgagccattttttcctgttattccgacaatttctcccgcgtttattgaaaaagaaattggcgcmaacagccaatttttctcgtagcctagacgaagctcttccaccgtcaataatgttttgtgatgcgttggctgataatccattgacaaagaatcaatatactcaagatcttttaatagtntttctttttctgctaanngtgtttcggcgcgttgttggaatatgtttcga

SEQ ID NO: 235 - DNA, 2779 bp; double-stranded, linear
ttgatatccagtttgtaataaccatggctaaaacaatcgaaacaatccctggatcaaagactgttagcatcaagatcataacaactaagttaggaataccagaaagaacttctaaaatacgttgcattactgtatcgacacgaccgccgactaacccggaaatcagtccatacgttaccccaatcgtaatatctagaattgccgcgataaacgcaattaataatgaaatacgtgttcccataaataaacgacttaggacatcacgacctaaaccatctgttcctagataaaagtttacgttatctggaacgtttgcttgtgcatatttatcaactaattgaccagcaactgttgttttaccatttaaaccattcacgctttccaagccaggaattcgtggtggtaagttaatgtaagaaacattttgtttcgttgggttatgtggtgaaacccaaatggtaataatagagataaagataataactgctaagaaactcattgagataactgcagctttattctttttcaaacgacgccatgagtcttgtaagaaacttaaagacggtgtggcaatacgctctctttcttttagagttgaagtgtttagaggctgaaactcatctgccggaatatctttaatcgcttgtggtagattatttttattgactgtttccattagccttttgcacctcctgatacgcgaattcttggatcaattaaaccataaagtaagtcaacaatcagaattacaacaactaacattgttgaatacaaaatagttactgccataattgttggatagtcgtttgtcataattgattttacaaactgttccccaatcccagggatggcaaaaatattttctactactaaagaacctgtgcattaaaccaacggctaaaggtcctaataaggtaatcaatggaattaaactgtttcttaatccgtggcggaatgcaacttgccagcgactcaagccttttgctttggctaattcgacataatcactatgcaagacctctaccatctcggttcgaataaacctagccgaatcggccatgggactcattgccaaggcaatagttggcaagattgtgtaggcaaaaccattccacatagcaattggtaagattcttaatttcattgcaaaaatgtattgtaataataccgcgaaaacaaagtttggaatagaacgacctaaaatggctaacaatgttgccaacgtatctacccaagtattttgacgcatcgctgcgataatccccaataaaataccgactaacgtaccaaagataatcgcttgtcctcccagttgaagggatggcccaattcgaccagctaataacttagcaacaggttggtttttaaattggaatgaaataccaaagtctcctgttaccaggttctttaagtaaattccgtattgaacaatcactggtttatctaagccagattgtttattcaacatagcgattgtttctggactaagtttttcttggttggtataaggcgtacctggtaataattgcattaagaaaaacgtaatcgttgcgattaaccacaaagtgataatcatgaaaaagatccgtttaagaaaatattttccaaaactattcaataatgacacctccgagatttttttgacttcctcagttattttcgttaaagtaatgactagatagaccacaataatagatagggtgaacacatgaraacttttaaatggccaattattacagccgttatttccagtatcggcatttttctttacttattaataagtaaagaacctatcactacctcctcattatcagatacctyctttatcgtttcgcttttctttttaattatcggcattgctttatggattatatcctctggctttttcgataactttcagcgctcaatgaaaaacgcgtttcgttttaaaaagaaaaatgaaccgaaagagtttatcccgctttcagtcattggcgatgcacatcgctctttctggctaaaaactgggggcatcttactgattctgtctttaggctttctactantttacttggtctaagacaagatagcaagaggaccgttgccttttattccatggcaaaggtccttttttgtttgctatcgatcttttgtcaggttattctgaaatgtatgcccatttgtagtcatacgttgcgccagcaggatgaactgcgacatctttgactttttcagcacgtaaatgcgcttctgatttttggaataatggtaccacacccatgtctcccataatcgttttctctgcatttaacatatcatcccaacgtttttcaggatctgtcgcatctgcactacttgctgctttcacgaacttgtcaaactctgcattgttataacgtccacggttatatgagttatctgaagcaaataagtctaagaaactacttggatcagcatagtcagcactccaaccaccgattactgcatcaaagtcgcctttgtttgaacgatctaaacgaacagagaatggaaccggactaaccgttaccttcacaccatctaaagcatcttgaattgacccttgaacaaattcaactgttttcttagaagaatctgcatctgaagaaagaatatccattgttaaggttgaaatccccaattcttttttcgctttttcccagtattctttagcttttttcgtatcatattcaatttgactacctgcttctttagcaaagtctttgccgccacttgggtcttttgccatatctgctggtactaaaccgtttggctcgataga

SEQ ID NO: 236 - DNA, 10955 bp; double-stranded, linear
gtggcagcccagcaagtcaaagtgcgcccgcacctgatgaagtgttggcgacaagtattgggacgtatgaaaatcgaacattgttggttccagatgggcgtttagccttaactgccttgcataaaggaaaagattatcaaggcaaaccaatgttttatgtcctgtttgaattaaccaatacaaccgaaaaaacacaaaatattcagctaatgattcaaagttttatggaagttagtcaaactgtccacggaaaagcccaaaatttacaatatgcagtcttaacagattcacctttccaagacaaattagatcgtttagcagatgaaatcaatcctggtgaaacaatccaaggcgcttacccgtatgaatttattaatgagaacaagccggtccattttaaatttagagatcgccttctcagtctggatgaacccattgcatcagaagaaattaccattacagaaaaaagtttggtccgctagcttagctagcattggaccaaactttttatttattattcagacggaaaagattctccttctataaaacgtgtgtaaatgtgttcgctctcagcagcttctccccgcattaaatgaataattttctctgcagccaccatgccccatcgatgtttagaataggcaattgttgctaatcgcggttgcacaaacgcacctagttcagaattatcaaaaccaataatccgaatgtctttccccatttggtaatttgtttctgcaacatatttatagacaccaatcgccatttcatcattaaaagcaaaaacatcgactggttctgtctgtggttgactcaaaatttttttagcagccgcatagccagaaggttcggtaaaatcgccttggataatttcataaggtatcccaaaacgagttaattctcgtgtactaacagccaatcgttcttggctatcataacctttttctggtccagaaagcagaagaactttttttgaacccacattgacaaattgctcaattgcctgcgtggcaccgccacggttatccaagagaacttgccgaatattcctatgctcagtggttcgatcaaggacaacgatcgaatggcctcgttcagcaaacttttcaatttcttttgttggaaatgtccaatctaaaataattgccccatccaccattttttcaggaatgaaaagatgtgactttttaccgctgcagacaatcatctcataatcaaacagtgctaagcctttcttaattccctccaacaattcaccataaaaactaccgccataatcagccaaatagacaccaataatattggtttgacgacgttttaatgtgcgagcggccatgttaggaacatagtttagctcttcagcaattgcttggatgcgcgttcgtgtttcttcagttacctttgaactaccattcaatgcgtaagaaacggtcgagattgatacgcctgctttttttgcaatatctttaattcctaccatggactactctcctttctaatggtaaatttcaataacacttgcttcatttaataatgaaagcacctcgtctttttgaacttccattcccccttctcgataagggttttcttcaaacttaaacggaacctcttgaccatcgataactattttcgctgactgatttggataaaatttatatgtgacaggtttatcaaacaattggtaagttagtgttaaaccagacaatttttctggtaacatgggatcaaaaactacactttgggccttttgccgaatccctaaaacagctgtaattaattgatttaaataaattcccggcccgcttgaataaattcgccaaccaccttttaccccaatacttccatcttttagtttaccaaaattttcttgtgattcataccttgttttaaaatcgccatcggaactactaaaataggcattggcttgacgtaactctgcattgtgaaccacttcttttaattgaactggattgatttgcattaatgcttgccaggttttgtctcgctgaccaattttcgccatcgcttctgtatagcgaatgtgcgcatgaacatactgtaagccaatttcgcgaccaaaattagccgcctgttctgctcgtttaaaattagtgctcacaccgcctcgatagttcgctggtttgttcattaagcgcacgccatcaggaaacgttaattctttttcaataatttctaaatgatgacttacttgttccggtgttaataattcagctaacatactacgagtcattggcaataatcgatattgaatccctgttttttggtcatttgggtgaatcatttgttcaaaagtttctggcgtttccatataaataaaccctggaatcgtttcatctgccaacatatatttttgaaaatcgttctttattcctgcgactaaaattgctaagtgctgactataagtagcatcgatttccgtaattaaagccgcaaattttttcaacacttgatacgttaaggcaacggtccaactactagccatttgctctttaagacgattatcataaggttgtaacgtgtcatcccaatcgccgtcgccataacaagatagaaaagtttctggtaaaaaatgttgttcaatataatttatttcttttttcaaatgttcaaataaagatgctgtttcttttgttttgtgattatctttgcgacttgtataagggatttccgtagctaagattgaataatctgcggtttgttccaaataatcagtcactactttcaatggccagacgataatatcgccatggctttcactggctttttgttcttcgtatcggtcaaacataaaccattgcggccagttgccatcgtcctcaaattgattttcaaatagatgctgaataatggaggccacgatcttaggctgttgcgtcgcaaagaaaaattctgtcggtccttgcgacacatctcgtgtgccccaagctgctccaccatactgttctaagccatgtggcgacaaataatgaacgagcatattatgagtataccaacgagttaattgattcatttgctgcacacttgagtctgtgtgtgttaactcaaaatgatgtaacaagccattaatgaatgccaaatattgactttctgctttttcaaaatctaatggtgtattgactaatgattggtcctctatactgcccgtaataagtagtgaaaatttttgggtcttttcgattgccaagactaataattctgcttcagctccaccaaataatgtgctatcggttacttgaaatgatttatcaactgtcaatgcataggttagttctgggtaataattttctgtggcagaatgatttcccgtcactcgaagcgttttgccagtttgttctaattgataggttggtacttcttccggtcctaataacaaatggttagaaacagcccacatatatgcatccttttgactggtcacttccaattgaatcactcttgaatcaggcgaagtgaaggtgcgtacacgaattgtatcctttggcaacttataataccacgtagcagagttcaaccccatttcaaaagcagaaggcattgttagtaagcgccataagccattctctaaaatgtagattcgttgaccagagcgtttcataacgtttaaagcgtttcggctattactcattaatttgttcatggtcgtatttcctaaaactacttgtgaattgaaaatgccatacatatacactgtcgtactaagcaaaggttcgtcaaccgttaagcctttaccacttaataaaatgtggccatgcgctctttccatggcaatttctttttcttgaagaacaacatgatggtaattttccgtgaaaaaggaatacgtctgacctgctactttttcaatttgtgtctgaaggggataaagtgcggccaattcttcttctgttaatggatttcctgtgataggttctcctaaaagtttcggaggatagtcctgtgttccttctaatgaatcgaatgtcacagtttcataaatagcttgtaaggcttctttcgataaaaaaggttcagctaatgcttgcggatgtgtttctgttaccgcaccataaaaaacaaattccttactttcattcgttaattggacggcttccgtttgtaaagcggtgtaagcaaattcatattgatagacttcatttgctaaatatcttttccccaatgcttctggtgtgtttatttgtttaaatgaacgtccgaaaaattgatagccgtccgttgagtagcctactaatttttgaaaactcccttgaataagggctggaaacttctcattttgcggttgattttgtcttgataaaacaacaagctcttcgccctcttgccaaatgtgatgatcaagatactgcgacacatacgcttcatttgactgaacggctccttttgtcgctaagccaatatcttgaccataaacaatatctactaagccagttccagtgacattaacccgccagaaccattgattgcttggccccaaacgaaagtcaacttggtaacgaaccgcttcaaattcaccccgccatgtcaattgattatctgaaagataaaaatcactttgactgttggaaccaatcattggtcgataattaattgtgtcccctgtaattatccgcaaatagagttggttcatactgccgtctaaaggattaccttctaattgattaatcatcatgccacagctattcaattcttttaaatcacctgtctctagaaatgtagcaactgtgtctgcttgcttaagcttctttatctgcataacttatccttcccatcttattcatttaacgtgactgttgcggtttgtacatcgcgactatttccaccaatcattacgataaattcacctgcatcactggttacctgattgtctgaatgaacatagcgcaccatatcctctgaaagaagaaactgaacttctttttcttcctttggttccagccaaactttttggaaatcttttaactctttaattgggcgaaccacttgtcccaccaaatcacgtacataaaattgcacggtttcctctccagcgattggactgttatttcttactaaaacagagaccgtgactggttgttctttggtaaatgttaatgcacttagttgaattggttgataagagaaatgactataacttaagccaaatccaaagggatatttagcgtaattagagacatctaaatatttagaaacatatttttcttctggtgctgactcataaggacgcccagtattgtcgacattgtaaaaaattggcacttgaccaaccgtttctggaaacgacatacttaaacgaccacttggattgtactgtccccacaaaatttctgctagcgcattgcccccttctgttccaggttgccaagcttgcacaattccttttgcaacatctatcccttgcaaatctaagggccggccactgtagaccgtgacaacaacattgggatttttctcaataatttgtgcaactaccgctaattgtttttcgggtagacgaatatcactgcgactggcagcttccccactcatccaatctgtttcgcctagtgccactactactttatctgcttgactagctaacgttaaagcctcttcaatggccgccgcggtcggttcaaagtaatcaaagggttcttgggcaactagaagatttgtggttaatttttgggccccagccacgagggaaatggcttcttctttctttccttgccatgaccaagcccctaaaatatcttgtgattgggcccctgggccgacaagcgcgattttttcttgcggtgtaaaaggcaaaatattttcattttttaaaagaaccattgatttttgagcaatctttttagctatttctcgatgttctttgcttaaaatcacttctgcttccgcttgttcatccgcaccacgatagggattttcaaataagcctagctcattttttagttttaaaattcgcataactgcttcatcaataagtgtttcagcaatccggccttcttcaagtaattcttttaaataatctggataacacgtggtcatcatttcaatatctacaccagctttgatagccaattctgccgcttgtttttcatctttggcaacgccatgaggaattaattctttaatcgctccccagtctgaaatcacaaccccttcaaatccaaattcatttcgtaatacgtctctaaacagccattggttgcctgtagcaggaatcccatccactgtattgaaggacgtcatgacaagttttgcacccgcatctaatccagctttatagccaggtaaatacatttctcttagctgccgttcagacatatctaccgtattataatcccgaccagctaaggcaccaccatatgccgcaaagtgcttcacgcacgcggctactcgccaattgtcttcttttaaattttctccttggtaacctctaaccattgcagcagctaagcggctgttgagtaatggatcttcacctgttgactccatgacacgtccccaacgtggatcgcgcactaaatcaaccattggtgaaaaggttacatgtaatcctgaaacagcagcttcttttgctgaaatctccgccattttttcaaccgctgcttcatcccaagtgcttcctaaagccaaaggaatcggaaagatggttctgaaaccatgaataatatccgccattaaaagtgttggaatatttaatcgatgattttgcatatattctttttgaacacgttttgcttcgtttgcaccggaaacacccagtgttgtccccgccgtatcaatcgtttcttgacttagtcctagctctgacatagggccggtcttttcttctgctttatctgaataaaacgctgctgctaattgtaataattgattaattttctcatcaattgtcatttcttcgactaattgaatcagttgattttctttcatactctcacctttcttcaatacatacttctgcttctaaaggaaaatggtcggagggaaaacgtccatcgatactatctgttaaacttgcggtttgctgtacttgccaaccttttacataaatataatcaatttcttctaattccgcccaaggttttgtgtaagtaaaattttgaaatgttcctcttgggccataatgagtagctaaatttttgctatcttgaaattttttttgaacaagttgatgaacctcttcccccgactctgcattaaaatcgcccattaataaagttggatactgtgcaattttgtcatgtaactcctctaagataacggtcattcctgctaaacgagcatgagctgaaatatgatccaaatgaacattgatgactaaaaaaggcgtattttgagtcgtttccttaaatagtccccacaaagcaattcttggacagccagcttcaggatggatacttggctgctgaggtgtttcagataaccaaaaataccctgtatcaatagcctgaactttttgttcgttatagagaatcgctagtccttctccttgaccatccccttctctttccgcagaaagacaggtgaatgttgtatacgcctttaaatccctgacttgattcggtcgtacttcttgaatacaacaaaggctccaatcatgaaaattgattaactgacaaacagcctctttacgaaaagaccattgccaatcttggtcatactctgtatctacccggacattatacgtagctattttcatttttaacctcctgcaatagttgttgaatttgacgcatctcacgacggatctgggttgtttcaccgccaccatggccttttttccaatacactctgactgcttttcttgcctttatctgatgataagaagggaaaaaatctttcatcggacatatcggatcgtgactcccaacagaagcaaagactggatttttaatttgcgaaacaaagtgacgactatcaaaataaggaaggaccgcggcaattttttcatgcgcttgaggatgctcttgtaagtactgatgaataatttgatacgaacccgttccttctgctactctattttctaaacaagaatgacttggaacatctgcaaaagtagctaaaatcgggaagtcgactaaactgttcaccattaacactacgccacccccttgggaaccaccacgaagaatgatttggtcctgattaatttcagtaaaggtccgcaccacctctacgctacgtaaatggtcggcaaacaagcggcgttggtaccaatcttctttgtctagaaatcctcgtcccattggtgcttcatgccaaattgtttgatatggcacgcgatctttggttaatcccccttgacctcgattatcaatgacaaaacaagcacaaccaatttgtgtccaatgagcaaattgccaaggttcttgaatatgattcatatagcctaaacagtcaatcactattggctgtttccccgccgttttaggaagtaacaaatagccaaagatgcgctcacctaggaaacttaaaaagtcgacctgttccacttgaacattttccaatggatagtcaatgacccgccgatggatatctagcggtattttttgaagttcttccttggtcttttgccaaaactcaaaatactcattcatgttccacacctaacactttctgaaaaaacgcaacttgaagaaaagccgttgtcccaaatcctaacgcaatatataaaaacaaattaagcttatagaaaaaaacaaacgttaaaagaggtaaaataaacaaaataatcgcatttgcactattacttaagaccacataaaccgtctcacctagtgtctttttaacggaccaattaaaaacggaaaagagaaaaagaaaactcgtcaaaaataatgcaacaaaacttaatagaaaaatagctaagaaacctaaactagtggctattttaaataaacttgttacgacaataccgcccagtaaaaaagcagcgaacaagacacctgttaaaataaaacctcgcatgatattattttttaacgctgtccaaaacgttcgcaaaacaggaatatctttttcacgatacaaacgatagatcgttcgatacaacgcaattaagccgacaccgctaaagatgcctgttatacaggtaattaaaaagagaaaattaataatgatcaagttggcaataaaagaaaaaatccgataataccaaccttcatatgcaaatagcttattcatattaaaagagaaaagcggatttctcgttgctttatccgcttttctctcctcctctcttacttaagtttgtctctgttttccgccattttctcagattttattttttcaattgcatcccatttatttgattttaagaatgctttgtagtcttctaaagatttgtcaaaggctttatcatctttcgcacgaatcattgaaataacggttgtatttagtttggtttcaatcgcttcattcgcacgagcttccggcgttcctgcatctggattaatattttcaattacgaaatgtgggactaattttcctttgccccattcttgcatttgcgttaaagcactttccattggtacttttagtttattgacacggtcgttgttaaagtataggaaacgactaatgccatattttttgttgtaggcatcattgtctgtttgttctaattttttcacttctggtaaataatcaatttttccttgatcattgtacgcataagtaactccttcaacgccatattttgttaaaatttgtcccggttcatcaattaaatatgtgaacagttgagtgacttttgctggatctttcgcatctttcgtaatgtaattacttaaccaacctgaaatgccggtttgatttaatgttggttttcggccagaagtgctacttggtccatcaatggctatataacgtgtgccagattttttcataaattctgtgaagttcccaccttgaccactggttccagcaacgagcatggttgcataatttccttgtttcactttttcatcaaacgttgccccatcatctgtgaagctatcatcactaatattgcctgctcggtaaacatcattaaatgtttttaaccattctaaatattctttatctaaatttcgatcatagtatttaccatttttatcctctaaaggaacacctaagaagtcttgtaatttgtctaaaaatggtcctgcaccatcgcccactgtggtgaagcccattggggtcatctcaggatatttttctttaatctgttgcatgactttttcaaaattttctggtgttgaaacgtctggcttgcctaatgcattatagacatcttcacgaataacaaaattatcatttactgggatatttccactttcataatccgcttttgtattagagtaattagggtaaccatatgtttttccatcctctaaggcataccatttaaacgtatcttggttaacaactttcattaaataggggtcatattttttagctaaatcgtttaaagaataggcccaagaatctgctttcaatgctgcttgtccagttttttcagttaatgtcacgatatcaggcatatctccacttgaaatcatggcatttaattttgaatcatcgccggaaataaattcaatatccacatttaagtcttttttaatctgcgcagtggtcacgtcttttccaaaaggcagcgccgtccaatctgagttaatataccatttaatcttggtcggttctttcttcttatctaacttccaagcaggcgtcttttcatctaattcataccgatccttaattgagacatctgagctagctttcttttccccaccgctacaggccgctaaactaacgaccgccgttgccaccaataaaccgcctaaaacttttttcatattgttccctactttctttattcttttactgcaccggccatcataccgccgataaagtgtttttgtagtaatggataaatgattaaaattggtatcgttgtaatgaca

SEQ ID NO: 237 - DNA, 6604 bp; double-stranded, linear
gctagtcaaggattaaatgaacgtgctgagtatttagacatcaaacaattatcgtctatgtattcaatgtctgttcctgaagttgaacaaaattttgtaaaagacaaacgtatgcaaatgatcgaaaaaagaaagcctggtactagcaagggaaaaagatactggcctgctaaagaagctataaaaatttgtaatgacatcmtgaatcattgggattaaaggaaaggrcgatacagaaacawtggacaacttagtaattatgaaaaaccaacaagcagtaacaactagtttgcaagtcgcagaaacgtttaataaaaatcatcgtgatgttttagcagcgattgatgatttamaagagggggttgcggaaaattacgcagggctattttacgaagatagctatattcatccacaaaacaaacaraaatatagacaaatcattatgaaccgtgacggattcmcgctactagcaatgggattcactggtcaaaaagctcttaagtttaaactgaaatacattgaagcttttaaccaaatggaggaactgcttaaaactcaatcaaacttaccgattaataacacagaattgttattagaagctgcgttaaaacatgaacgtggattgactcttgtaaatcaacgtttagataagctagaaacagaaactacaattaatagaagccaacaacgaaagatacaagggctagtttcatcaactgttatcaaagtattaggtggcaaaaaaacattggcttatcaggattcaagtattaagcaatcagcctttagtaattgttataaacaattgaaagcattattcgatgtagcatcttatgtagacattccaaaagttcgatatgaagaggctgtagctctaattcctagatggaagcctaacttagaattacaagcaagaattgatatggctaatgataatggagatatgntttaaagaaataggatagtaatgataaarggataagccttamcttatcccsggttwaaagtagtgtcamcaataatagctttttgatccatatcacttttgatggattcaataatttctaaaacagaagatttatagtaataagtcttgcttgatgcgattacttcattttcttcggttttaattacaaaatagtattttttattagaagctttctttattacaaaaaacattttgacaccccgctttcaactgaattatatcaaaaaaattataggagggtaaatatganagcaatwcgtgaagcacgattgatagcgcttattattgatgattgcgctaggtgtgttattgaaaagccacttttcagttccagtgttggcaacaataagtgtacctctttttatccgttggtttttcaactgggatgaagcggagtatcagcattttcaaaaaagacaaaataaaaagccccaatcgtctgccaacgattaggacacatacaaaatgaactaaggagagtataccaaaatgaacgataaaattcaaaaattgattaaaaaactagcaaaagaatgccagaaagaagatgtagctttatctttggcagctatcgatttagaaggagagatggcaatatctcaagttggaaaaggcacgatagtagccattgctgcacatagccaatatacactaacaaaagaaaaactggaacaatcagattgtgattgtccaaaacatcgtttattaaaagagatgtacggtactgaaacagaaactacgactaaaaatacacatacttttgtcacagatgatccaaacgatttgatggatatattatcgaagatttttcgaggtgagtttaaatgactagaaaagaaaagttaaaccaagcaaaaagattagctgatttatggtacaaacaacaaaaaagtcaactatacattgcgcaacaaaaagagcacagagggattgcatgatgaaaaaagcgactacgccgccaagcaaatagtcgcatacaaaattatactagaaaaattgtaacacagaaaagaggttttgtgaatgaatcgtagagaagcaaatgcactagacagatatttaacagagccgactgaaaaaccacataaggaaacctatgaagatgatccagtggatactactgattattttggaaatgaaattgctgatgaagacggtgtgtttgagataacttttgcaatgaaatgtctttatacaggacaaccagtactcacttgtaaaaaaattgctacacaagatacaatcgttgatttgatagaagaattaggcgaagaaaacgtgtatttaattgaatatgtgagttcaggaaaaagatataaggagggcttattgaatgactgaagcaaccaaaacagatttttctaagttgaatgtttatcaaaaattagcgtatgtgagacaaaaagcaccatatattcaaaaaagtaaacgtggccagcagtacagctatgtggggtcaagcgatgtactatccgcattaaatacagtcataaatcaagttggattaattttgaagccagaaattgttgctcatcaagttcgggaatcacaagatgaggtatggaaagcggataaagtaaagaaagagcctgtagccaaaaaacgtacaacgtattttacagagctagagttaatgatgacatggattaatattcataatccttctgagattgttgcttgttcatggtatagccaaggagtagatattgaaggagaaaagggggtaggaaaagcactaacgtatgcggaaaaatattttttattgaaattttttaatattgcaacagatgatgacgatcctgataaataccaaaaagaacagctaaaaaatactacaattactgaacggcaaattgatatgttgaacgcatcaattagtagagtagccgagctggcagggcaagaatttgaagctgtgaaatcgttagctataaatgattctgatttgaatcctaaaaaagcatttgaagaatatagtgcttatgattatggtgttatttctaaattgcttgcgaagtggataaatttttatgaatctaggcagaaggttcaagaagataagaagtgattgaatgattggaaaaatcataaaacacaaaggaaataaattggcgattgagtttgaggatgagatcaactcgaatttcctcaaactcctagctaacaacgatgacaatttagtaaaagttgaactattagataatcgacaaatgtctcaaaaacmgaatgcacttttycacgttttaatagckgatatagctcgttggagttatgacgaaccaaatggatagaggaagttttaaagtattactacgaagctaaaagtggcgtgtattttgaacatagtaaggctacacgacatgaagcaacagaatggattagttttttaatcgaattcattttgaaaaatgatgtaccactagaaaagagataccaatacttgctagaaaataacaaatggttttattactgccttaaataccgtaagtgttgtatttgtgggaaacatgccgatgtttgtcatatcgaggtagtcggtatggggcgaaatcgtcaaaagattaatcatgaaacatttactttttacgctggttgtcgtcaacatcatcaagaagaacatcagataggtactaagaactttttaaacaagtatcaaattaaaccagtaaaactaaacgttgaagaacgtaagaagttgaatatcggaggttaacagtttggtagaggaattacttgaaaaatacaggcaattaacatcgagtcaaaaactattttttgaactattagcatttgtctatatcggttcaagaaatggtaaaggaatagctattgaagcacaaacaataaaaaaagtcgttaacggagaaattaagcataaatatgtttatacggtcgttgttgatgaggaggataactagtgaatgaacatagaggatattacgccattatcccagcgattgttcgctatgataaccacttaaatgggaatgcaaaattattgtatggagagctaacggcattagcaaatgaaaaaggctattgttgggcaacgaatcaatattttgcaaatctgtataacgttagcaagcgaacaattatttcatggctgaaacagttagaagaaagaaactatataaaaatacaaattttttataagccaaacagcaaaatggtagatcggagacatatctatatcttaccgtatccaactgatacagaattttacacccctagtgaagaaaatttcatcacctatggaaaaaatcatcaggagggggatgaagaaaatttcactacccctagtgaagaaaacttcacagagaataatacattaattaataatacmaagaataatacaaagaatatatatagtgttgaacaaagttcaaccatgtctgaattatttgaaaaggtttggaaaacatatccgargaaaaccawtaagaaaaaagccaaagagcaattcttaaagaaaattaagtcagatgaagacttcgaacggtttaaaacaggatacaaagcttatcttaagtatatcaaattaaacgactggtatcatccacaagaattgttccgctggatacgtgatgaacgttttaacgatgaatacgacttgtctgaaacggcaacgcaagtaagatattcaaataatccagttagacaagagaagttgccagattgggtaaatgaaccaaaaaaagaagaggagaaactatcaccagaaaagcaagctgaacttgataggcaaataaaagaatacttggaggggaaatgatgcgaattatcctgccaattgaacgaaaactgcaaagtcgcccgaggtttgcaagacgtgggaattatgtccaaacctatgaagatagcgctatgggtgcctataaacaaaaggcaaaaccagaattgattgaaaaaggggctatttttgcgcatattacgttttacatcgctacccctaaaatatctattaagttctaaaaagaaacgcttagaagtgaaattagagcggaaatattgcgataagaaacctgacttggataattatttcaaagcagtcactgatgctgccgaagtattttatataaaaccgatggtcaaattgctgtaatggtttgycaaaagttgtacagtatgcgaccacgaacagaactagaaattacaagtttggaggaacaagtgtagtgggtaaaacgggtaaacagatcaaagagaattattcggttagaaagcgagtaaagaagatgcttaaatttaaagaatttaatattcaattatycgacgttcacatttatataaaamggctaagtagttttaaaaccaacaaaaaatagtataaaaaaactaactagtttccgctagctagttatagatacattttcatctcagatagagacaattaataatacattactatgaaatttaaggcaacaaaaaaagccagctgaccactagctgacttatgtggtagaaacaactgttttccgccagttgttctttaggtgtgagttagcactttccccaaataaagtgctattaaaaagccgattaaaaatcgacaatagatctcttgcagagacgtgtactactattaactgtttaccagaagttaatgtagaaaaggaggaaatttatttcataaataaaatccccaagaaagttaaagtgattataccattgaaaaatagatttgaaaatactttctatgccaaaaatatttattagatggaaaatatcaaatgaataaagatgatgtgaaagatgacgaatggaagattgtaaaatattgtagaattattattgttttctttatagtcaaccaataatttgttgactacaaacatgtatgagtgatgaatattttgataaataaatagccagtcggtttccgccgactggctgagaagtgaatagctattggaatagtatyctagtataatttatatcatatggagtcgctgatgagcaaagaataagcatttcttatatatgtttggataaataaaaaaagctacttagtttccgctaagcaactcttaaatgatgatatgtttattatanactattataccataaaaggagcgatttcacttgattctattgttaaaagaagtagattttcgacaaacaaaagcgaatgctagaaatgtgttgaagagttttagacgtttagagcgaatagctggtcgctctttgatagatttaaaatcaccaattattacagatatgcctaaaagccaaagtcacgggaataaagcagaagatgcgctagtacaattagtagatgcagaagcagaaagagacgcaattgtatctgcgcttatggcattgagcctaactagcagacaaattttgcattatagtttctgtgtgcaggatcattactctaatacaagtagctagggaagttggatattccgaaagaagtattcaacgaatgaaatcagaggctttaattgaatttgccgaagcgtatcgaaatggaaaaataattgcatataaataaaatttttggcggtttttggcgggaagttggcggttttaaccatattaggatgttaatatggnagtggcgaagtaaggagacgaggtaagcctgcattacctacctagctccgttcc

SEQ ID NO: 238 - DNA, 29729 bp; double-stranded, linear
agtaacttgtgacaaagtcgtgcatggatgcactaaaaagacaccctattgtggtagggtgtctttttttgctgtttagacagcagcggttggaagcaacttgtttattcctcgttctgtttttccaaccaaatggttacaagtttcaggacaatcccgacaaaaatcggcacaagaatttttgtgacaatctcgtacatgtgatgcacctcctttcgaggcaagtcgccaatttgagtatagcataaaaagttgttcatttattattgaaattattataaatggaataagtacgtgttttctggttttcgtaactagagaacacgtgcttttttctttcaacttttggcacaatggtttgtgccaaagtacgactttttccagatttggaaagcggatacaatttagtcaacaagaaaagttacttgagagaaggggaataaaaatggaacaagtaccagaaaaaaataaagtatcaattaaagcaaaagtccaaagaattggcagtaccttatctagcatggtgatgcccaatatcggggcgttgattgcgtggggcgttttgacagcgctatttatcccagatggatatctgccaaataaagcctttgccacgatggttggcccaatgttgacctatttaattccattattaattggctacactggtgggaaagtaatagcaggtgatcgcggtgccgtagttggcgcaattgcgacaatgggcgtgattgtgggaaccgatattccgatgatgctaggtgccatgattatgggtccacttggtggctttacaattaagaaatttgatcagtatttccaacatcggattaaagctggttttgaaatgttagtaaacaatttttcagctggattgattggttttgcgttactttacttggtttttcagcgattggcccaattgtcgatgcgctgactgctgcaatggcacgtggtgtggaaatcattttaaatgctcatttgattccattaacgagtatttttattgaaccggcaaaagtgctctttttaaacaatgcgattaatcatggcattttaacacccttagggacagaacaagtcttatcggctggtaaatcaattcttttcctattagaagcaaaccctggtcctgggttaggtgtcttattagcatttatgttttttggaaaaggtgcggcaaaatcttctgcgccgggagcaataattattcatttccttggtggtatccacgaaatttacttcccatatgtaatgatgaaaccgttattattcttatcggttattgcaggtggtgcgacaggtagtttggttttccaaacgttagatgctggtttacgtgcgcccgcttcaccaggctccattatagctattttagcgatgacaccaatgggttcttacttaccagttawtttargtgttttggcagcaactgctgtttcctttgcagtatccgcagtcattttaaaagcagatgcgaaagaagaaagtgatgaatttgcccaaaaagtgaaagaaacccaarctgctaaagcagcatcaaaaggattaactgtcacaaatggtagtgcttcattgtcaggaattcaacaaattatttttgcttgtgatgctgggatgggctctagtgcaatgggtgcgtctatcttacggaaaaaggtccaagaggctggtttagtacaaactgtgacaaatcgggccattaataatttgaccgatgagggaaatacattgattgtcacacaagcggaattgcaagaacgggccaaacagaaagcacctaatgcaacctttgtagcagttgaaaatttcttgaactcaccacgttatgatgaaattgtgggctgaactatcaggtaccaaagaaaaaaacgacgcacaaccaacagtctccaaagcaacacctgcttctgaaattgagggagatttagcaaatgtcaatgagattcttttggttcacgatgatcgtgtcgggtcagcaacgatgggaatgaaagtcttagaagaaattttagataaagagaaaatttcaatgccgattcgaaaaattaatattaatgaattaactcaacaaacacaggctttaattgtcacaaaagctgaactaacggaacaagcacgtaaaaaagcaccgaaagcgacacacttatcagtaaaaagtatggttaatccccaaaaatatgaaacagtggtttcgctcttaaaagaaagtgcctagagaggaagaaaacaatggaaaatcttacgaatatttcaattgaattaaatcaacagtttaatacaaaagaagaagctattcgcttttgcggcgaaaaactagtcgaggcaggctgtgttgaacccgcttatatcgaagcaatgattgaaagagaccaattgctatctgtttatatggggaattttattgccattcctcatggaacagaagaagccaaaaaattagtgaaaaaatcaggaatctgtgtagtgcaagttccagagggtgttaattttggcaccgaagaagatgaaaaaattgctaccgtattatttgggattgccggagtcggtgaagaacatttgcaattagtccaacaaattgcactttattgtagtgatatggataacgtggtgcaacttgccgatgcattaagtaaagaagaaataacagaaaatttagccattgcttaaaggagagaataagaatgaacgcagtacattttggagcaggaaatattggacgcggctttatcggcgaaattttagctaaaaacgggtttcatattacgtttgtggatgttaatgaaaccatcattcaagcgttaaaagaacgtaaaagttatacaattgaattggccgatgcctcacatcaacaaattaacgttgaaaatgtgaccgggttaaataacatgacagaaccagaaaaagtagtagaagcaattgcggaagccgatttagtcacgacggcaattggtcctaatattttaccaagaattgctgaattaattgctcaaggaattgatgcacgtgccgaagcaaattgtcaaaagccgctggatattatcgcttgtgaaaatatgattggtggttcaacctttttagcagaagaagtggccaaatatttgaaaaacccagcttatgctgaacaatggattggttttcctgatgcggcggttgatcggattgttccattacaaaaacatgaagacccactttttgttcaagttgagcctttttgtgaatgggtcattgatgataccaaccgaaaagccaaagagattcagttagaaggtgttcattacgttgctgatttagagccgtatattgaacgaaaattatttagtgtaaacactggccatgctacagttgcctatacaggggcgttgttaggctatcaaaccattgacgaagcgatgcaggacgccttagtggtagcacaactcaaatcagttttgcaggaaaccggtaaacttttagtggctaaatggaattttgatgaacaagaacatgcagcctatattgaaaaaattattcaacgtttccaaaataaatatatttcagatgctattacacgtgtagcacggacaccaatcagaaaattaggtgcgcaagaacggtttattcgaccaatccgtgaattacaggaacgcaatctagtgtcgccgcatttattagcaatgattggtattgtctttaattatcatgatccagaagatgaacaaagccgtcaattacaggaaatgcttgaccaagaaagtgttgatacagtgatcgctgaagtaacgggcattgaagatccagaaacggttaaaaatattaaacaaaacgtagaacgctatgcgcgaccacaagtagcataataacaaaatccttctaccaagatacttcacatttcttaattaaagaaaaaaacaaccgctcactgattaaagtgaggggttgtttttaacatattgactaagtggtttttgataaagctctcctttgaaggcacctgtattgaagtattcagctaattggtaaccaatgaatgggccagtagtgagtcctgatgaaccaagtccgctagcaaccacaaggtggggcatttctggcaaagggccaaaaaacggagcgaaatcagatgtataagcacgtgtaccgacgcggtaatgcatgggttgcttaaaaagctgctctgcttcttttagaaatggtgcagtcccagaagttagttgttgaaaagcgctaacagtctcttctaaatcccaggcttgttcattttcgtgggtggcacctaataaaatttttccttgattaaaaggaattaaatcngcttcgccatctaacatagcaacaggccattgctgactgtttgtaaaaggggtctcgaaaactaataattgtcctttttggggacgaatgtccacagataaatttaaagtagtgagtaattcctttaaatgaggaccaggtgttaaagcgagaaaatcaacgctctttttttctgaatttgtgacaatttcccacccttgattcagttgtcgaaagtgcgcccgttgtgaacaaaaagtgacccctttggcttcggcgcgtttctgaagatggtttagataagctggtccatctaggcgaccgccgccagaaataaaaagtgagggagtttccttaagtagcggtaagaacttcgctgtttgaaccgctgacaacatcgtgatttctccaatttcaggtgcagtttgcttacgctcttctgccaaatgggctaagtctgccaaagcggctgccgggcgcaaaatgactgtccctgattgacgataaatatcctccgtcagctgaaaatctttgactagctttggaaatagggcagcgccctctcgcgctaattggtaccatttcttattccgacgtttggatagccaaggggaaataatcccagcgctcgctttagtcgcttggccgagcccttcatcataaacggtaatgtcaaatttttgtggatctaaataattagctaacgtcattccgataatgccgccgccaataatggcaatttttttcatgcttcttctctccttcgaacagttgtattgtaacacaaaaaaaccgcctctagacagagacgattgggagataacttgttaacgggtccttctgtgtgtgtaaatagaattgccgccttctaaaacgtgaacaatttcttgtgccatttctgccacaggcacgggatcatagccaataaataagttctttaaaaaggggattttcttaaaaaaataaatacatttactaaaaagtatggtgccggtacgttcttgacctacaagtaaactaggataaaaaattactgcttcggcgacttcttggtggattagttcctccgctgccaatttggcatccatatattttctcaaagggaaaggaacagtattggctgaaataaataaaaacttagctggctttttttgttgtgctaaaaaagagctgatttttttcactggcgtcagaattagccgttgataggttttcttttttcgtggattttcaaataaaatacctactgtatcaatgacccagtcagcacgctggacttgttcttgccaattcgtgtcatgagtaacatcggagcatacccactgcacttggtggctccaagatgcggagagcgtggcaggctttccatgacgtgaaacactgatgacttgatgttggcgttggactaaaattttcgcgatttgttgacctaaaaaaccgctaccgccaaaaataatgactttcatggcaagccctcactttcaattgtttcttctagtgtaccttaaataaaaaaagaagcaaaaaatctcgattgcgcatagtttagttataaataacataaaaataacctttttagattgttgaaacacaaagacccaacaatggttatttattgtcgtgaaataaataaaaaaatgaacaaaaatgaaataaatcagactaaaggcctagagaaatgcccttgtttcttgaattcaagcatggttaaatagttataagtgaacgaccgagcaatttagtttgttggggaaaatagacagaatgaggagatgaaacgaagaaaatgaagaagaaaacgataattatattgggggcagttgcggtaattgcggttgggggcatcgtaactgtgaatgcgttaaataaaaatgcacaacaagtagctgtcaagcaagcgcctaaagatgactggggaattgactattttgacgttcccgacttgcaacaaatttatattaacggtgtcatccaaccggaacaaatggaagcctttgcgcgtgatcaaaaaataacaaaggatccagagattaaggtgaaaaacggcgatgtcgtagatgcaggcacagaattatttacttatgaagatgaggcggtcacaaaagaaattgaggcacaacaaaatagcttagccaaattagaaacgaagcgggcgaatatctataataagtggaatcgggccattgataaatttaataaaactaaagaagaagaccgcacgatgtctggtgatgatttaaatgaacaatatcaaacagaagtcgatgcagtagatgaagagattaccttcaccaatgaaaccttagcggatttaggagcgaagcaatatatttccacaaaggctaatttcaaaggtcgtgtatcaattccagaagtaaaagatgccaattcaccgattttacggttaacttcagaagatctttatttagctggaaaagtgaatgaaaaggacttgactaaaattagtgttgggcaaaaagctaaactaacttctgtttccaacaatgtggttgtggatggctcaatttcttacatcgatgataatcctcctgaaggcaacagcgatgccgcgagtggcaatccagagggcggcacaacgatgtctagttatagcgtcaaaattgcgttggccaatttagacaaagtcaaaaatggctaccatatgcaagcaaccattgatttaggcgatttaggggcgattgagttaccgaaaaaagcgattcaaaaagagggtgaacaggcctacgttttagtgaatgattttggaaccatcattcgtcgtgatgtccaagtcgggcaagaaaatggcgacaaaatggcgattgaatctggcttagaatcagccgaccgagtggttatttcttcaaaaaaaccagtaaaagtcggtgatattgttgaatcagatgcagcgattgcttctgatgaatcagcaaccaacgaatcaatgacagatgcgtcgaaataggagggcttgatggtggaagcaaacaatacaaatcaacccctcattgaattgcgggacattaacaagttctatccagtaggtaaggaaaaactacatgttttaaaagaattgaacttgaccatccatcaaggagagttcattttaatcatggggaagtccggtagcggtaagacaacgctgatgaacattattggtttcttggatcgcttaacagacggaagttatcatttctcaggaacagatgtttcaaaattgtctgaaaataaaaaatcagcctttcgcaatgaatatctaggatttatttttcaacaatttttcttgattaattctttaaatgttagtcaaaatgttcaattgccctgtgtttatgaagggaaaaaaagccgcgctgagaaaaaagcgattgctgaaaaatacctaaaaattgtcggtttggaaacaaaagccaaatcaaaagttactgaactttctggaggacagcaacaaagagtagccattgctcgttccttggtgaatgatccattattgattatggctgatgaaccgactggggcattggatagtgaaacgggtacagaaattatggaattattgaaagaattgaatgaacagggcaaaacaattgtcatggtgacacatgatgaagatatgaaaaaatatgcctcacgagtgattcatatgaaagatggtcgctttttggaagaagaggtgattagatgattgctaatttatttgttagtacttttttaagcttaaaggcacataagttgcgggtatttttaacgatggtcgggattattattgggattacatcagtcgtaacgatttctgcgctaggtgaagggatgaaacgtcaagttgtgaaggcatccagtgcagtgaacgcggatgttttgaagattcattatacaatgtcggatggtagcagtgacaattttatgtcctatgaagagccagattatacgtttagccgagtggacttgaaaaaattacaagacattcaaggaattgaaagtatttatcctcaatatggtgaatcaatgatggggggcggagacaatttgtttgtaccaatggattattttggggcgcaagcgaatttatccattacgtcgactaaagggcagaatgatattttatatggtcgtgattttcaaccgagcgatgcaaatacagatgcgattgtcttaaatcatgatatctttgaagcgcaaattcggcttgatgatcctagccaactcattggaaaagctgtttcaattggtggttatatgtacaaggtgattggtattttagcaccaaaagatttagatagtttgggtatgaacgatgattgggcaactgctatgagtagttttgtttctcgagaatcatacaataaattagcgaaaacaaaagcaattagtggcatcaatattaaggttcgtgagggagcggaccgtgaagcaattttaggacaggcaatcaccattttaagtgaaaatcatcctgaagtgaaaggaacgtttaaagaaaacgaccaagaccaacaactccaacaacaaatggaagaaatggtcacgggtatgacaatgtttctgatggcaattactgcaatctccctattagtcgggggaattggcgtcatgaacatcatgtatgtgtctgtcacggaacggaaacgagaaattgggattcgtcgggccattggtgctaaaccacgagtcattttattccaatttttaatggaagcagcgtttatcacattgattggtggtttgattggtgtcggctgcggctacttattggcaactgtggtcggtgggtatatttcgattacgccaattattacgccgtccatctttgctatttcaacattggtttcggtcttcacaggtatctttttcggaattattccagcaattggtgcttcgaggatggatccgattaaagcgatttataattaaaaagaagagcttggtagtcacatcttttttgatgatcctatcaagctcgcttttttatttcatgtcactaagaattttctgaatcaattcttgttgaaactctttggtatattgttcggtgagtttcgcttgttcttcttgggacattgatggattcgccatcatagcagccatcatttttttgccaactgtttcagtcccttcttttttgatatcagcggcatgttgttccatatattcgcctaattttttggcttgatcagcacttaaaactagccagtcactagcaacgttgaaggtgttttcttgttttgcaaattggttatcgttgtcagcaaggccaaatagtgttttggcccaagactcttgataggaccatttcgtcgttttttggactaatgtggctttttgagcatctttttgaaccgtgtttgtgacgttttccgttcctgttttttgtagtttctttttatctggtgtgttatataaataaactttttcggaaccatcgcccaacggctggtacaataacatgttggggccatctttgcttgaactactgctttttagttcaaacgttttgtcctgagtaacttcggtcataccaaaatgatctttatcgtttaaaacgataagacttaacgaagctaagaaccctaaaccaaaaataaccatacagaatttatgccagacttttcggccaaatacattcgtataggcaaagcctaacacgcaaaggattaaaaggaaaataatcattatttcattgcacctacttccttaacaggcatcgcttcttttttatttaagaagaaagtaatcgccaagccgagaacgccaaagattgttgccacgaagaaggctgcgtgataaccgtttagtgttgcgtttgttgcttgatcgcgataagtgagtggggctgtttttaataagtccgatgcaggtaagccgtctttggtaacatttgttaaaacactaatcaaaacagctgttccaattgagctggctacttgtcggaaggtgttgtttacagcagtcccgtgacttaataaattcattggtaaagcattcatgccagaagttgtcacaggcatcatgaccatcgaaataccaaacatccgaatcgcatataggacaatgatataaataataggtgttgcttttgttaagaaagcaaacggtaacgttgcagctgttaaaataaacatcccagtaatcgcaagacgacgggcaccaattttatcaaaaatgcgaccagttactggcatcataagtcccatgactaacgctcctggtaaaagcattaaccctgaatggaaggcagattcgccacgaatattttggatatacaaaggtaaaaccatttcggcgccaatcattgccatgttggttacgccagataaaatggccgcaacagtaaagacttttgatttaaaaacgcgtagttctaagaaaggttgttctaaatgcaattgtcgatatgtaaaaagacataaaacaatcgcaccaacaattaagaatccatagacttgcgggctaccccaacctttatcaccaacgcttgagaaaccgtaaagtaagctaccaaagccgagagtagaaagaatgaccgataagacatcgatacttggattagataattgaatgacatttttcattaaaaatgaagctaaaattaggactaaaacgacaattggaatgaccatcccaaaaaggtcacgccatgtataagaatcaataatccaaccagataatgttggacctaaagcgggtgctaatccgataacaattcccgttgtgcccatggcagcgccacgtttttcaggcgggaaaattgaaagcataattgtttgtaaaagaggcatagatacaccgacccctgcggcttgaacaagacgtccagtcaataacatgccgaagtcttgcgctacaaaacagatgatggttccgattaagaacgttgacatcgctgttatgtataatttttttgaactgaatttgttaatcaaccaagcactgatgggaatcataatgccgttcacaagtaggaatccagtggttagccactgtacacttgaagctgagatatcaaattctttcattaatgtaggtaaggccgtcgttaaaagcgtttggtttaaaatcgtacaaaatgttccgattagtaaaacaccgactagtaacgaccggttataaggttttccgtgaatatccacaggttgttgtgaagtcacatatatcgctcctttttctgtaagtttcaaattaaattgcattaactactttacmactaattagaatctttgtcaacttacttgacaaaggtgtaaaaaaaactacaattaaggaaaggataagggaaaggaagttaaactaatgtggtcaaaaatgattcagcgtttgttaaatgaagaaaatttgttgataggaattagtgaactaagtgaaattgctgaagtttcgccacgtcaacttcgttattgggaagaaaaagggtatatttcttctattgcgaaagacgcaaacggtccacggaaatatcggttacatacagtcgtcaaagtgcattggatcaagcgttttttagatgaaggatatacgttacaaagtgcggtggaaaaagcagaagagcagcatcgtaatgtggggatgacgaaaaaaatctttagtcaaatgtttcatggtatctcagaagtttgtcccaattacgtagcgattgatttgggcgatttcgatgaagaacaaaaattatatgttgtatttaatgaaaccacagaagtcagtgagtatcttttaattcctaaggatgcagatgtttctgatgagttaaagaaaagaaaataagaatgaaataggactgggagaaagacctgaagtgaaagtaaaacgttactgaatgaatcttcgagttctttttttcttgcaatttctttatttttctatataatttcttatatggaaaaggagggtttcgatgaaagaaacaaaaccttacggaacagtcttgttaaaagcggctaaaatcatggactgtctaagtttacaacccgatcaaaccttacaggaaattgcaaagaataccgaaatgacggcatcaacggcaatcaaaattttagaaaccttaacattaattggctatgttcaaaaagacacgaacaagacgtaccgcttaggaacaaaattgattcgctatgcgaatcaaagtgtggagcaaatcgatttagctgaaattgcggtaccttatttagaaaaccttcaaaatacggtcgatgaaaccattcatttagggattttaaataataatgaaattctgtatatcaataaattagaaccgaaaaatcaaacgattcgcatgtcctcgaaagtgggaattactcgacctttgtataattcggccatgggtaaagccgttttagcagaattttcggaagaacaagtgcaacaatatttagacacgcagacattaattccctataccgaaaatacgattaccaatcccttgcgtttgaaaaaagaattaaaacaagtgcaacaaacgggggttgcttacgatgatgaagaaattgaacaagatattttctgtagcggagtatctttaatgaaagatggcgaaattgcgggtgcttttagtgtaagcatgccgaaatatcgtttgacagaggaaaataaaacgacgattaatcaagcccttttggcaacaaaagcagcgattgaagcgaaattatagtagaaaaagaaagacaaacaaaagtcgattgggatttttgtttgtctttctttttttatttttgtaaaaacgtttgcattttctttttttatctgtataatgaagttgtgaatttctttataataaatatatatttctaaataagaaatgagggagtctgttgaagcgagtatcaattttacaaaaattagaaaatgctggcgtgattgctgtggttcgcggaaagacaaaagaggaagcgctaaaagctagtcaagccattgtagcaggcggtatgcgggggattgagttaacctttactgttcctcaagcaacagaagtgattcaggaattagttgcgttataccaagagaatcctgacgtagtcattggtgcggggacagttttggatgctacgactgctcgtttagctattgtagcaggggctgaatatattgtgagtccaagcttcgatgaagaaaccgctaaaatttgcaatttatatcaagttccttacttgccaggctgtatgaccatcacagaaatgaaagaagcactgaaaagcggagcagatattattaaactatttccgggaagtgtttatggaccgagtgttatttcagcatttaaagcgccattgcctcagttaaatattatgccaacgggtggtgtcagtttggaaaatatggccgagtggttcgctgcaggtgtgacggccgtcggtgttggtggcaatctgttagcgccagcagcaactggggattttgaaaaagttcgtgaggttgcccaagcctatatggaaaaattccaagcaatcaaaggggtgtaggcacatggggaaagtcgtaacattgggagaaatcatgttgcgtttgtctacgcctgtcggaatacgcgtagcacaaacagaaaatttcgctgtacattacggcggtggtgaagcgaatgtagcgatttcgttagcgaactatggccaccaagtgacttttgctagtaaagtgcccgataattcattaggagaagccgccaaaaagcatttaagtcgttatggggtttcaacggaatttgtacgaactggcggaacacgtctaggaacgtattacttggaaactggtacaggagaacgagcagccagtgttgtctatgatcgcgcctattcaagctttgctcaaatcgaagaaatggaatgggacttacatgagctgttttcaggagtagagatctttcatatttcagggattacagcggcgttatcaaaaaattggcaaagtatgacggttgcgttagttaaagcagcgaagcaagcagggtgccaagtaagttttgacattaattatcgagggaaactttggtcccagaaagaagcgagcgtggcattgaaggccattcttccatttgttgatatttgttcagctggggtattagatgctcgttatttactggagattccagaaccagaggaagaacttgaagacgcattaacgtggtactaccgaaaaatgcaagaacgttatcccaacattcaagtattttattcaaccaaacgtcaagttcattcagcgacagataatgaattaatcggaacgctatggtacaaaggtgcgtattatacgtccaaatgtcatcgattacaaccgattgttgaccgtgtcggtgccggtgatgcgtttgctggtggggttttacatggcatattagctgcctatgatccacaaacctgcattgattttgcgacagcggctagtgcgttaaaacatactgtccatggtgattgtaatcaatttagtcaaaaagaagtccttgcttttttggcaacgggctcaggaaaaataaatagataggagattttagttatgcaaaatatggaaacacgttatacacatagtccggcggatatccgtcactattcaacagaacaattgagagatgaatttttagtagagaaagtttttattccaggtgcaatcagcttaacctacacacataatgatcggatgatttttggtggtgtgacaccgaccacagaagaattagaaattattttggacaaagaattaggagttgattatttcttagaacgtcgtgaactaggagttattaatattgggggaccaggctttattgaaattgatggcgccaaagaaacaatgaaaaaacaagatggctattatattgggaaagaaacaaaacatgttcgtttttcttcagaaaaccctgataatccagcgaaattttacattagttgtgtgccagcacatcataaatatcccaacgtaaaaattagtattgatgaaattaccccaatggaaacgggtgatccattaacattgaaccaacgtaaaatttaccaatacattcatccgaacgtttgtgaaagttgccagttacaaatgggctacaccattttagaaccaggtagcgcttggaatacaatgccttgtcatacacatgaacgtcgtatggaagcgtatgtttattttgatatggaagaagatacgcggattttccacatgatgggtaaaccagacgaaacgaaacatttagtaatgagtaatgaacaagcagctatttcaccaagctggtcaattcattctggggttggtacaagtaattattcctttatttgggccatgtgcggagaaaatattacgtacacagacatggatatggttgcaatggatcaattaaaataaaccaaagaaagaggagaaaacatggaatttaaaatgaatgattttcaattagatggaaaagtagcgttaattacaggtgctgtttatgggattggctttgagattgcgaaatccctagctgaagcaggagcaacaattgtttttaataacttatctcctgaatcagttgaacaaggcttggaaaattatcgggccgcagggattgaagcacgtggttatgtgtgtgatgtcactgatgaagagcaagttcaagcgatggttgctcagattaaagaagaagtcggctctattgatattttagtcaataatgcgggaattattaaacgaattccaatggtggatatgtcagcagaagagttccgtcaagtgattgatgttgacttgaatgcgccatttattatggcaaaagcggttattccagatatgattgaaaagggtcatggcaaaattatcaatatctgttcaatgatgagtgaactaggtcgtgaaacagttagtgcgtacgcggcagcaaaaggcggactaaaaatgttaacgaaaaatattgcttctgaatatggacaatataatattcaatgtaatgggattggacctggctacattgaaacgccacagacggcgccattaagagaaccagggcatccatttaacgaattcatcttgggacgaacacctgctaatcgttggggcacaccagcagacttagctggcccagcagttttcttagcatctaacgcttctgactttgttaacggacatatcttatatgtcgatggtggaattttagcttatattggaaaacaaccataaataagtaacaaaaagcggacatacctaaaaaggatgtccgttttttgttatttactcattgattgaattggtaaaaaccgtatctaatttttaaaaaaagtcaatttttgacagtaattcgtcaagattaactatataatttgctaacattccttgctaaactaaaattacaaaaaaatgaaagcgtttcatttgcgctggtgggatggaaaaggagttttgattgccgatgattattaaacaggaacaattcataccaaaagatacagtagaaacaacgattgacttattaattagaaatttaacaacgattaaagataacacaggtgaatttctgttagattttgatggtttaaaagttgatgacaaaagttggacgatttggaactggccgcaaggcgttgggttgtatggtatatataagaattatcgaaatactaaaagtgaaaaagctttacaagtagttaacgactggtttgaaggtcggatgcaagaaggcgcgccgcctaagaatgtgaatacgatggctccgcttttaacaatggcttatctatatgaagacactaaagactctaaatatataccttacttagagcaatgggcggaatgggtgatggaagaaatgccccgaacgaatgaaggtggcttgcaacatgcgacatatggaccagaaaataaaaatcaattatgggatgatacgttaatgatgactgtcttacctttggcaaaaattggtaagttgttgaatcgactcgattatttggaagaagcaaagcatcaatttttaatccatattaaatatttacaagataaaaaaagtggtctatggtatcacggttggacttttgagggaaatcataactatgcggaagcactgtgggcaagaggaaactgctggattacgattgctattccagaaattattgaaatcttagagttgccaaaaggagatagtttacgggaatttttattgagtaccctcaatgcgcaagtggcagctttagcgaaataccaagatgaatctggtttatggcatacattaattaatgattcaaattcgtatttagaatcttctgctacagcgggattcgcttatgggattttaaaagcggttcataaaaaatatatttcttctgaatatgaagaagtggcaaacaaagcaattgctggcttactaaatgagattgatgaaacgggagaagtacaacatgtgtcagttggtacaggaatgggtgataatttagatttttatcgcacaattggaatgacagcgatgccttatggtcaatcattaacaatcctatgtttgactgaattgcttgtttcttattgctagaaaagtaaggagaaaagttcatgaaaaaaagaaaggttttatttacagcagttatggtattggcaggattacagttgctaagtggttgcggcaaaacagaagcttcggcaaatgatacggtagtcttgcgctatgcgtatgctagtaatagccaaccagttatcgattctatgaagaaattcggtgaattagtagaggaaaaaacagatggtaaagttcaaattgaatattttccagatggtcaattaggaggagaaacagaactaattgaattaacacaaacaggtgcaattgattttgcaaaggtcagtggatcagcattagaaagtttttctaaagattattctgtatttgccattccgtatatttttgataatgaaaaacatttttttaaagtaatggataatcaagcgctaatgcaaccagtgtatgattctacaaaaaaattaggatttgttggtttaacttattatgactctggtcaacgaagtttttatatgagcaaagggcctgttacatctccagatgatttgaaaggtaaaaaaattcgggtcatgcaaagtgaaaccgccatcaaaatggtagaacttttagggggttcgccagtacctatgggtagttcggaagtatatacttctctacaatctaatctaatcaacggtgcagagaataatgagttcgttttatatacagctggtcatggtggtgtggctaagtattattcttatgatgagcatactcgagtgccagatattgtgattatgaacgagggaacaaaagaacgtttgacagcgaaacaagaacaagcgattgaagaagcagcaaaagaatcgaccgcttttgaaaaaacggtctttaaagaagcggttgaagaagaaaagaaaaaagcacaagcagaatatggcgttgtgttcaatcaagtagacagtgaaccattccaaaaacttgttcaaccgttgcatgaatcattcaaaaatagctcagaacatggcgaactgtatcaggctattcgccagttggcggactaattaaggaggtaattatgaaaggttttagaaaatttttaaatcgacttttagaaatacttggatcaatcattcttgctgcaatggttttggtcgttttgtaccaagtgtttgcccggacagtgttaaaaaatcctagtaccttaacagaagaatttgttcgctttgcattggtctggatggcgatgttagcttctgcttatgtggttggaaaaaagggacatttagcagtaactttgttaagtgaaaaattacaagggaaacaaaaacgctttttagaatttattgttcaattgttgttcctactttttgcaggagtgattatgatatttggcggttggaatggtgtagtaattacgttaggacaaatttcaccatctttggcaattcctatgggttatgtctatttagccgttccagtagcaggtgttttgatgtttatttatagtttgatgaatttgctagagttattcacgcaatcaaaagattcttaatgcgtttatagaagaaaaagaataggagtaaaaatatggctttagaagcaggcattatcttatttgtagtttttgcagtcttattggtagttggtatgccaattggtatgagcattgcggcatcttcaattgcaacattgttattagtaattccttttgaagcagctgcatttacctcagctcaaaaaatggtctctagtttaaatagtttctctctcgtagcaattccgttttttattttttctggtgtgattatgaataatgggggaattgcccaaaagttggtaaatttttctatgttatttgttggtcgtgttcccggcgcgctagcacatactaatgtgttagggaatgcattatttggttcgatttctagctctgcaattgcagcatctactgctattggtggcgtactaattccgcaacaagtaaatgagggctatgatcggaaatttgcaacggctgtaaatattgcctctgctcctacaggaatggttattccaccaagtacagcgtttattatgtattcattggtggctggtggggcctctatttcttctttatttttaggaggttatttggtaggttctttgtgggcgttaggaattatggtggtagcttatgttattgcaaaacgtcataattatcctactgtggcaaaagcaaaaaaaggagaagtcagcaaggttctgcgagaagcggttcccagtgtattgttaattgtcattattattggtggtattttgacggggttatttacagcgattgaagcatcagcaattgctgttgcatactcattattgatttcaatgttttactacaaaacagtgaaaataaacgatttacctaaaatgttaaaagaggctgtcttgatgagtggaaccattatgttcttgttggcaacttcttcaatgatgtcttttgcgatggcttttacagggataccagaagcaatcagtacagctattttaggaatcacagacaataaatacttaattctactattagtaaacgttgtcctattgtttgtgggaatgtttatggatgttggtccagctattttgatttttacgccaatctttttaccaattgttatgaatgttggggtggatccagttcattttggtttatttgcgattatgaacttgtgtgttggttcaattacaccacctgttggaacaggattatatgttggtgctagtgttgggggtgttaaagctgagcaaatgctgaaaccactagttccattttatctggtaatcttagcaattttacttttaatcacatatgtacctgaacttgtcatgtggttaccaaatctaatttcttaattcaatacaaattgtctaacaaccccaattgagcgaaatataagttgttcaatcaactagatttggtaatttactataaaatattgagtttaggaggcatagaaataaaaaatctctctatgacattatgtgtcatagagagattttttagaagccacttttacggtattgactaggagttaatccagttcgctttttaaataatcgactaaagtaggcatagttttctaaaccaacatctacagcaatttctttcactgtttgattagaatagcgtagtaaatcttttgaataagaaatttttttactaatttgatatttaattggcggtaatccaatgtatttggagaactctttgttcaattgatatttatttaaatgaaagagttgagccaagtcttctaaagaaattgtttctttgaaatgttgatcaatgtaagctttcatttccaaaaccaatgatggaatcgtttcgtaggtaaagtcttgacgatacttttgcaacaataattcgttcagtaattgatgaattaagacggaagattggtaatcagtttgcgcatgttgtaaatcttgtaattgtaataattgctgaatgattaaatgaataggattatcttctggaagctgattagtggagaaaactggtgaaccatttttcataaattcttggaaaaaagcaccagaatttcctccttcaaaatgaatccagtccatttcccaaggatcttcgctggttgcttgatagtattgataatcccgacagtcaataaagaataaatcacctctctgtaagctgtatgtatgataacgatagcgtaattccccagtaccatttagcgtgaatttaattaagtatgatggtaaatgtgcccgctccgtataataagggcgcgaggctttaaactgtccaatttcctgtatgtaataaaaaagtgtgcgacttttgctgctaggtgtcaaaatatgtcgcttagaatcgtctgaccaagagtagtcggctttttcccaataatccataagacctcctaattaccaagatagtacaattatatctcaaaattgtgagaggtgaaagcgctattttttgtttatgatgaatacataaagttagtctaacgtacaaaaaataaaaatagtgaaaggattgacaactatcaacaaagtgamaaaagaacaagttgaaaaacgaacctatttagcggttgatattggcgcttctagcggtcgcataatgaaaagtcaacgcttagcgaatggtcagataacaatagaagaaattcatcgttttaaaaatggttttcatcaaaaagatgggtatcagcgttgggatatggctagtttagttcatgagttactgcttggtctgcaaaaagttaaacaattaggtatcaaggaatgctttattggaattgatacttggggtgttgactattgtctgctggatcaatctggacaacttttggacgaaccgattgcttatcgagatggacggacagaagcagctgtaacaaatttttcaaaaggctattcattagaaaaattgtaccaacaaacggggattcaagttcagccttttaataccatttttcagttatttgtagaggaaaaggaacgtttggctgcagccagccaattgttgttaatccctgattacttaggttatgtctttactggaaaagcagtcatcgaagcaaccaacgcttccaccacgcaactgttgaatgctggaacgaaacaatgggaaagtgaattactggatttcctaggaattgatgaaacactatttccaacattagtagagccgggcacgattttaggcgacctgcaaacagcggcttttccagactatgatttaccaaatgcaacgttgattacgatagctagtcatgatacagcttcagcaattttaggtacgccaggcattggcgatgactgggcgtacattagcagtggtacttggtctttattaggcattgaaacgactgttacaacaatttctgctgaagctttccaagaaaattacacgaatgaatggggcgcccagaacacaattcgtttcttaaaaaatattatgggtatgtggctaattcaagaagtggcacggcaccaaaactaccaatatagctatgctgaattggccgccttagctgaaaaagaaccagcatttcaacaatttattgatgtaaatgatcctcgttttttaaatccgggaaatatgattactgaattacaagcctattgccgtgaaacacaacaaacagttcctgaaagccctggtgaactcgctcgttgtatttatgataatttagcattgtgttacagcgtagaactagaaaaattagctcaattaacaggaatcgaacggaaaattacaactttacatgttgtcggtggtggttccaataatcgtttattgaaccagctaactgctgatgttgctaatgttacagtgaatgcgggacctggggaagcaattgctttaggtaatcttttgatgcagatgattgcaacaggtgaacttaaagatattccagcagctcgtacttgtatccaaacatcttttcccacggaaatctatcaagcaaatccaattgattcaacaataaaaaatcgctatcaagcatttatgaaaaggagctcattatgacaaccattacacaaaaatatgaagaagcgaaagaaaaatatgccagtattgacgtagataccgaagctgtattggaaaaaatggctgatgtcaaaatttcaatgcatgtgtggcaaggagatgatgtgagaggcttcttaagtgaggatgaactttctggtggtatttcagttacagggaattatccaggcgttgctcgaagtccccagcaactacgtcaagatttagaaaaagcgttttctttaattccaggaaaacacaaattgaatttgcatgctatttatttagacacagaggaaagggtggatttaaacgaactggaaccaaagcattttgaaccatgggtgacttgggcaaaagaaaatggcttaggattggactttaatccaacctttttctcgcatccaatgtaccgcgatggctttactttagctcatccgaatccgcaagttcgagacttttggattgagcatgggaaacgttcacgaagaattgctgaatattttggaagagaattaggacaagtagctgtcaataacttttgggtgccagatggctttaaagataacccagttgatcgtttaacgccgagaaagcggctaatggcttcgctagatgaaattttttcagaggaaattgatccagcttatacagtcgatgcgatggaaagcaagctctttgggattggttcagaagcctatacagttgggtctcatgaattttatatgggctacggtttaacgcggaataaattaatttgtttagatgctggtcattttcatccaacggaagtgatttctaataagttatcttcattatccttatttggcgaaggaatgctattacatgtcagtcgtccagttcgctgggatagtgaccacgttgtcattatggatgatgaattgcaagaaattgccaaggagttagttcgcaatgatttattaggaaaaacacacgtgggcttagatttctttgatgccacaatcaatcgtgttgccgcttgggtgattggcacccgcaatacacaaaaagcgttaatgaaagcgatgcttgagccaacaaacgtcttaaaagaagctgaattgataggagattttaccacacgtttagccttaacggaagagttaaaagactttccatttgccgatatctggaactactactgtcaagaaaatcacgtacctatcggcttagattggttaacggatgttcaagaatacgaaaaagtgattttaccaactcgtcaattgccaacaggtaaagatagttgtcgtttttcataaaattaacaaacgagaggaacttctaaaatgaaaaaaatgaacgtgttacaagcaccatttgtggaagaaatggtcaaaacgaccaaaaatttatatcgtttaggttgggatgaacgaaatggcggaaatatttcgtatttattaaaagaggaggagattttaccttttctaaatccaacacaagtgctccgaaagattccaatgaaatttgatgcaacgaaattagcaggaaaatattttatcgtgacaggctcaggaaaatattttaaaaatgtctgtgatgcatcaagcgaaaacttagggatcttacgagttagtgaaaatggccaggaattagaactattgtggggcttagaagatgaagctgtaccaacgagtgaattacctagccattttatgagccatattgctcgtttagctgttgatccagaaaatcgcattgtcatgcataatcatgcgagtcatttattagcaatgagttttactcacgaattagatgaaaaagtctttactagaacattatggcaaatgtgtaccgaatgtttagtagtatttccagacggtgttggtattattccgtggttggttcctggaacgaatgaaattggtgtagcaacggctgaaaaaatgaaagaatctcgtttggttttatggccgcaacatggtatttatggtactggccgtgatatggatgaagtatttggtttaattgaaactgccgaaaaagccgctgaagtgtacacttatgtttgtgcgcaaggaggcgttcgccaaacaatttcagatgcagatttatggcgcttagcagaagcgtttggtgtgacaccgaaagttggctatttggaagagaaagtatcaaaacggagaaagctatgataaaaaaagccttttgtatgcaagtatatcctgatcaacatgccgaatatcaacgacgtcatgagaagttatggccagaaatgcgtcaaatgctgaaagaacatggggcaattaagtatcaaatttttttaaatcctgaaaccagtacactttttggttatttagaaatagaagatgaagctcgctgggagcaaatagcactgacaccaatcaatcaaaaatggtggaactatatggaagatattatggaaacaaatcctgattgctcgccgatgacggctgaattaaaaaaagtttttgaactataatttaaaatagaacagtttgttatagtgaatcgtatgattgtacacaaaacaacttacttgagtggagttgatttcaagggattgttctggaacttacaaagaaagcctttgtggtaacggctgttccagaaagtaataaattgtaccaacattagctgtaactgtttattcaaaaaatagttaacttctaaaaaaagaggtgaatcttgttgaagagtgtaaaagaaatccggaaatcacaagtaaatagtatgatttcagatcaatatgagatctttcatgtaaaagatatggttagtccagaaaaaaccatctatcattaccacgatttttatgaagtccattgtacgttaaaaggggtagcaacgttctttttagatggacatcaatttgatgttgaagcagggaccgttttactcattcattatcatgatttacatcgaattattaagcagagtactgatgatttcgaacggatgtatatttttttaacacccgattttttacaacaacgatctagtaaacggacaaacttgtctgcttgttttcaacattttggtcagcgtcgtagtaaagttatcaaagtggatgtagcaaaattagcaaactacttgaccccgttagatcattctcctttgccagaagaatatggtgcggatgttcgttatgaacaacaactgttagactttttaatttacttaaatcaattagttctgaaagaagagaatgagagccaaccaaaacaaatgattgaaaatgaacgaattgaagcaatgattacctacatttctcaaaatttggatcaaccattaaccttagaacagatggaaaaaaatttttttgtgactaagtattatgtaacgcgggaatttaagaaacatacaggatttactttccatcaatttgtgctgaaaaagaaactactttacgctaaacagttattaaaagaatatcgcagtgctagtgatgtttacctgaaatgtggatttaaatcatatccacactttttgaaatcctttaaaaaagagtttaatatgacaccaaaagaatttttggtgcaacataagaataatcagatcattcattttgatcattacgaagaatctatcaagaaagtgaggcttgagtaaaatgttgacacttgcagtacgtgcccatgatgttggcaccaaaatatctcctgtggaattggctaaaaaaattgctgaaacgaacataacttcaattcaatttgccttaggtatttcttatccagaatatgcaagtgctgctgttctatctccaggactaggaagccaattgaagaatattttcgaagatgaaaagattacgattagcgtcctaagttgttatattaatctgattcatccagatttagaagagcgagaaaaacgactgcatcaatttgaaacatacattcgttacgattcaatgtttggggcaaaaatcgttgcaactgaaacaggcagtatatatgaaacgatttattacactgaagataattatacagaagaagcctacgaagaagttttattttctgttagaagattatgtcgagaagctgaaaagtatgggataattgttgggattgaaccaggaatcaatcatccaattcatacaattgaaaaaatgcaacgattgattgacgaggttgcttcaactaatttaggtattattttggatcctaccaacttaattcgagtagatatagataaaacgtatttggaaatagtagaagaagcgtttgagtgttttggtgaaaaaatcgttgcttttcatttgaaagatttcattataagaaatcagcagatatttccggtagccattggcgaagggcaggtacctcttacagaaaccattcaatttttgaataaacataagcccggactgttcactatttttgaggaaacaccatttgaaaaaatagcaagtgcctatcaaaaagtttcgcaatatcattccatttagataaaaatgtgcaacaaaaaacatctcgattttttgagatgtttttgttgcttaataagacaaaatataaaatacacttgccttaaaaactcacataaaagaaagaagcaatcgccacagcaaatgaaataatagcaaacactaaactactccatagtcctaacagaataaatggtgaggttcttttaccgccctctttctttaagtaggaaaatgtccgtccagtaacaatgaattgccagatactaatcaataaaaaaataccgccaattaagtaacgcatgtcctcgtcctccttctatttagtataccacttgatgaaaacgttatcaaaacgctgtataaaaaagttgcctttcaaaaaagagaaaggcaactttttgacggtttaacggacgtcacccattaagttttggattggttttttcacaatgaataagagaatcccagcaacgacagctacaagtccgacaatcccaaaatatgctgactctgttccaggtgtatagaaacgagcaatttgagcgttaatggcttgtgaagcggcatctgctaataaccaaatagcaacggtttgagcttcgaaagctttcggtgctaattttgtagtaatcgataagccaacgggagataaacacatttctccgacaatcataatgaagaaactaaagaataaccaaagtggactcactcgtccttcggtaccataaagtagacctggcaacattaataagacgaaggaaagaccagcaaagactagccctagtgaaaacttcacaactgttgatggttgacgtttacctagttttgtccataatgtaacaaaaataggggtcaaaataactacgaatacaggatttaatgattggaaccagctagcggcaattgggaagccaaacaaacttgtttgtgtccgttcatttgcaaatagagcmagaatagacgaaccttgttcttccmatggaccagaaaacmattgctgctaagaatwatggcagtaagccagaacttttggnttttcttcagcagtgacatctttagacgttaacattttgctgaataataaactggtaacaggattcctaacacgctgatggtattaataaagaaatcaattgttaaatgtcctgtgacataggcgccaccaaaaataagtaaagcaacgacaattgccaacataaatgctttagcaaatttcttttgctcttctttagacattggattagttggggcttgaccaatcccagcaagagatttacgtccttggaaataatattgtagtagcccgaagaacatccctactgcggcaacggaaaagcctaaatgataattatattcttgtcctaaagttccgacaacaaggggagcgattaaggctccgatattaatccccatgtaaaaaatggagaagcctgcatctctacgtaagtcagtttttgaataaagatggccaaccatccctgaaacgtttggttttaacatcccagtcccaaatacaatcaacataatagaaacgaataaggcggggacaccaaatggggtagcgagaacaatatgtccagcaatgattagcaaaccaccaataaaaacagttttccttgaacctaagacacggtcagagacccaaccgccaatgatactggacatgaaaaccattgatccataaatggacatgatggctaaggcagttgctttggggagacctaaaccgccattggctacggtatcgtaaatgtaatacattagaatagcacgcatggccgtagyaactgaaacgttcccacatttctgtgaagaacagtgttgctagtcctttcggttgtcccagaaaggatttgtctaatttctcaagttgttctttgtcactcatagataaaactccaattcttataatattcagaatatttgataataaaatgacttaaatgtagattcatatattttattactcatagattggaaaatagaaagagaaaaaactgattatgtttttaaataacaagcgttcgagcgattgtttgttttttattcgtgaattatgataaaaatgaatatttattctgctt

SEQ ID NO: 239 - DNA, 7237 bp; double-stranded, linear
ggttatgagagcagggattgatgttgggtcaacgacagtaaaattagtatttttaaataagcaaaatcagtctatttttacaaaatatgaacgccatttttcagatgtcaaagcagcaacggaacgcattttaaaagaagggctagcaaggatcggtgcagaccaacctgtgacaatgagcataactggctctggtggtatggggctggctgaggtattagggattccctttgttcaagaggttatcgcgtgtacacgaactgttgaaacaataataccagaaacggatgttgctattgaacttggcggagaagatgcaaaaatcactttttttgatggtgctttagagcaacgaatgaatggtagttgtgcaggtgggacaggcgccttcatcgatcaaatggctgttttacttaaaacggatgccaatggagtgaatgaattggcgaagaattatcaaactatttatccgattgcttcccgctgtggggtttttgccaaaacggatgttcaacctttaatcaatgaaggagcagcgaaagaagatatcgcggcgagtatttttcaagcggtagttaatcaaacaatcgccgggttagctgctggtcgaaaaattaaaggtaaagtagcatttttagggggacctttatttttcatgtcagaattgagaaaacggtttgttgaaaccttagcaattcagacagaagatgttatttttccagaacaaccgcaactgtttgtagcaatgggtgcagcactttattcagaagatgcagccgaatgtacattggaagaattaattcagcgcttagtgaacagccaggctactgatttacagccgagcgacacgttaccaccgttatttaacagcgcagaagatttggcagattttcgagaaagacatgcgcaagcccaagcaacggagaaacctttatctcaacatactggcgtgacctttttagggattgatgcaggctccacaacgacaaaagtcacattgattgatgaagatggtcatttgttgttttctttttatggtaataaccaagggcaacctttagaaaccaccatgacagtactgaaatcactttatcaacaactgcctgaagaagtttttatcggaaaagcggctgttacaggatatggagaacagctaataaaaaatgcgttaaaagtcgatattggtgaagttgaaacgatggcccattacaaagcagccaaccattttcagccaggtgtggattttattttggatatcggaggacaagatatgaaagcgatgaccattaaaaatggcgtgctttcctcgatacaattaaatgaagcttgttcttctgggtgcggttcctttatcgaaacctttgcgcaatctttaaaatataatgtgaaggattttgctttggcggctttagaatcgcaagcgcctgttgatttaggttctcggtgtactgtttttatgaactcaaaagtgaaacaggttcaaaaagaaggggcctccgtcggcgatatttctgctggactatcttattcagtcatcaaaaatgccatttataaagtcattaaggttcgccgacctgaagagttgggagaaaagattgtctgccagggaggaacttttacaatgangctgtcttgagagcttttganaaaattagcggtcgtgaagtggttcgtccttctattgctggtttgatgggggcctatggagcagcgctgattgctttggacgcttatgaaattggggaagaaaccacgcttctttctttagaagagttagcggcatttacctctgaaaaggaatttactcattgcggcttgtgtgaaaacaattgtcaattaacggtcacagtgttttcagatgggcgccaatttattacgggaaatcgctgtgaacgtggtgcacgaattaaaattaaacgagaagaacgcaaagtaaatttggttgattataagtaccgcaagttatttaagtaccgacctttgcgggaaaataaagcgtttcgtgggcgcttgggtatccctagagtcctaaacatgtatgaaaattatcctttgtggcatacattttttactgacttaggctttcgggtcgaattatcgccacgttctaataagcaaatctatgaacaaggccttgaaacgattcccagtgatacggtttgttacccagcgaaaatggcgcatggacatattcaagcattaattgatgcgcaagtgccaattatcttttatcctggtgttgtttttgaacagcaagaaacagtggaagcagataatcattttaattgtccaattgtgcaaagctacccagatgttattcgaaataatgtggatgccatcagagagggccaagtggattatcgaaatccctatcttaatttagcgaatgaagctgcagttgccaaagttttagctgaaaattttgctgatttagggatttccttagaagaaattcaaacagcgctgcatcatggttatcaagaattagcagcttttaaaaaagaaattcaagaaaaaggcgaagaaacgttagccatgttaactgaaaaaggccagagagggattgtcttatcggggcgaccgtatcacttggatccagagattaatcacggcattgccgaagtcattacacaggaaggattccatgtcttgacagaagacagtatctcgcatcttggagacgtgcagaatttacgtgtggtgaatcaatgggtctatcattctcgcttatatgcggcggctaaagtagtggctaagacgaaaaatttagaacttgtccaactgaattcctttggttgcggcttagatgctgtgacaaccgatcaagtagaagaaatcatggatcggtctggcaaaatttatacagtcctcaaaatcgatgaaggtgcgaatttgggcgcaattcgtattcggttgcgctccttgaaagcggctgtcaatgagcgggagaagcaacagtttgttccgcatatgcaaatggaagagccagagaaaattgtgtttacaaaacaaatgaaaaaaacacataccttactgttaccaatgcttagcccgattcatcaatctggattagtcgatgtagcattacaagcttctggctatcatgttgtctgtttgcctgcgcaggataaagaagccgtgaatgtcgggttaaaatatgtcaataatgatgcgtgttacccagcaattatttctatcggacaactagtcgaagctttggaaagtggtcaatatgatttggataatgtcagtgtcttaatgacgcaaacagggggcggttgtcgcgcaacgaattacattcccttattacgaaaagccttaaatgatgctggtttttctcaagttcctgtagtttcagtttcgatgggcaataaaggggtcgaatccaatccaggatttaaatttacgttgccaatgatcaaacgcttagtggttgcctttttatatggtgacttattcgaacgagtagtttatcgaacaagaccttatgaaacagaaaaaggaatggtggatcaactgcaccaagattggctaaaaagagtggaagccaatgtccggaatggttcgctgacacaatttaatcacttcatgaaaaaaattattcggacgtttgatgaaattcctttacaagagataaaaaaaccaaaagtcggtgtggtcggggaaattttagtgaaatattcgccgacagcgaataatgatattgtgcgtttgctagaagaagaaggtgctgaagcagttgtgccagatattgttggctttatgaactattctttgtacaatcaaatttggaaatacgaaaatatgggcatgtcaaaacaaagcaaacgtttagcagaatttgcgataaaaatcattgaattggtagaaaaaccaatggataaggcattgagaaaatcggtccgttttgatggtattcattccatttatgatatggcagcagacgcaagtaaaattttatcaattggcaatcatacgggtgaaggttggtttttaacagctgaaatgattgagctcttaaaacacgaggtgaataacatcgtttgtatgcagccgtttggatgtttaccaaaccatattgttggaaaaggggtcgtgaaagagctacgacgtcaatatccgcaagcaaatattgcggcggtggattatgatccaggggtatctttggttaatcagttgaaccgaatccgtttgatgatggccacagcgaacaagttgttgaaagaagaaaatgtaaaaagataataactaatagaaattcgtttaaaaacatttgacttggtcactttttactgactaagccaaatgtttttgttataaaaagaaagcatgcaactagaccaactttgataaaaattccaattcctcttttatttatcattttttggttgtttacacggtctataccagttataatagaagaggagatgaacgaagaggaggaagcgtaaatggttcaaaatataccaatttatattcaaattcacgataaaatcaaagaagatattgaaaaaggtgtctggagtatcggggatcgtttgccctctgagcgagaattagccttgaaatttgatgttagtcgaatgaccttacgccaagccatccagactttagcagacgaagggattttagaacgaaaaattggttcaggaacgtatgtagcacgtaagaaagttcaagaaacaatgacaggtaccactagttttacagaaattaccttgtctcaaaatcgcgttccttctagtcggacggtgtcttattttgtagcgaaacctagttctagtgagatggaaaaattacaactaggtccagaagattcaattttacgaatggaaagaattcgttttgcggatgacattccgatttgttttgaggtggcgagcattccttattcattggtctcgcaatatggcaaatctgaaatcacgaactctttttataaaacacttgaagccaaatctggccacaaaattggccattctaaccaaacaatctctgctgttcaagcatcggaacagatcgcagaatatttagagattaaacgaggcgatgcgattctgcgtgtgcgccaagtatcctattttgaaaacggactaccttttgaatatgttcgtacgcagtatgcaggaagtcgatttgagttttatttagagaagtagagaaatgataagtatagaaaaatgccaagaaataggctgaggtargatattttaacctccaaargtkgtatctgaaaaatacaatttttggaggttattttttatgracttatcaggtagaattcaaattaaaattagtgaaagcatctcaattcamataaatattgaatagagtagcaagtctgaataccaaaaaagtgagatggtttgtcccgctataaatattgttaaaaataaacttataatagctgctagtttatttgcttttattctttttttggctgtagttcatttttgtccattttttacatttcttttttaaactgtaacctaatataagatatacccgttcaacgctttaatcaaatagttgcaaaatcagcagttgttttgcaaattgttacattgaaattgttagttattaccaatcaataatacttatgattgtcaaagttattatatagatatactgaaagagaaatttattttctttttcaataaaaagtttagcggaaggagtgatgcggaatgaaaaaaattaacgtacgtaaagccgatacagttgatgcaacagcatggtggattattatctaatttgataaccaaataacggttagacgagatagaaatatctcgtcattttttaataaggagtgaaaaaaatgaagtataaatatcccagaataaaaccaatctatccattatatcaattaaataaagagagatttagagttggggcccaattaggaatcactattgaatttgatgatgatgaaggtcaattttggacattatctaatttactcgatggagttagatcgtttgatgaagttgtcacagaaatgaagaggaaatatccggaattaacagtaaaagatatcgaagaagggatagattttttaaatgatgaaggtctaatcgaggagacgtttcctggtagaatgattgaagatagatacttagctaatgtgaattactttagtaggtactgtaaagctgatgatgatagatttgaaatacaggaaaagataaataacttgaaaatactattattaggtcttggtggaggaggatcaaatattctaacggtactagcgggtcttggccccaagatgattagaatggtggactatgaccgagttgaagcaagtaatttaggtcgtcaattactatatagagaagcagatattggtgagaagaaaactgtagttgctaaaagagccattaatgaaatganactcaaatattaacgttgaaactgtagataaaaaaataatagatgtgaatgatgttgttgaattgacagaaggaatagatatcattgtttgcgctattgatgaaccccctttccttatacatagaattgtgaatgaagctattgtaaaagttggtttgccgtgcgtgtttggtgcctcacaggttagccgaggaagagtatacactgtaataccccagaaaacaggatgctttgattgcatgaatttgaacttcagtaaaaatgaccctaaatttgttgaacaatttgtaggttttagaaatattcaatttgctcccccatccatagcttatggtcctggtatctttcaattaacagcatcaattgtagatgagttaataagagtggtaacaagatatgctgagccaaaaagtttgggaacgcaatatgaaattaactatgaggacggaaactcgttcacgcataaaacttggccaaggtttgagagtgaatgtccaacttgtggtaaaggagatgtctcccaatgggaaatatttcaatattatcaagagaagaaataggccgagactataccgaagctcgtacgttaaaacgtaagctaaacaatggcgattgggtttatgtatcagaggtacttaatgaattagttgaaaataaaattatgataaaaaaagccgatcagagagatgattataagccgctatttgtcgagcctaagaatatcttatttaaaagctcctctttcctgattgatgttaacggtattgttgcgtttacgattagcatatttttattcgtaatcaaggggtctccttttggaagtgcagtaaatgttttgttt

SEQ ID NO: 240 - DNA, 1989 bp; double-stranded, linear
gaggatttgatttgatcntctgagttcacgtgkcgctatcagctctgatacttacactttacgtcggacccagaacaggcttattagaaatgattcaaaagatgttggctgttcccgartgtgtttgtgttttatttgtataattaagttgactatttccttggaaaatwcaggagtcagatgctaaataatttttgcatctgactcctgttttcttattttaaacgatggattggttctccaattctttaacgtataaataaaaagagccaaagtctaagcgattcatttgtaaagattcatgaatttttgtgaaccctttactttcgaaaaatcgaatcattctatggtttgtatgattagtttgagcatacattttacgtcttccttcccagactgcccgtttctccaattcatggaacaataaactgccataacccttggcaatataattaggcgaagttgcaaagcgctttaaccaaacaaagtcttgttcctgctccatacagaacgttgccattgaaaaaatcatttcttcgtgcactagcaaatataatcgtttttttgtaatgtcttcttggatatctccttgagaaggatagtcctttgtccactgtgtaatgcccacaacatccatatatgcctttacttctgttaaaaattgaagaatcatcggtaactctttctcatcagccactctaattttcattgtttattctcttaataaggtaacaatagaatcgacaagacaatcacactaataatgccaatgatggtcggtacactcgtccgttttaaaattctgatgggactaactcctactgttgatgcgacaatcatgacaactgctgctacaggagaaatcgttctagttaaattcgcaatcatctgcattggcaaggaaattaagatgccatcaatcccagctttttcagcaatcccagggattagttcgataaccgcataaaacattgccagaccaccaccgcttaaaattccaaaaagggtcgttgcaccgctgaaaattaaggtcgtgacaattcctgctgaacttgatgcttcgacagatgccataatactatcaataattcctaacgtttgaatcgcagacgtgaataatgaaccgcctacgacaagcatcacaacttgactaaacccttgccccattcctttaaacatctcgacagctgtatcttgaacctttttaaaagatttcaagcgaacgyctcaaccaatacagcgatgaagaaagaaataaatgtaagaacaaaaatatccatcgttattcctttaataaacattcctgcgattcccactccaacaattaataatagcggtaatattggcaatattgcataaaatttaggaacatcaaattctttttgtttgcttaagccctcttcatttaatgagacataggcagcctcaccttcttttttatcgcagtatttttgccagaagtactgtgcaaccgcaatgattaataacgatggcagcgaaattttggcattccatacaacataatttaacacatcataaccaagggtatttgcggcgattacgttatccgcgcctaaaggtgttggcatgatagttgccgtcattgcaatcacacctgcagcagttaatgatgaaatccccatgctggctagcatcggatataatatagacattaaaataatcgctaaacttgatgcactaggaactactagtgacattaaatttccaattaaaaagaccacagggacaaataacgatttacgtttaatcttcattaatggtttcaccaaaaagttgacagccatctgattggccccgattgcattcatatagcctgaataaccaaaaagaatcataattacaattcctgctgaactcacttgtgcaataattgtatctttaaacttcaagaaaatatcaaataatccaaaaccggttccttctcctgcaggataaatgggatgccctaacatccatgcacatgcaagt

SEQ ID NO: 241 - DNA, 1814 bp; double-stranded, linear
gcttcattactaagaaataaggtatgtaaacaaaaacaactaagattcggtatttttccagaaagagttattatttaaatgtttttaaataaaaaatatggagataaatggcagatcgtttgttgctttttttaatytcgaattatcaattaagtacaacactttatcctgtaaaaacttcatacgatgttttycattttaagcacttttgtggtctagtctatgcataaaggattgaatataattatctggaattaagattatatctttctcttttggtaggtactctcttaataatctatttgtattttcatttagtcaaaaactgggtaaaggagtctacaaagataaacctaaaaaataattttgcacatatgcttgatgaccttcctggagtagctgataatgctaaaaaaatattgtttgatatgaaatgkactactgkaatagacgattgtaatgttcatttacgagatgtacttaatttattagaagatgaaatgcacagctttagattatcttctattgaagctaatgatttagataaactatatgatactttttattactatggnaaaaaagamcaattaatagaatttctgcttgaccagatgactaatgcgataaattttaaacaagctgataaggattttcttatttattcatggcttgtagaaaaacttactgaagaacaaatatgcgaaatgctcgcgagaattaatgaaaatacccaataccattggaataacaaccttaattcatttgttgatgagttcgttgcttattataaagaaacaaatggaattgatctaagaataaattatttgggagcaatttatactaatttaaaaattctcagcgatgaatatactctctctatctcagattacgagcttattttcaaattttttgaggatataatagagagtcatagcgaaacaatatttgattttcagcgtaaatataaaaaggatattgaaacaaattttggtaatagtttggaaaactttcctaaactgaataagttattgttcgaatagattttgaaaagcttacaataaataaaagtattaatttttgttacatcaattaatctctaattcatgaatttcttttttgattctatatatagtttgtctcgtaatattgtaatctttcgcaatctttgagatagcaaccccattcttaagatcctgaacgatgcttttataaacaaggcgacgttggggatcttttgtgtctgcactgtataacttaggacgacctttatagacgccgtttgctttcgcaatctttatcccttgtgcttggcgtcttttagattccgtacgttcttgctcggcaatcatggccaaaatctgaatgattaggtctttgataaatttatctaggagtggatttccgattgcttcagccatgattggtaaactggtaataattagccgcacatttttcttctttagataatttactgaatcgataatctcgtcataattacgtccaagtcgatcgatggcctctacaataaaaatatcttgggctctaacaaaatctagagcttcctgaaaaatcggtcgatgagtaatagtcgctccggattgtttctcgataaaaattttttcagcaccaaacttgttcatttcctcaatttgacgttgttcattttgatcgattgatgaaactcgaatatatgcaattttccaaatttttacctactttctataatttttaaaatacaccctaatcatacattcaaaaaccatatttttcaakgttctgttggtgtctatttaggggtccttaattagacaatc

SEQ ID NO: 242 - DNA, 12445 bp; double-stranded, linear
tatggttcaaggtccagtgtttaatgaaagatatgtttggtcagactaatcgaattgttgttcatgttatttttgaagaatggttggaactgttcaaaaccgttgatgatacagaagcttctaaaatggagaaccgctttgttgcataggaaggaagtgagaatatgcagtatctaattgacagttatagtgcgtatacggttgatggtggtttgttggataaaggatggcaagtagtgaattggttctttgtagatataccattctttatcttacgaatgtttgtttctttttttcttttttgtgagaacgtcttaaaccaatctagtttctttgaaggaaaacaagaaacagtattgaatatgtcaaaaaatgttctaagtggcattggtggcaagggatttagaggtggttctttactagcattagcgattcttattagtgcatattatctgctttatcatttcttttccagtcgtagaagcttttcaaaagtattccttcattatttagcagttgttattttgtttggtttttggtttggctctgtatcaacgtcaacaggcacaacaagtggctcaatgttcttgattcaatcaactaacgcaattgctaaaggagtacaaagtacgtttactacaagtgccaatttaggaacagaaggttctaaagatggagaagtataccaaagtcctatttttgatgccacagtaaaacaaacatttaattttgtaaatagtggttcacttgatgggaaaatggaaaatggtaaaaagttagatgaaggtaaactactagaaaagcctaaattgtctaaaaaagaaaaagcaaagtttgaggatgaaagaagtacctatataaaaaataatgagaaagataatccatacttctcacaggacggagcaaaaacaatggaaaaagcttttggcgttggtgtgggtttagtcaatttagcagtcttagcagtgcctgtcacgtatattaatattatgctaaatgtaattcaaatcattgttgatttactcattcttgtttttccgattattgcgttggtgtctttcttccctcggtgtcaaatgatgatgtttaaattttttaaatcattaattggcattttatttttacctgtagttttcggtatatttttgtctgtgttattttggatcaataagttaattgaccaagcgtttttaggattgatggataaagtaagtagtagtttattaatggtgatgtctggtggtgtttttcttttaggcacattaattgttactgcattggtgaaaattattttgtatcggaaaatttggaaaagcagatataaaatattatcattcttttctgatggccaagttcaacaaccttcttttgaatcaaaaatgaatgaaaaaacaaaagaaacggttgagcgtacaggtgaaattggtgttggagcagtaaaagcaggaataggtgctkccactggaaatttagcgttggctgctgatggtgctagtcatttaatgccaaagcatgacaaggcattgaacttagctaaagaccattttattgacgataatgggcaatttgctggtgttaaaacaggattgaattcattgttgaatcgttctactcaagaagaacaacaaccattaaaagatgatttattgccagaagaagaaattgtggaagtagaagagccaaccaatgttgataatgaggaactagaagaaatagaagataaagctttaactgatgaagtggataattttgaagatttaacagatgatgaaatggataattctttagaagaaattgatgttcctgtattagatgaaactgtatctgattctgatacttctttagctgatgaaagtaatattgagttagagccaattattgaaaatgaacttgatagtttagattcaagtgtagaatcaagtgaaaatgatagagaagagccaattcatgaagttgatgagcaagaaatagcggacaatttgaatgttacggtcgataattttgatgagttggcatttgctcgtgaagaacgtgcattttttgatggtggagaggatagcgagttaatcacaaacaataatgattcattaaataacgtgtattcattttaccaaacagaagaaaactttaataatttagaacaaacagaggaacaattttttggtagtgtgaatacggaagaatataattttgatgttgtagagggctgatgaaatgtttatcagtcttctttttattgaaaggagagatcatgaagaaattaggcaaggttttaattgttagttgttttatttttattcttccttttttattatttttaggtgtattttcttctagtgaaagcggagattcttcccagtttcagcccgctacaccacaggaaaaagtagcattagaagtttctaactacgtgacgtcacatggcggaacgttgcagtttgcttccgcttggattggcaatatggaacatgaaagtggattaaatcctgctagaattcaaagtgatttatcgtttaattcagcgatagcttttaatccttcgttaggcggttatggaattgggttaggacaatgggattcaggacgaagagttaatttattaaattttgcaaaaagtcaaaaaaaggaatggaaatcagtagctttacaaatggattttgcgtggaataaggatggttctgatagtgacttacttaaaagaatgtctaaatcaaaagatgtgaatacacttgcggtagatattttgaagctgtgggaacgagctggaacaaaagatgatcccgcagaacaagtaaaaagaaaggctagtgctaataattggtataaacgactttctacaggttccatgggcggaggttcagccaatgttggtggaggaaaaattgatgccttggaaaaagtgatggggcaaactattaatggtggtcaatgttatggcttatctgctttttttgttgaaaaacaaggaggtctacaaatgatgggtacggggcatatgtttgcgagtgaaattggtaatgattatccttggagttcaattggttggacagtcataaagaatccaaattattcagatattaaagcaggagatgtcattaattttggtcaaggtggtgtggctactagtatttatgggcatactggtgtagtggcaagtgttgaaggtaaaaacaagtttactacttatgagcaaaacgctgaacaaggtcaaattgttgctaagtattttcggacttggggattagattttccacatgtgaccagcatagtaaggaaataggaggaattatgaatgactttgagtaagaaaagtggtttaactaatcgtcagataaaagaaatctgttcgaaatttaactgtagaaaaaatgaatttgcagttcaaaagtaccaagatagttttttattagctgtgaataataaagagtatcgtgttaaattttctgaggggattttttcaaagattatgtatattaaagaagtgcaacgcatttcaaagaaagtaggtagaaaatgaaaaagttaagtttagtagttttagtattaggtgttggattaatattttctgcttgtggaggaaacaccaaaggtcatgaaacggcggcttcgtcaacaactgaattggtgactatgaaaccagttgataatataaatactacgaaaagaagtgaagtaactgaaaaaagtagtactaaacctatgcagattaaagataaactagcagaagaaaaagtatctgatacttaccagttggtggaggactttggaaatacttatgcmaatttttctagtatcaatgatcgtaacgraaaattaaagraattaatgactgctgaatgtgkaaagaaaaatggtattgatgtgaaaactggcgcaaaattggaaagtaaaggtgaagtaagcgcaatatatcaaaatgacaaaaaggaatacgcagtcttacttgattgtgaacaaaacggaacaaaaacaagagtacttttactggcaaaagtgcaaggaaataaggtagcggaaatgacctataattcagtgaaacaagagtattaaccttgatatatatggatttgtactttagttaatggtataatgtatgtataagtgaggagatgagaaaatgaaaaaggtagtttcaattttgttgatggttgttgcagtcttcacattaactgcatgtaatggttctaaattagataaaacaggtgaagaatttaaaaattctataatgaaagattcttcatatggtgatgaatattcagaagatggttttagttttttaatatataaagataaagacactaatcgttatttggctgatgtttgggttcctgttaaagatgaaactagcgcattggagtatttttattattatgatgaagataagcgattagatagtactaaaagtaaagtaacctttgatgatatgaaagctagtggaaactatgaagtagtgtataaatcagggaaatttaaataacatagcctgtcacgtaatttgttatttttaagtggctaaaatttggctaaaacactttgaaatgtatggaaatgctggattatttgtaaaaataatgttgatattaaagcatttgtgtggaaaatacattttataatttactcgtaacgcgtaggtcacaggttcgatccctgcagctggcatctaaaaaaacagacaggcactaccatctggtagtgcctgtctgtttttttagmtaaaattttggattagtgcaaatgaagcaatgcctaccagtacaataagcaataagtttttagtaagtattgcggctaaaatggtaggaaatgaagcgaataaataaggaagattgaggcttggtaaatgcccaattctttgttcaaataagctactaaaccataaggcggacataatcacaattggaacaaaacttagatattctaataatttctgtggcagactgatttttttaaaataaaaatggcagtattcttgaaagccaggttgcaacggtacagcctaaaattgttaaaaagagatactcagaagaaggcatgttttatcatcactcctattccacacccgattaacgtgmcaactargacaattaaattactgggaataaaaattagaccaatagacatcaaaccaaaagtaatcaggaccatgatgagttgtaaagcgattttcatggaacgatcactaattatctgcagatagagtaaaccaatgaacatagccacgaccgcaaactcaagacctaatgcttgagggtttgcaataaagcgccctagataggcaccgatgatcgtcgaaaaaacccaagtcgcataggaaatcaaattggcagcattaaaccactcaaaacttaaacgtcctttggtgtggtttaatttattcattcctagtgcaaaactttcatccgtcagtaaggttcccaaccagagatttttaccgagagattcggctttaaagtaaggcgcaatggtcattcccataagaatcatacgcgcatttactaagaaagtcgctaacacaatagataagatagggctgccgccagtcaacatactaactgttacaaactgagcagatcctgcaaaaataaaaaacgacatcgcactaacaataagaggggaaaaacctgctgcttgtcctacgataccaaaagcaatgccaataccaatatagccaaaaaccgttggcaaggcttcacgaatgccagtgcgtgcatctaattggtggttcattctctttttttccttctttctgtataaaatttaaacacgtgtgtatgaaaatctagaccttcgataatgagacacaacgagcgaatgagcgttttcattattaaccactccttttgaacaactaagatatatattgtataatacaataaagaatacttttgttcaatatattaaacttttggatgataaaaagaaacagaaggagcaactattttggagattaatacaattattggcaataatttaaaaaaaattagacaagaaaaaaaacttacgttagatgaactagctgggataaccggagtgagtaaagggatgctttcgcagattgaaaaaggaaccaccaatcctaccataaatacaatttggaaaataagtaatggactcaatgttccatatacgtatttattagaagatgactatgttaaagaaaatcccgtggttaaaaaaactgagacggtaacacaacattctgaagatcactcctatcgagtctttaattactactcggacaaccaggaaagaaactttgaactctttcagtttgaattagatccagggaaaaagtatcaagctgttgggcattcaaaacgttcgacagaatatgtcatggttattcaaggagcattagctcttgaagtgggcggtcagagataccttcttccaaaagacgccgctatgtattttgatgctaatcaagtacacacgtatataaatgacggaacagagaaagtccaagcagtcgtcattaactattatacgtaacagtggaaaataaacattagaaaattgctgcatctgttattttatggacaaaaaaagtaaacaatgctaccctaaaaataatagaaaatgaaagataaaagaagaggtcaaaatgaataaaaaaattgaaagtcttggtaatacagcattaagtttactaagtaatacgattattgttgtgccttatttactttacattcaattgagtgatggacacaaccttctaacaattttaccatttgtcttattttatacattgcgtatgacaggcatttttctggttcgaggaattaatttgtctttaactagtctaggtctactaaagatttctctattgttaggcttggcaggctccttaattgggattgccggcgcttattctttcccgctttatagtatttcaggaatgttgttaggacttagtggagcgttgttgccaccaagtaatcaatcaattcgctttttcttaaaagaagaaggtcaaaaaatcagtcmtagcaatcytttaacgacagcttawtgaccgctgttttawttggcgctttattttttaaagcgactgagattggactggcgttattggtgtacgcgctctattttctggttgctttagtagcaatcaagagctatcctgtttcattaaacgagctagaagaagaatcagcagaagtttcacgaaaagaattaattctgtttgttatcttttttgtgttattacttttattaagaagtggtcgcttattaacgaatgcggtggaatttgattatgcgattgttggcgcctgctgtttctttgtggtggctgtccttttcgttagtcattatggcaaacgcggtgcgtataaagtatcattagaaatgaacttgcgaccttgattaacgggattgtggggaactatttattntattggttccatttatgttgcagggttacggcagagmtcatatgggcatctatctcwatttaccttatgttttagggatgawttttgcaatgattgcagctagtaaacgaacaatggtcaaacaacataccaatgattggtctggcgggaagtttgggaatattacttcttacttcgtggactattttaggcctgtttctcttgagttttttcaaaagcacattgaatagctttttagctaggcgatattatcaagagacagatttgccaaaagatagccgtatccttatcaaatacacaacacaaacaaaagggagtttattccatcaatttattttgatggcgcttatgttagtcactgtagtaggcaaaggtggcacgacacaatttttattagaattgactggcggcaaaggcatttcaatgcaaacaagtcaatttttaactttcattaaaaatagtaactcgctcttagtgttattgtttattgcagtttatttcgtggtcgtttttcgtcaaaagaaacgataatttacaaatattaataaaaaaatacttggaaaaacagtgattgtggctgattttccaagtatttttttatgaaaagatgtttttttttttcgaagattcaaaaaaaattaatcaattgtttcatttttaacaagctattattaggttatatgaattttattgaaaggggattagtatgaagaaaaaaactttttcttttgtgatgttgagtatacttctcgcacaaaatttcgggtttgccgtaaatgcctatgctgtaacaacgacagaagcacaaacagagaccactgatacagcaaaaaaagaggcagagttatcgaactcaacaccatctttacctttagcaacaacgactacttcagaaatgaatcaaccaactgcaacaactgaatcgcaaaccacagaggcgagcacaacagcttccagtgatgctgctacaccatctgaacaacaaacaacggaggacaaggacacctcacttaatgaaaaagccctgccagatgttcaagcgccaattacagatgaactacttgacagtatgagtcttgcgccgattggtggaacagaatacagccaaacagaggttcaccgcgaattaaatacaacaccggtaaccgctacgttccaatttgctgttggaaacacaggttatgcacctggatcagtttatacagttcaattaccagaacatttaggttattcaactgtcagcggagaagtgacaggcattggcgcaacttgggcagtcgatgcggcgaccaaaacattaagtattacgtttaatcaacgagtttcagatacttcctttaaagtagaactaaaaagttatctaacaacagaggcggaaccattaatcaaaattgaaactccaggaaaaaataaaaaaacctactcgtttgatttatatgaacaagtggaaccaattcaatataacgaacgaaccagaacgacggggttagatggcgaaattttttataatttagaccggacgttaactggcaatcaaacattagaattattaacaacagagacgccaggcgctgtctttggaaaacaagataacttggaacctcaagttttcagttacgatgtcgacattaatggtcaaattttaccagaaacgcaaaccttgttaacacctggcaaagattatacattaagcgataattcactcgggcggattgctgtaactgttccaaacatgaatcaacaaaaagcctattccttatcgattaatcggacaatttatttagagagtgcttcggactataactacttatattcgcagcagtatccaacaacaaaaattgggtcaatttctttgaaaagtacgacaggaactaaacaaacaaccgattttactgctaagacgagtcaaacaagtaaagtaattgctgatcgtgaaatgcgtagtatgtcctatatcagttttcaaagcaaagggaaatattatgtaacaatttatggcacgttaacagaaacaaaagtgggtcaacaaatcgtattagagagtacaaacggtcaagaaattaagaatcctaaatttacggcgtatggtcctttatatgaaaatgtaaaattggaagactattttgatattaaaactgaaggtggcaagctcactttaacggccacaaaagatagctatttaagaataaatatttctgatttaacaatggattttgacaagaaggacattaatctatcattaagtacacctgtaattggtcctaataaagccattcaattagtatccgatcaatatattgaaccaattagtgttgttaatcctttgaatgctgaaactgcttggggtaattatgatcaaaatggtgcctattcatcaagaacaactgtctcagttatgggaagcaaagagaaaccgattcaaaatttagaaattaaagtaaagcatcctaattatctttcattacgagctacaaaagaaatttatttttattacaagttaggaacggattatacagtaacgccaacgtcagatggttcagttattaagttcactacgccaataaccaacgaaatccaaattccaattggttttaattatgtgccagatagtttgccaaaagataaaagtatcccagtcgatacgataccgataacaatgagtgctgaaggtttaactccagttgatacgacagtaactactaatagtaagcgtggttctgaacgaacacttcaaagtagtaaaaatcaattccttgtcaatgcacgaaatgattcttttgactcactaagcgtccgtacaaaaattccagctggcgccgatgttctttttgacatttatgatgtttcaaacgatcaggtagattcaatttatccacaatactgggaccgcggtcaatactttgataaaccaatgacgccaaacagccctggatatccaacgattacttttgacgaaaataccaatagttacacgtttgattttggaaaaaccaacaaacgttacattattgagtataaaaacgccaatggctggatcgacgtgccaactctttatataacagggacagcgaaagaaccacaatcgaataataatgaaggctctgcttcggtttctgttcaaaatgaagcgttagacattttgagtgcaacacaagcggcgaatccaacattaaaaaatgtaacaaaaacgacagtaacaacaaaaaatattgataataaaacacatcgtgtgaaaaatccaacgattgaattaacaccaaaaggcacaaccaatgctcaaatcgatttgaattctattaccgtgaaaggcgtgccagaagatgcttattcattagagaagactacaaacggtgcgaaagtcatttttaaagactatacattgacagaaaacattacgattgaatacaatacggtctctgcaaacgctggccaaatctatacagaaacaacaatcgactctgaaacattgaaccagatgtctgctagcaagaaaaaagtcaccactgcgccaatcacattgaaattctcagaaggtgatgcggaaggtattgtttatttagcaactgccacattctacacgcataacgtagaggatgaaaaccaagcaattgcgaaggtttcttttgaactaattgataatgtcacgcatacagcaaccgaatttacaacagatgaaaaaggtcaatactcctttgatgccatcatgacaggtgattatactttgcgagtaacgaatgtaccgcaggaatattccgtggatgaagagtatttgacaggaaaagccattaagctggtcaaaggagacaaccaactaaaaattccattaacgaaaacaattgatcacagtcgtttacaagtcaaagattcaacgatttatgtcggcgattcatggaaaccagaagagaactttgtttcagcaacagataaaacaggtcaagacgttcccttcgaaaaaatcactgtttcaggtcaagttgataacascaaagcaggcgtttatccaattatttacagtgacgaaggtaaagaagaaacagcctatgtgaccgtcaaacccgaccaatctaagttagaggtcaaagatacaacgatttatgttggtgattcgtggaaaccagaagataatttcgtttcagcgacagacaaaacaggtcaagacgtyccgtttgaaaaaattgatgttcagggaacagtgaatgttgataaaataggcgattatgaaattgtctataaaaatggcamaaaagaagcgaaagcaatcgttcatgtccgtgatgacagtcagttagaggttaaagatacaacgatttatgttggtgattcgtggaaaccagaagataatttcgtttcagcaacagacaaaacaggccaagacgttccgtttgaaaaaatcactgtttcaggtcaagttgatactagcaaagcaggcgtttatccaatcgtttacagttacgaaggtaaagaagaaacagctaatgtgactgtcaaacccgaccaatctaagttagaggttaaagatacaacgatttatgtgggcgataaatgggaaccagaagataatttcgtttcagcaacagacaaaacaggtcaagatgtcccgtttgaaaaaattgacgttcagggaacagtgaatgttgataaaataggcgattatgaaattgtctataaaaatggcacaaaagaagcgaaagcaatcgttcatgtccgtgatgacagtcagttagaggtcaaagatacaacaatttatgtgggtgataaatgggaagcagaagataacttcgtttccgcgacagacaaaacaggtcaagacgttccgtttgaaaaaattgatgttcagggaacagtgaatgttgataaaataggcgattatgaaattgtctataaaaatggcacaaaagaagcgaaagcaatcgttcatgtccgtgatgatagtcgtttacaagtcaaggatacaacgatttatgtcggcgattcrtggaraccagaagrgaactttgtttcagcracagataaaacaggtcaagatgtcccattcgaaaaaatcactg

SEQ ID NO: 243 - DNA, 2546 bp; double-stranded, linear
gaacacaagaaaatgttttttgaataaactcttcttgttttgaggttggataaagtctgtatttataagctttcagagccttcatctcataaccaccctaccaagatagttagaaaagaagctggttataaaccagcttttcttttcttctcttcaattttttcacggtacattgcaacttcgtcttcagcacaataaacatagtgtccattgagaatttcacggagctcacgatctttcccatctgccgctgcaggctggtaaacgatccgtttacgtgtgcgttcatagtctggatctggtaatggaatcgcagaaagcaaactttctgtataaggatgaacgccgaaattatagacatcatcacttgtgcccatttccaataatttcccactgtgcattacgccaattcggtcactgatatgttttaccatcgataagtcatgtgcgataaacaagtaagttaagccttgttctttttgtaaatcttgtaataagtttactacttgggcttgaatcgacacatccaaagccgaaattggctcatcacagataatgaaacgtggattaaccgctaaagcacgagcaatcccgatccgttgacgttgcccaccagaaaactcatgaggataacgcgtactgtgacttggatttaatcccaccgtttttaaaagttcattgactttttcttcccgctcttttggtgttttagctaatccattgacatcgattccttcagcaataatatcattgactttcattcttggattcaatgaagcatatggatcttggaagatcatttgaacatcgcgacggaatgcttgcatgtccgcttttgatttaattttgctaatgtcttttccatcgaaaagaatttcaccagcagttggatcatataaacgaatgacactgcgaccagttgttgattttccacttcctgattcgccaactaatccaaaggtttcgccttcataaatatgaaaactaatgtcatcaatggcttttacttcgtctttacgaccaacattgaaatactgtttcaaaccagtgacttctaataggacttttttctcttctgccattaattactacctcctggatttttttgacgctctgcataaattgcccaacgacgaacaatctctgctggaggcgtaacttttggtgcttgtggtgctaataaccacgttgctgctttgtgggttggtgatacttcaaaataaggtggttctttttctgtatcaatttttaaagcaaactcattccgtggatagaaggcatctccagttggtggatctaataaatctggaggtgaacctggaatcgcataaagtttgtcttctgttccttccatcgttggcattgaccctaaaagtccccaagtatatggatgttgtggattatagaaaatttcttctgctgttcccacttcaaccagacgtccaccgtacatgacagcgacacggtcagccacgtttgctactacccctaaatcatgggtaatgaaaataatcgaagtgctaattttttcttgtaaatcttttaataactctaaaatttgtgcttggatggttacatccaacgctgtagttggttcatctgcaattagaacttcgggataacaaattagagcaattgcaatgacaatccgttgacgttgcccaccagaaaattggtgtggatagtttttcaaacgtttttcagcattaggaatgccgactaattttagtaattctaatgcttgcgctaagccttctttttttgagactttattatgtttgattaatgattccgccacttgtttgccaattggcatcgttgggtctaatgaagtcatcggatcttggaaaatcattgcgatttctttaccacgaatggcttgcatttgtttttctgttttatgaacaatatcttgtcctttaaacaaaatttccccgttatcaatattggcattactgctcaacaaacgcataatactgcgggttgtaacagatttaccactccctgattcacctacgatggctaacgtttcacctttataaagatcaaaactcacaccacgaatggcgttgactttacctgcaaatgtatcaaaggagattcttaagtctttaacttctaatactttttccatagtcattcaccactcttactctttcatcttaggatcaaatgcgtcacgtaaaccatcagctaacaagttgaaacaaatcatgataactgaaagtgttgccgctggaatccacattaaatatggaaggaaacggaaagttttgtatccttcgtttaacaaggttcctaaagatgcggttggtggacgtaagcctaacccaataaaacttaggaacgcttcaaagaaaattgccgatgggatactgaacatcatttggacaataatgacacttgagatattcggtaaaatatgtttaatagcmattttccaacgagattcgcccantgtttctgctgccatgacaaactcttggtcttttagtttcatggtckgggctcgcacaatcctggccatkgatatccagtttgtaata

SEQ ID NO: 244 - DNA, 8102 bp; double-stranded, linear
aacttaccaagaatcgctttagaagcgcaaggaagtcaagaaaagttctggcaaattttaaatgaacgtttagcgatcgttaaagatgctttggtttatcgggttgaacgtgttaaagaagctaaaccagcgaatgcaccgattttatacatgtatggtgcatttggaaaacgtttagctacacaggatgccgtagatgaactgtttaaaaacaaacgtgccacggtttcacttggctatattggcttgtatgaagtggcttctgccttttacggcggtgcttgggaggacaatcaagaggccaaaaactttacactggatattttaaaagaactgaaaaaaaatgccgacaactggggcaacgaatacggctatcattttagtgtctactctacaccgagcgaaagcttgactgaccgtttttgccgtttagatactgaaaaatttggcatcgtcgaaaatattacagataaagaatattacacaaatagtttccattatgatgtacgcaaaaatccaacgccttttgaaaaacttgattttgaaaaggattatccaaaatactgttctggtggttttatccactactgtgaataccccatgttacagcaaaatcccaaagcacttgaagctgtctgggattacgcttatgacaaagttggctatttaggaaccaatacgccaattgatcattgttatgcctgtggttttgaaggggacttccatccaactgaacgtggctttgaatgtccagaatgtggcaatcatgatcctaagacttgtgatgtcgttaaacggacttgtggttatttaggtaacccgcaagctcgcccaatggtacatggtcgtcacaaagaaatttcctctcgtgtgaaacatttaaaaaattaaactcgattattctatagaaagaagttttgctgatgcgtaatccgaaaccacaagaatggaaaaccgaagactacagccaaaaaaagattgccgattacaaagcgttcaactttgttgatggcgaaggtgtacgcaatagtttatatgtgagtggctgtctctttgcttgtgaaggttgttttaacaaagctgtccaaaatttcaattacggtacgccgtttacagaatctttaatgaatcaaattattgaagatttgtcccatgactatgtccaaggtttgactcttttgggtggcgaaccttttctgaatacagatgtttgtcttagtgtggtcaaacgtgtgcgggaaacatttggctcagccaaagatatctggtcttggtctgggtatacctttgaagaactacttttagaaacgcctgataagcttgaactactccattcaattgacattttagttgatgggcgctttgaactggcaaaacgtaatttaaatttacaatttcgtggcagtagtaatcaacggattattgatgtacccaaatcacttgctgctggcaaagctgttatttgggaaaaatgtcatgacgccgaaacgtcttatgaacaaatcaaaaaatcaatttaaaaaagttagccctttagccatctcttgaggatgtgtctaaagggctaacttttttcccataaaggtaaaacaatgttttcatacgctagtggatctaaattcgttaaagtaatgcctaataaacggattccttgttctaaacctaaaatatcttcccaaattaaattcgcttgatagaaaagttcttcttttttagaaatatattcaggtaatgtcacacgtttcgtaatcgtcgtatagtcagtataacgaactttcaggactactgttttgccatgcttttgcactcgttgcaatgcacgctcaacccctgctgctaattgtctcaattgagccgtaacctgctcttccgtcgttaaaggggtgccgtaagtatgttccttgcctaccgacttacgatctctagtcacttgaactggcgcatcatggataccgcggactttacgatacaatgaataacccattttaccgaataaccgaatcaacgtcatctcatcttgcttgtataaatctgctccagtaaaaatccctagttcatgcattttaggcactgtttttttcccgattccgtggaaatcttcaatcggtaatgctttcaaaaaatcttcggcctcttctggtaagacaaccgtcaggccctttggtttctgaaaatctgatgctaacttggctaaaaacttattgtaactaacacctgccgagcaagttaactgcaattcatgccaaatatcatattggatcattttcgcaattttaatagccgacttactgttgaccttattttcagttacatctaaatacgcttcgtcaatagataccggttcaatcacatctgtatagcggcgaaaaatttcacggatttcttgagaaatttcactatatttctgataattacctggcttaaaaatggcacttggacatagttcatacgccttttgagcactcatagccgagtgaataccgtactgtcgagcaatataattcgctgtggtcaccactcctttgcccccagtatcacttggatggcgcgcaataactaacggatgtcctactaactctggatgatctcgttcttcaactgaagcaaaaaacgcgtccatatctatatgtataatttttctcgacgtatctttttttaagggaaaacgtaattcgctcatcattttgattcgcctcctccctccattatatacgaacgtccgttctttttcaaattgaaacttctttatttcaaccagaaaaagctgaaaatccgtgaagttataaacacagatttccagctttttaattaaacgaccaattgtttttgttgattatagtagcctttataggcaagataagttgcaatcactgaaccaatacttgttgctgatagcaacataaaagtcaccataatctgatattttatcgcatggacaggatcaacgcccgcaaaaattaagcctgacatcatcccaggtaaactaacaattccgacagttttggcagaatcaatcgtcggcgccatcccggttttcacactttgttggatgattggtaaagaggcgagtttgatagttgcacctaatgctagtttctccattaccgcttgccgttggttttgaaaaagagtatctaaattgcgatagcataaaccaattgccaccatcgaattgctggcaatcatcccactgataggaatgatttgagaaggaataaatttaatagaaccagaaaaaatcaaaataccaatggtaattcctgtactacaaccaattgcaatgaaagaaatcaaaaagcccttttgtaattgctggctgcgtttttttgcattaaaggctgcgttggaaacaatcaccaaaaccatgatgagcgttaaaataaggttattgacttgaaaaacatattttaataaatagccgactgcgactaattgaatgactgctcgaatcacactaataataatatctttggtaaaacctaatttttctttagtactaataattaatgcgaccaccactagcatggctgaaaaaaataaggataaattattaactgctaaatccatctgtcggcgccacctttcctgctacaatacgaatcacttgctgtgcttgctgaatttcttcggtatcatgcgtgacacgaaccagcgtgactccttgctctttgtttaattggtttaacaattgattgacaatctgtttgctttcttcatctaatcccgttgtaacttcgtctaataataaaacatctggtacaaaaataatgtttcgtagcaaagcaacccgttgtcgctcaccaccagagagttcggctattttcttttcaagataagcagcgggcaatttcacttgttggagtaatgccacgactttttcctgattaaacgcttcttgtctgacggtaaatggaaataacaaattatcatacacggtttcaccaaataaagttggctgctgaaaacaataagaaaccttttggcggtatgtttcgattggcattgtagtaattggcgcttcttgataaaaaatttcgccttctgtaggacttaataatgaagataaaatttttaaaaatgtacttttcccgctacctgaaggaccaacaattgttgtattgctgcctgtttcaaatgacaaatcaatatcagaaagaatgctacgaccatttacttgataagacacgccttctgctcgcaataaattactcatgtttctctccttttttaaatggaatgatattctttatatacttcttgtttttttacatttctcaatttagccacttctttgattgcctcttttgaactccgtccctcttcctccattaaaacttgcacatgttccttgagggaaatagctggcattgctgctattgtctctttctcaccagtaaacccgctaactaataaacaacactcgccttttagcgtattttctgctaaatattctgttagttctcctaaggtaccacgcaaatactcttcatgaagtttcgttaattcccgacaaatcacagcggggcgttcttgaccatagacttcagcaaacgttgctaccgttttagcaatccgatagggggactcataaaaaatctgtgtcggccgttcttcttttaatgctgataacacgtctttctgttcttttttctttcttggtaaaaaaccataaaacgtaaatggctgtggtaaaagacccgaggcaatcaaagcggtcattcctgccgtaggtcctggcaaggcaatcactgccagttcttcttcaagacatgctgtaaccaattcatggccaggatcactaattgaaggcatacctgcatcgctaacttgggcaatcgtttcaccattcagcaatcgtgtaatcagttgaggaattcgctctttgtaattatgttcgtgtaaactaatttgtggtgttgtaatctcaaaatgatttagcaatttttgtgtgtttcttgtgtcctcactagcaatcaccgttgcttctttcaatatgtttaaacaacgaatactcatatcttctaaattgccgatcggtgttgggacaagatacaattttccttttgttgtttgcttatcaaaacttttctgtttttgcatagcgcatccctcattttcctttttcgttctataaatagataaaggtttgatttgacaatcgattgactgtcaaaccaaacctttcctttttatttgcagtgtccactagacttaacgcgtacgttccccataaataacatcaagacaaaaggcacattcttcatcattttcacgtcttgaaccatataaaatattgcagacatggaagccctcttcataaagtttttccaaattcatacgtgattttgatagctcttgtttttcagtttcagttgtatttcctgctaacttattcagttcttggagatgctctcgtaagcgttggttttcgatttccaacgtggtatttttttctaccaactcatggagtgctgctttaatttctcttaattgtgtcactgaactgtctaaatcagtttccaacgaatttaatccatcatagagcgaacgcttatccattttgatcacctttttcagcagcaactttcgcagtagcttctttgatttcttcgtaatcataatccgctgcgatttcacgaccatgcagacgaactttgacaatccgacttaatagattcaacccgacgactttgcctttgccatctggtgttattacttcttttccataatctggtaattcttttttagcggcttcatattcgtcgttttcgtatttcaaacaacacattaagcggccacataatcccgaaattttgacaggatttaaagataacccttgatctttagccattttgattgaaactggcataaaatctcctagaaatgttgagcaacatagttgtctgccacaagggccaatgccacctaatattttcgcttcatctcggacaccaatttgacgtaactcaattcgcgtccggaaaatagccgctaagtctttgactaattcacgaaaatcaattcgcccatctgccgtaaagtaaaaaatcattttgctacgatcgaaggtatattctactcgcactaatttcatttttaagtcatgagctcgaattttttcattggcaatgcttttggcagcttctgcatcagccaaatttttttgttctttttctaaatcattggctgttgctttatttaaaatgggttttaggtcctctggtaaatcgtctgaatcgactgtttttttaggaatagcaacagtagctaattgttttgactgttgagattcaacgagtactttctcattataaatatactcagattttccaggagcaaaataatagatatgaccggcttcacggaagcgaactcctactacttctaccattttattcctcctaatctagttcaagtgaacgtcgcttcaatcggttaaggaacttgctgaaacaactaagttcctactatattatgaaactgaatgccacttggcacttttttcctttatgatttagggtgaatcatttggataactaattgttcacaaacattttgccaactaacattggcagtccatttttggcgtgctttcaaaattagcgccaaccgttccgcctgctcttccgttacttttttggcttgctgtgtcgcaacactttcttccaataattgacggtaataaaccatgagcaagtcaaagctaagcgcttgttgttctttttccttaaatactttgaccattttcttctgaacgtagataaatgcctgtaaatcattactttttagataattaaaccattgcaaaatgatttccctagcttcattaaaccattcatcttgagagatttcaactgctttctcaaaactatttgtcagttcagctaaaagggttgcagtcttttcaccaatcccctgtttgattaagcgatcaattaatgtttttttgactaatggttgaaaatgtaaggtttggcatcgtgattgaatcgttggtaaaattcgagaaagcgaagtggtttctaaaatagctaaaatttgtccttctggttcttctaaaaattttaagagactattagctgcgccggtactcattttatctgcttcttgaattaagaaaacttttttagcagtctcgaccccacttttagaaaactccgcttttaattcacggatttggttcactttgatggtttgcccatctggcgcaattcttaaaacatctggatgttcattttcattaatccgcacacaattatggcattcgttacaaggctgttgatttactaaattcgtacaaaagacatgtttcgccatccataagccaaattcttgttttccagttcctgtatctccttcaaaaagataagcatgggcaagacgaccatgctcaaaacttttttggagttgcttgtacagcaaaggttgcatttgctgtagctgttgtgcttcattcatcttaatattgatggaatccttcaactggtaagacgaagcaagtagcgccgcctacttcaacttccacaggataaggaatttggccatccattgtgatatctaaagtcacaggtgttgaaacatattgttttcttgattgacatgtttctttaattaaagctaatgtttcgtcgacacgttcatcatcaatcccaataataaatgtgctgtttcccgcttttaagaacccacctgttgaggataattttgtagcacgaatattggcatcaataaattcgttggctaatcggttactatctttgtcttgtacaatggctaaaataatcttcatggtctacaccttcctataattaaaagttttctggataacgttcaataatcgcctgatacgttgcttctacgacaagttctaaactcatccgtgcatcaatctttttgatacgttgtggattttcttctgctaatttcaaatattcatgacgaacmcgttgatgaaattctaatccttctgaatctaagcgatcaatttsctgtgttcgattttcttgaatccgccgtaagccagtatctgagtcaacgtctaaataaattgtaaaatctggtgagacaccttctgtcgcaaacgcattaattgaagcaatggn

SEQ ID NO: 245 - DNA, 1670 bp; double-stranded, linear
aatatttattttataggaggagaaagttatggggcatcaattgagcactcatttttttaacaagaaaacagggattatttcaacttttttaagtttgatacttttagtcggtgggttactgtttgcactacctgcatttgaagtacaagcagcatcaactgttacacctaaaacagtcatgtatgtagaagtaaataaccacgattttaacaatgtgggaaaatatactttagctggaaccaatcaacctgcttttgatatggggattatttttgcagccaatattaattatgatacggtcaataaaaaaccttacttatatctaaatgaacgggtccaacaaactttaaacgaagctgaaacacaaattcgtccagttcaagcacgcggcactaaagtcctattgtctattttaggcaaccatgaaggcgctggctttgctaacttcccaacttacgaaagtgcggatgcctttgcagctcaattagaacaagtcgttaatacgtatcatttagatggtattgattttgatgatgagtatgctgaatacggaaaaaatgggacgcctcaaccaaataattcttcgttcatttggttacttcaagccttaagaaatcgcttaggtaatgataaattaattactttttataatattggaccagcggctgcgaactcttcagctaatcctcaaatgarttctttaattgattatgcttggaacccttattatagtacctggaatccgccacaaattgcggggatgcctgcttctcgtttaagtgcttctgccgttgaaattggtgtcaatcaaaatctagctgcgcaatatgctaaacgtwcaaaagcggacaatatggtatttatctaatgtataacctcccaggaaaagattcatctgcgtatatctcggcggcgacacaagaactttatggtcgaaaaacgaactattcaccaactgttccaacaccttaatattatctcgtgtctacaagcgccaacatgtaaagagttaaaagccagcttactacaagctggctttttggtatcttgagcgaatagttttacacaaaaaaagacccgccctttgggtaaggacgggaaaggagttaaaaatgaaaaagtgttttgtgttgttaaggttgtttgttgatatgcttatatcttacaaactaaatgtgaagattttgtgatcatttcattcttattttgctacttttataggaattaaatagattgccacgagactatctttagttgcctcgtgcatccgttattctgactgctccttgtggtgatactctgaaaaaaccaacagtcccagtccctccatttgcagccatctgtttcgattgggctctaaaaaagaagtcatttccattcatacccaaaaatccaaggttcgtatcattattttctgcatcagtcagtgtctttctaatatatgtctctgctttttcttgtgtatcgatgatttttgcctcttcattttggtcttgattttcctcttcagaagaacgatagtaatactcttccgcaggataatttccactatcttgagtaattaacaatcgcggtttcgtcttatccgattggtcgccgttaggattttcaacaccaattttatataataatagcgcagcaccagtaggcccccacctaatacttaagct

SEQ ID NO: 246 - DNA, 1453 bp; double-stranded, linear
taccgaggtgtatcagcgattctagtaatccacaagttccactacagaatcagaatcttaaaaggtctggcggaagaaaaaacgctaaaagaaaaaatcccgtccttaaatcaaacaacgattaagaaagtcactgataatgagtataaacgcattcttgtgatggaagaaaaggctacaggaacgacctataaaagtattttgataaaaaaacaaaatcgcttaaaaattgtcaacgaaacaaccgatgaattgttatacaatggaaccctataagaacgaaaccattcaataaactcaaaagtatagccattgttttcaaagaaaaatttctttggaaacaatggtttttttattgacaaaagaatttctaggatatatagttagttacataagtagttaaccgtttaagcgaggtgtaaaaatggaatttaatttttcgggggaaaagcctttatttcagcaagtagccgatcagattgccgaagaatttttaatggcgcttacttagaaggcgaacaaattccctcaaccacagaaatatcaaaaagttatcaaatcaatccagccaccgttttaaaaggaatgaatttattagtagaacgacagttgattgaaaagaaacgggggattggcatgtttgttttaccaggcgctcaagagagagtaagaagtgcacggaaagaagaatttttaaataaagaagtcttagaagttgtcgcagaagctaaaaaattagggattacagctgaacaattaaaacaactaattgaaagagggtatgacgcatgagtttgcgggtggaatcagtaagtaaaaaatatcatcaaaaacaagcactagataatatttcaattacttttgaaaaagaaacgatttatgggctcttaggcagaaacggggctggtaaaagtacgttattaaatatcataaataatcgaagttttgccacttcaggttccgttaaattggcgggagaaacagtgaccgataatgaggctgctttgactcatatttacttaatgagtgaagataatttgtttcctcctcagttaaaaattaaagatatttttaaaacgactgaaggtttttatggatcctttgactggtctttagccgaacaaatgttaagcgattttgatttagatggtaaaaagacattcaaaaaattatcaactggttatcggagtattgctaaactaatagtggcgctatccgtcccctgtgagtatatttttttagatgagccagtcttaggtttagacgccaatcatcgggaattattttatacttatttaattgagacataccaagaacgtccccgtacgtttgtggatttctacccatttggattggaagaaattgcgaatttattagaagatattatcaycattgakcmagggaaaattgatccgcgcagaatctattgaaaccaatttgaaaaaccggtcgc

SEQ ID NO: 247 - DNA, 1820 bp; double-stranded, linear
taggagtgacaacaaatgacaattgattggacaaaagaagtcgaagcacgtaaagacgacttattagaagatttacaaaacttattacggatcaacagtgaacgtgatgatgcacaagcaacacctgaagcgccctttggacctgggccagttgctggcttaaaacacatgttagcgtatggtgaacgtgatggctttacggtgaaaaatgtcgacaattacgctggacacattgaatatggtgaaggcgacgaaacgttaggaatttttggtcatatggacgttgttcctgctggtgatggttgggaaacagatccttatgaaccagtcattaaagatggcaaaatttatgcacgtggtgcaagcgatgataaaggcccaagtatggctgcttattacgcaatgaaaattatcaaagaattaggcttacccgtgtctaaaaaaattcgtttcgtagtaggaagtgacgaagaaagcggctggggcgatatggattactatttccaacatgaagaagcgccagactttggtttctcaccagatgctgagttcccaattatcaatggggaaaaaggaaatgtgactattcgtttaactttccgaggcggtaacggcgctgattataaattagaaagcttcaaatctggcttacgtgaaaacatggttccgggaacagcagatgctgttgtaacggctgcttcagcagacgaagcggcttcactagctgctagctttgaaacattcatcaaacaagaagcaaaaatttcaggtaacgcagaactttcagataaaacagtgactttccatgtagttggtaaaggtgctcacggtgctagcccacaatctggaattaacgcagcgactttcttggcaactttcttaaatgattacagctttgcagaaggcgcatatagctttattaataccattgctgaatttatccatgaagatttttatggtgaaaaattaggcgtggcttttgaagacgaaaaaatgggtaaattgacaatgaacgctgggattgttaactttgatccagaaaaccctgaaaatagcttagtaacattaaacttccgctatccaaaaggaacttcagcagaagaattacaagcaaaagttcaaacaacagtcggtgaaacggtcactgcaacacaaggagatcgcaaccaagaaccgcattatgtaccagttgatgatccattggtggcaacgttactacaagtttacgaagaccatacaggcgaaaaaggccaagaacaaatcattggtggcggtacttatggccgcttattgaaacgtggtgttgcctatggcgcaatgttccctggctacacagacacaatgcaccaagccaacgaatttatggaattagatgacttattccgagcagctgctatttatgcagatgcgatttatcgtttagcgaagtaaagtaaaaaagcygttttcgattttcgaaaacagcttttttttgcaatttttgccttttaaaaacccaaaatcagaaccgtcaatttactgaaaatttcttgcaaatcaacggatcccacgatacgataaataggagaaaacgcaatgagtgaaacacttattgttaactatttaatcaaaggacgtgtgaagatgaacgtagaagaattagttcnaaaagcmaaagatttaattggagaaggcmacgtggaacatgcgcaacaattcattgaagaacataaagatgaattaggcgracactatcmtaaaattacmgcgatgttagctgatmcaacgaccgatggtttgtttgataaaattaaaggattgttcaatagttgaaaaaaatc

SEQ ID NO: 248 - DNA, 931 bp; double-stranded, linear
gacatttaattgaacaattagaacaacactatcacggaatgataatagtactttatacaaaaaattgtcaatcatacgcagcatccttaaatcaaaaaggcataaagacgatactttttgataagaaaactttgttgattacaacggcgatttcatacttgaagtcagcgccgttaatttttgtagataattattttccagaattggcaattttaaaaaaaaagcaagtagttatccaattatggcatgctaatgggggctttaaaaccagtttggctggggtgcttatcacacgaaacatagaagtagcaaggatcaaatcaggtttcaaaaagtttacgmtaaaatgaattattttatcgttaattcactaaaaatggaagcaatttttagaaacaattatcgtctcgagaatgctcaattttgtcattttggttcgccgcgtcttgcttatcttgaaaaattagaggtaggagaaacaaatcagaataataaagttttatatgcaccaacttaccgagagggaatgaatgaaatgatgcttgtgataaatcaagcaataaaggctttttctgctatgccaaattttcatttttatatgaaattacatccatcaatccagttagatgccattgaactaccgagaaatgtttctatttgggaaaagcatatttttgaaagctttagtgaaatagggctacttgattactgattattcgagtgtggtctttgaatacatgcatgttaaagagcaaccgaacatttatttttgtccagattagaaaatacgcattaaatcctggaatkgagcctgatttttttgaatatttaccaggaccgttagttgaaaatgaaaaacagtggatgtgggcatgtcaaattttccataaatagttataargakaatattactrgattaacgaggaatngg

SEQ ID NO: 249 - DNA, 1948 bp; double-stranded, linear
cctatgtaaataatgaaaatcccatattttccagaagggataaatgtgagttttgttgaaattcttggcaaaaatcaactatttgttcgaacgtatgaacgtggtgtaggttttacaagtgcttgtgggacagctatgtgcgcaagtagtttactttatacgttattgaaagatggtgttttttatgaagaaataaccgtcaaaaatactgggggtatggtgaaaacagtcgtccacgaaacgtcagatggcagttattggatggaattaattgggaatgccacgattacgcatttgattgaaggatcactgactgatttactaaatggtgcatttgagaaaataactatcactgaaacgaatgaacagaaacattatcaagaatttctgcaaacactttctcaaaaataacaattgttccttgataaagcgctcttttattttacaattgtgttaagttcttgttccaaaaaataaaaaatattgcttgaataagcaaactatgagaaaataaagggcatgaattaagaattattcttagataaacgaggaagtgtcttatgaaactatggaaaaaagtagtactgggcttcttgagcgtcttgctagtggcagtagctggggtatgtgcttacgggattaagatgtattcagatgccaattcaacaattaatgggatctatcaatcagttaaccgtaagtccaataaaggagccacggccaatattgatgcgcaagaaccattctctgttcttttaatggggattgacacaggcgatttaggtcgaacagaacaaggtcgttcagatactacaatggttgtaaccatcaacccgaaagaaaacaagtccacaatgatcagtttggatagagatattctaacagatattgttggaaatgacacacaagacaaattgaaccatgcctatgcatttggtggcgccgaaatggcgattaatacagtccaagaattactggatattcccatccatcactatgtatccatcaatatgaaagggttaaaagacctgattgatgcggtaggcggtattgaagtagataatacgattggtgaatttacgttggacggtattactgttccagcaggtaaaatcmagttagatggcacgacaggtttggcttatgcgcggatgctcacgaagatcctgaaggagatgtgggtcgtcaacgccgccaacgagaagttgttgagaaaattgtgcgcaaagtcatgagttttgacggtgtttcaaaatatcgaaaaattcttgatgctgttgaagccaatgtaaaaacagacttaacttgggatgacatgatggacatccaatcaaaatatttatctgcctttaaaacaattgactctgaacaattacaaggatacagtgcaaccattgatgatatttattatcaagtcctagatccaaatagcttatacaaaacacaaacaacactcagaaaacaacttggtttaaaagaacatgcttctgaacgtgaaaaagatttagccttttataatcagtttagctatgctgttacagatactgcactgattggtgaatctggtgattcaagtgccaatagctctactagttcgagtagcacagcggacaccacagccggacaaacagaatacaacggcaatacgcaacaagcagcagaaggaacctacgatccgaatacgtacgttgacccaaatgcgtacacagatccaaacgcttatgctgatccaaatacgtatgtggatcccaacgcaccacaatattaatctgttaaacaagctcgaaaacttctatttctgatgggaaatagaagtttttttcttttattctagaaatttttttcagaaggtgttataattggactataccanaataaaccgtaaggagcgtgtcaaaatgcaaattatccgtgtagcaaatgcagaagaaggcggcaaaaaagcgtt

SEQ ID NO: 250 - DNA, 4765 bp; double-stranded, linear
tcaagccagcaagtaaggaargargtgtrgatttccygtccygactttcctactatcgcataaaacttcccaagttcaaatttttgatttactcctgacaaaactttttctttagaatttgcataactatatgctacattctttatttctaatatatccattattttctcctaacttatttttgataagatttctttaggcttcttgattaacattaatgaagaagcaaatacaactgataaaacaataatacttattaatattaaataactttgtccaagcgttgttatatttgacataaaactactactatttattnaacttccaccggaaatcattgratcctctgagttaatgaatccatctacaattacttttagtaatacatttcctaaaaataaggaagatattatacttggtatcgayatgaatattaactcgaatataaattgcattataatttgtatcttagatgttccaatagataaaaatatacctatttcataaattctttcccttaaccatagaatcaagattaatgaaagaacaaccatcccaactaacataatagaataagtcattacttttattatatattttattccactcactgactctaaagactcttcaaacgcattagaatctttttcaacaaaatactttgactcatcaattttaagctctttcaatttgtttaaggctaagtctgtagattctgcactaccagaatacattaaaattttatttgcaatttcattattttctgaattgtttaatacctcttggcttgttgaataatctacaaacaccatattttcactaaaatcagaagataatcctgtatatgtttcctgttttttaccagaaaagatccctataattttaaatttatgactttttatttttccacttttttcaatatctagtaattcaagatcaacttcatcacctaattttagattgttttgtttagcaaattcttcatgaacaataattgaattcttatcattttcttctatattttcaccttctttaattgtaaatactccactactaaataaaatatttcttttagtattatttgtagcttcgagtgaaacaacattcttaaattcgtcagataaatcttctctatttattctttgttctccgctaactactttagcatcttttagttttgctaatccatcatattgaattattttttcttcaatttcttttaatttttcaatatctttaaattgattaacattaaaatatttaccatctttttttgttattgatattgaagaattagaactttcatataaagccttttctatttcattgcttgatttcattattgttaaacaagaatacaagcaagaaagaactatagttaatatgataaaaattattaaagttctatttttctttcttgtaatatatgctatagcattttttatcactttcctaactactcctctctattttcttactccataactaattgcatccactggacaagcatttttacatcgtccacatctgatacactccagatgattgcaattctcaactgaatctttattcatttggcaaacttttttacattttccacaattaatacacttatccttatccaatctatatctaaatattgaaatagggttaaaaattgagtaaatagctccaagtggacatatatatttacaaaaaggtctatatataattatagaaagtaacaaagtaactattagaatgattcctttccaataatacaagaaacctatcgtacttctcatacttttatttaataaaacaagtggtaatcctccttccagcataccaatcggacaaataagtttacaaaaatacggagaaccctgacctaaaatatcaaccaaaaataaaggtaatattaatgaaaaatacaagtaatattatatatttcaattttctcaaatgtttatcaaacttaaatgtttcaacttttttaaaaaagggaatcttgtgtagcaaatcttgaatcaatccaaatggacacagccatccacaaacaaatcttcccaccaatgctcctataaaaaacaaaatcccaactatataataaaataactaatcttatattttgaatttccaattactgcctgtagtgatcctattggacaagaaccttttgctcccgggcatgaataacaatttatacccggaacacaaattttctttaaattccccccgtagattttaccagtcttaaacccttcaaagtaagaattagtaattaaaaaccaaacggrttgaaataaatgcttaaaacgatctcttattttatatttatctttttttgtactaccatttataatatttttaattctatccaattccaatacactccatacaaattcttatcgccttatccmagacmacyttagtttctcccattactatcaacaaagaaagtctctggcatagcctgtataccattcaatctaccattaaagtttgtcttatctggcattaagaaaggatatgaagcctttgtcttttcatgtattaactttgacttttcaattgcttccttgttttcaccgttatcatcaacaggatctgtaacaactccaacgatatttacacccttgcttttcatttcattctgaacctcaaccaaatcaggaatttcctttacacaagctgtacaccaagttgcaaatacatttaccatagtaagatcatacttctcaaaatctttacttgtaaaatccttgccatttatgtcctttgttgatagtttacgtaaatctttaaccgattctttgttaaatgcttctgtattttctaaatcagttttttctgatagcacaaaaccatttttaggacgttcttttttatctataatttgaatctcagttctttttaattcatccagaagattactttcagctccgctatttgtgcttaaatagcaatcgtattttccatcacttgaaactcctattttagtatgagtatcacattttataattttagatttttttcttctgatgtatttttttcaaatataccaatagtcccaattctttcaagctcattttgccaatttttatatccatcgcccatcttttctataacgcatycttttggttcttctgtcattttttcaaatgtcaaaatagcatactttagttctttawcyataggacttngancatctaacancgctancttttatcagctatataatttctaaatttgtctgagagtttaaatttaagccctaaatattcataaacatattctttctttgcctccaatgtataatctgatggcttaaaagtttcatttttgccatttgcattaattgacatgccttcctcttcagaacttatggattgtccttcttttatttttacttttttgacacccaactgcgcttaagctcaaacataatgcaagtaataggcatgctcctcttggtactattttttcataaattattcctcctttattttttacacaatagcattttatagctactttcaataacattctacacaccttttatgaaacgttgatgaaatataattttttatttttccaaactatggtataacaatataagtattatgcttaaagttgttcttacacgattagtatatgatcgattaatatatgagcaagcacagtaagtgtacggacacttacgaaaaaaatgatgaggcagccctttgggatctgcttctttttttatcaatttttaacttgttagggtgtaccctaagaccccgaaatacattcaaaggaggattacctatagcaaatagaatacgaaatgaaaggcttgaaattaaattaacagaagaagaaaaggctctttttgaggagaaaagaaaacttgcgaaatgtaaaaatatgagccatttcatccgcaagtgtgttttagaaaaagaaatatattaagtggatttagagccgtttagagatttacagggtttcctttccaatgctaccagcaacataaatcagattgcaaagcgtgtgaattccaccggcataatctataaggacgatataaatgatatgaaaaagcagattgagtatttctcaaaagagttgtggcaaatacattctctgcttcttaacagaacttccggagtgttaaatgagagtgtaaaatattttgtgtaaatagaaaaaagaaagtcccttctgtagaatagagttaccacaacacattcacagaagagaggacttccctatgaacgattttactacagaaattctaaagactctagcgaacaaaggcgatttgaatgaattattccgtgtccatttggagaaagcagtcaatacgcttctcaaaacggagttaacggctttcctcgattacgaaaagtatgatcgcattggttttaacacgggtaattctcgtaacggctcctatgaccgtacggtcaagaccgagtatggggaacttcatctccagattccgcgcgaccgcaatggcgagttcaagcaacagactgttcctgcttatagacggacgaatgacacgttagaggagaccgtcattcacctcttccgaaaaggtattaccatgtcggaaatcgcagacttgattgagaaaatgtatgggcatcactacacgccccaaaccatgtccaatataacaaaatcatttacagaagaggtaacggcgtttaaagggcgggactttcatggaccgttatggcgctatttatttgggccncacgtttttcncgtaaaagggaaaancgccacgaag

SEQ ID NO: 251 - DNA, 4054 bp; double-stranded, linear
gtgtgtctaacggttctaatggtttataaacgaccgcatatttaatcccatattcttttaatttttctggagataaacgagcamtaatcgcatctttttgcatcaactctaaaacaggggtctgatttcctacttcaacattgatgtgcgcatagcgattataaataaatgtgtcttttccttttggatctaatggtttccaagcctctaagtcaggtgtaaaagcaacaccgttaaatgtatgcacacctaacattggcaaatagccatacatcaagcgttcgcccacccacaattggttggggtcttttttgttaatttcttccacttctaccgctaatttttkaccatagacagcagaaacgccacgagaaattggatttacaaaggctccagaaaccataatgattcctaataagacaaggacaaataacgtgcgccaacgtttaaataaagcaacaattaaaacggtagcgacaactaagacaccaatgatgtccattcgtgtaacgtataaccgtaaattgcccgtatataaaacaaagaaatacagaacaacatttaatcctagtgcccctaaccaggccatcattggaatttttgcttggcgattccataawtaatcgatgamccwtaaacttaacaacacagcggcaaacccgaagataacatcgcccgttgttctggcacataagaccacaatgtcaacttagcaaaaattgttggaaattgcacgctcatccaaactaagttaaataaacaatacacgaataagacaaaaccgtaaatgttttctttgatttttttataaaaaataaatggtgagagcggcaaaataacaaaaaataattgataaaaactactgatttccgaattattggaatatggaacatcttgaaacggcattttccaatttgttaaaaataacaaaatatcgcgtttaggcatatcgccacctaaacttacccgttttcctggataagcggtatccattactgcttttaaggaatccaatgagccatatagcgatccgccaacaataatcgccgtcatcaagagtgccccrcctatcaggaccccatcccacttatccaacttaatttttttacgaaattctaaaaagaataaaattaaaaataataaaatcaaataaccaagtggtacttgtaacgcaggataaataactaaaacaaatcctgaggccataataacagccgttatcgcacaaatgacacgacgtcgaacactactatgataatagaaataattataaattcccactaaaaaacctaagccaaaaaatactaaatctccaactggcgagacaaaccaccattgaagggccgaagaaaacggaatccaaacacttgctaacaaagctaaatatttattccgccgtgtgacgatcaagccaatttcaaaagaaaataaaattaagccaattaatttaagattccaataccatgataagccatattctttgcctaatagtacatagccccacgtaaaaggtttcgctaacgtggccaaattccacgctggtgaattatagcctaccaccatgtcttgcccatttaacgtaatcacatcattatgtgttttcaaacctgtttgtgtttgtgagaggctaaatggggtttgaacgagccattcatccgagcgaacacctcttggttcaccagcaattaatgaacttttttgaccatccgcatattcagaaacatacgcatcccacatgtttaatgaactaccatggactttaaaggcgaccagtaaaataaaaatgactgccgctagcagatagcgccasgtraacaaatgatcaaccaagcgagcactctgctcagcttggttgcgtaatggttgtttttcttttcttgtagttagttgttgttccatcttttcgctccatttcgtcatccgcaattgcatctagtcaattcgtaatgaaaagttgggaatatcccttgtcagattaggattataaaatggatcattttcaattaaaggtccccatttttcttccatcatcactttttcttgttcaaaacgttttttctttttgcctttatcatcatatccacgagtttgagattcaaaatgataaagctctgcttcatgaagccagacattgtcacgtcctaaagcttggactttcaagcataaatcaacatcattgaaagctacggtaaacgcttcttcaaaaccaccaactgcatcaaaatctgcttttttcataagtaagcatgcggcagttactgctgaataattaacattaatagctaaccgaccaaaatagcctaagtcaccatggggataaccataatgaccatgtccagcgacaccacctaatcctaaaataacgcctgcgtgttggaccgtattatttggatacaataatttcgcacctacacagccaatccgttcttgctgagcmaatgaaaccatcaaggttaaccaattctctgtaatcacttcggtatcattatttaaaaataataaatactctccgtgcgcttttttcgctgcacgattgttaatagttgagaaattgaatggaatatcgattgattcaacgaaaaagcgaccaggtaattgttgttcaaattctgcatataattcgtgcatttttggatctgtacttccattgtcagccataataatctcgtaattttggtaggttgttttttcaataatcgatgaaacacaacgttgtacgtctttatagccatttttagttggaataataattgagactaacttttcagattcaatgtcataataaacatcgtataagccattcgccgccccatgcgttgcatgaccattaattcctcgacgaacgagcgcatcttgcacggctcttagccccgcttcaaaagcataacctttggagccttgatccactgctgttgaggttggcagcatccgccaatagtaaagaacttttggaatatgtttgatgcgttcttttgtcgttttttcagtaaatcttaagactaaatcgtagtcttgagaaccttcgtaaccttttcgaaagccgccaatttcttctagaatactccgacgatacacgcctaaatgcgaaatgtaattcgttcctaaaagtaaatcaggtgaccaatctggtttaaaggctggatcagaacgatttccatccatgtcaatcttatcttcatcactataaattaaatccagttctgggttttcattcagcactttaaccacttcataaaaagcattgatcgctaattcatcatcgttgtctagtaaggcgacaaattctccggtagcaatcgctaaagcagagttggttgcttcggaaatatgaccattttgttcacgaaagacgacccgaattcgctcatccaattgctggtactctgttaaaatctttttgacattaggatctgttgaggcgtcatcggccatacataattcccagttagtatagacttgattcaaaatagaatcaatgcacaaccgaagccatttttcttcaacattatacactggcatcgcaatggaaattttaggctgataatgaaatgttgcgatttcttgcgtcatcgcttctatgtctagtacttcatttctagctaaccagttaggatacgaagcttgatttcttagtttctcaattttcgctcgttgaatggtatgagaaataccatttttagccatatacttaaatccttttttggcttttatccaaagacgagttactttatcttctgtccctggaatcactggatattttttattcaagggaaaatccaccgttataacatgtgctgatgattgaaaatgaaaagggagtacttttttttgtttaattccttcaagtgtaacaacaaagccagcttcaatcgcaggctctgtttgataaatttgattaacatcttcacgtaaaacgcgctgaatgttataagcggacacttggttttcattattaattgtgaaagttgggctttctttagtgattgtatctaacgcccaacctgtaatggttaaattatttgttgttttgtcgcgatagatactatcaaagatc

SEQ ID NO: 252 - DNA, 3074 bp; double-stranded, linear
agctcatagtttttcataaaagagttcatccgcttagcagtagctttagatacaccattaccagatttagtagtattatcaaacggcttttcgaataaatcctttgctgaagctttgatttcttttattcctgatttgctttttttaactgctttatcaataccttgaactagaggacccaataaaaaattatcctttgatgattcccataattcactaatttttttagagatatcgggccatttttcttgcagtttctttccaaatttacttccaaaaattgatcctgcagctgttcctaaaacgccaccaattagagtacctaacggaccaaatgttgtccctgctgctgcacccaattttgcgccagctaatgttgctgctttagcgcctaatgctccaccaacgatagaacctaacgaatcaccaattttttcaaacttattatttttattaatttgagttaaagttaaacctgccgaaatataagacaataaaggaaccgatttggcaaaccttctcactccgctaaaaagtttagtaccttttcctattttgccaacagatccaaccggtaaggattcctgtatatttggactagcagtagtatgcgttggtgcgctagctttttgagctgcagaatcaacatcttctaaagcctttcttgttttaaaagcttctctctgagcagtgttcccaagcttttctagtttaccaataatacctaaaattccctttgagactcccaagagcggttttcctactagcttaaaccctagcaaaccgccaataccatacgtggcccatttgccaacttgtttcatagcaacagggttttcatcagtaaattctttgagtatacgaatgcttggcttaataatatatttaaaccctttatccattacgttaaacatatttttagcaccttctgaaatgccaggtcctatagctttgcctacctttttagctgtaggaattatttcatcaacaaaataatcttttgcttgtccaaagtgtttcattacctgttttgctgttggctcaacttttgcgccaacattttctaacatatctggtatttcttcacctttttttacaaaatctgtcgctttgataattagtggcgtgaatattggtaacaaaccttgccctaacttcgccgatgtttcttttattgattctgtaaaaacacgggtggcatttgcagcttgatcacttgttcttgcaaaatcgccttgggagttcttagttttagacattacgtagttataacgtaagcgtactaattcttcctgacttagagaatctaattttgcttgttgaacctcttcacctttagattctgcttctgttaattttaactgcgcatctctagcttcaattgaattttcaccatgttttttaatggctttatttaaacgatcttgagctttttctcttgccatggcattctttgcagccttagaattatctactgacgactgcaacgctccactggccatcgcaaactgttccaagttggtttgagtcataacaatacccaaaccttttaacgcctcagtttcaccagtgaatacaccatttaatgcagtatttacacggtcaattcctatatttttaaatgaagcaagatctcctgccaagtcaactaatgaagtagacatttttgcagcttcttctgtgccaatacccattgaagttgacatatctccatatgtagctgctaagtctaacgctgtaccttgtgccaaaccaatattagtcagtgtggacttcgaccaatcttctacaactttattgtwatcaccaaaagctacttctactttgtttaaagcttcattagtatcagatgcatagtcaaaggccttttgcctgctcctgcgattgctgcaccagctatcattgcaccatttcttatctttgtaaaagcattccaagcaacatctgaagcctttgttgcaacagtacctatatggccaatacttgtttgtacacccttcgcagcttttccaactacttttagagatgttgcactagattgagcgaaaacactcgcagaatttttacttttawcaaactgatttccaacatcttttacttgtttttcagtttgtttagcagagttkgttgtcttttgcatagaatcttttgctcgatttccgaactggacaactttatctgtattttgktttaaacctycactatttctttttaaagaggttgtggcgccatctatggattttgctgaattttgataagtaccttccattcgtgcagctttagcaagaattttatcagtttcttcattggcacgctctaacgatctattatttattttccaatcgagttcgattactgaactacgtaacgcatctgccattattagatgacacctcctcttgatttagttagatttattttttgatatgctacttcgttccaaactgctagctcctctgccgtggcaatatcgacttcatctttagtggcaatgcctgctattacaggcagccacctaaacatatctttttgaacttctctttccgtaattctcggattagggctagttaagcattcgaccaagaaagttgtcggctaatgccataacctcacgatatccttcgtgttcatcccaatagtcccagttcaattttggtgtaacaataactgagtccataagttgagagtggtaagcaacgtcagaaaaagtatttgacggtccttttgagttatctaaaatcgcttgagctgcacgtgttccagggaattgaaatgtatattccacatcttcaacagtatgtttttcttgttttccgaacttattaaatggttttttttctgcttctggaatgttatttttcacttctaattcttttacttcatcytttttcgtcatgataaattcctcctaaagttaaataaaaagcacttaacgagatgttaagcgcytagttatattcgtgtttgtaatctaatgctttaatcgtataagaacgagtcggaacgcctttaccaaacgatccatcaggtgttttttcaatataggcttttgatgcccatgctttttcagttga

SEQ ID NO: 253 - DNA, 1828 bp; double-stranded, linear
cttgtgattgtagatgaaccgcagattcctacgaatccagtgcccttttatccttatgtaacgaatcctaatctcgtgctcttccggtttcacggacgtaatgcggctggctggttagccaatgatgcagagtggcgaaaaaaaagaaccctttatcattataatacgcaggaaatcgctgatttaagcgaagctgttttaaaaatgtcgcaagaagctaaagaagtgggcgtaatttttaataataattctggcggcgatgccgcagaaaacgctctacagatgcaaaaagtcttgaatttgagttacgatgatttgaatccaaaacaattagatttattttgagaaagaaggtagctgaatgtctgaaaagcaatccccttatgaaatggcttgtgcattccacgaggtttttaatccacaacaaccagagcaaccaactgctttttcgccagagctagccagtcgacgagcagagtttaaagtcgaagaacttgtagaatttttatatagtgctgctgataatgaccaagtgctttttcaacaattggtcaacggattaaaaaaatctgtcgataaagcagagcagaaagtcttggcgaaaggcaaaccagtatctgatcctttagtggaggaagtggatgcactagttgatttattgtattttacttatggttcgttttgcttaatgggcgtcaatccaacaaaaattattgaaatcgttcatcaagccaatatggggaaattatttccagatgggcagccacattatgatccagaaacaaataaagtattgaaacctgaaaattgggaacaagattttgcgccagaagctaaaattaaagcggaaattcaacgccaattgaaaattactgaaaccaatgaaaaagacgaatgagaaaactcattcgtctttttcattaatcatggaagaacgtccgatataaggctttgatggctttttcctcttgttcttttttgataccaaacataatacttacttccgaagatccttggttaatcatttctaagttgattttttctttgctaacgccattgtactttcagcagtaaccccaattcgttggcgcatgccttccccgacaatcataatcatagaaagatgatgcgtgatgcgtaactcatcaggcgctaaaacttcttggagttgagccatcagtcgattttcaatttcagttgttaactggtcttctcttaaaacaatcgtgatgtcatcaattcctgagggcatatgctcatagctcaaggctaatttttctagtacttctaagagccgtcgcccmaaacctaattctctattcattaaatacttactaatgtaaatacttgcgamcccttgatcactagcaattcctacaacaggagcatgcttcactttgcgagaggtggtaattagggtgccaggatgatgtgggttgttggtatttttgataacgactggaatatttgcgcgataggcaggcattaaggcttcgtcgtggaggacggcaaagcctgcataagctaactcccgcatttctctgtaggtcaattcttgaatcgtttgaggctgttcaataattccaggatgggcgacataaattccgtccacatcggtaaagttttcatacaaatctgcttgaacactgcggcaacaatggaccctgtgatatcggaaccgccacgagaaaaagtacaaatttcgccggcttctgtataaccaaagaaacctggaataaccaagatttgttgagtctcacgatagacactaattttctctaaagcttttggtaaaatgcgggcattgcctggctcaggtgtcactagg

SEQ ID NO: 254 - DNA, 1623 bp; double-stranded, linear
ggccgccacggttttggttgttcccgccattgttattttggctggtccgattttgattcgttgtagaaccgttattgttttgggtattgcggttttgattgtttgtatttgttngattgctacggttttgtgtgttgctttggccgtgacgattttggttgttgttgtttcttkgttgyccattcgtkgatkgattgtttggacgatttkggtwatttcttkgttcaccaggtttattgtycatkggttycttattggctggtttatttkgtgtkgttkgtkgcttttggttgtttgttgcttttgattgagtatttacggtacttcctcctccgaatgcttgacgaagctttgtttcttgctcggaactaattgcgcccatatggtttttaacatccatacctaattgatgcgctttatcgacaacgtctttgcttgctttattcatttcttttgctagttcataaattcttttttttcccatgcaatcaccttcctaaccttttagtaattccttgattttggtggcaaatcctgcatcagttactccgataaccattcgtggtcgcccaatcgcttggctgagctcgaattgactgaacagttcgctaacaggaacattataataagaacttttgtccttgattttctttctagtattctcactggcatcttgcgcaacaaacacaaatttcgctttgtttgcacgaatatctttaagggttaattcctcgcctgtgactaatttaccggcgcgcattgctaaacctaaaaggttcaaaattttggttttattttccatcgccaaacaactctttgcgggctttttgatgtgttacataatccaatagttcttgataaaattcatcacttaattttgtttctaagacacgatcaagaatttttttatcccaagctttttggacttccgcaggatccaaatcaacgtaagcgccacgtccaggtaatttaccagttggatctaaggccacctcgccttctttggagcgagtaattctgactaattcttttttcggtttcatttcgcctgaaacaaccgatttacgcattggaatttttctctttttcattttttcaccctccaaaaacgttattcttgttcaggtaattcttctgtaatttctgcttcaacaactgcttcttcagcagccaagttttcgtaatcatctgccgtcatatctgaatggataattgcttcatccatttcttctgccacttcggcaacttcttgattggcttgttgttcataaaattcagccatatcagattctgatttgatatcaattttatggcccgttaatttagcagctaagcgcgcattttgaccacgtttaccaattgctaatgacaattgataatcaggtacaacaactgtacatgctttgctawtttctggatcaaaaataacatctaatacttgagctggattcaaggcattactaatataaatagctggatcttcgttccattccacaatatccatattttcgccttttaattcattcacaatcgcttggacacgttggccttttggaccaacacaggtacccactgggtcaatattaggatctgttgaacgaacggctacttttgaacgatcgc

SEQ ID NO: 255 - DNA, 3601 bp; double-stranded, linear
atgcctgccggtcgactctagaggacccccgcatgaaccagacgtgacggctttgattcgtctaagtgatgtctatgaaattcctttagcgaccaatattggcagtgctgaaattcttttgagaggtgtcgaggcggggtttgcggacttccgtgaggttatccatgaaggggatcgtcgaccgttagctttttagagaaccttaatggttattttgactattttgtggtatattttatgaggacttttgtccaaataaaataacagagtaggagacaaagcgttaagtgctaaaaggatgggatgttgccttttggacgaagaacataaacagtgtgttgctagaaagcaaaggttcttactttgcttatcatcagaacaacacgttcagctttttaatgttcgcggttttgttttcgcattcgctgcatggttcgtcatgtagcagctcttagaggagatgctaaaaatgacaaagaaaaaatttggcacaaaatccattgcgttaatgggcgtactcattgcggtggtcgttgtcttttcacgcttttttgcgtatgaaacaacgtttttaaaaatcagtttcacgtttatcccagaatcattgattgggatgattttcggacctttttgggctggaatcggcacggcggtggctgatgtggtaggaatgttgctttttccaaaggcaggctattttcctgggtttactttaaatgcctttttggctggtgctatttatggttatttctattataagaaagaaatgacatggcaacgagtgattttggcgacattgttggtcaccgttttaattaatatcattttaactcctttgtggttaagtttaatgtatggcgtcaatctagcaaattttgcttggtgggtaccacgcttaattaaaacagttattttctttcctattcaagtaattgccacttattatttaggcaataaaattccctttaaacgtttatttggaaagccattatctgaattagatcaataaatttaaaattaaaagagtcacttttcatcatcccagaaaagtgactcttttttattgtgctttttgattaaactgtgcttcgtaaaggtcacgataataaccctgttctttttgcaataattcgtcatgggtgccaatttcaaccacttgaccattatccataactagaattttttcagcacttttgattgttgctaagcgatgggcaataacaaaactggtccggccagtcatcatttgtaaaaaagcatcctgaattttttgctcggtcaatgtatcaactgaactggtcgcttcatctaaaataagcatcggcggattactaatcatcgtgcgtgcaatagtcattaattgtcgttgtccttcagaaattttaacgccttgggaaccaatctcggtatctagtccttgaggtaaacgcatgacgaaatcaaaaatatgggcttttttcatggcttctataatttcttcgtcagaggcttcaggatttccgtacgttaaattttcccgaatggagctatcgaatagccaagtatcttggagaaccataccaaaactttttcgcaagctgtcccgagtaatttgagtaatgtcgtgagtatcaaccgtaatttggccacggtcgacctcgtaaaagcgcattaacaaattcactaatgttgatttacccgcaccagttcgcccaacaatggcaattgtttctcctggttcagcaattaaattaaagttttcgattaaaggtcgcgtcggcgtgtaagaaaaatcaacgtctttaaattcaacacggcctcgcgcttctttcaaaacaattgcgttcgaggcatcaggacgttcaactggttgatccatcatatcaaaggtacgttccaatccagctaaggcggcttggatttggttggtgattcctgagagttcaataaaaggtttagaaaattgactagagtaaatggtgaaactggaaataacaccaactgtgactaaaggattgccacttaaaactaacaagccaccgactaatccaatcgataaataagataaatggtcgataaatcgagaaagtgggttggttaaggaggaagaaaactgagccttctgtcctttttcatacaacgtttgattcaatgcttcaaatgtttcttgcgtagcttgttcttgttgaaaggctttaacaattttttggttgccaaccatttctgaaacgaaaccggaaatttcaccaacaatcgtttgttgtgcagcaaagtttttttgtgaagcttttgcaacaagccagtttacaataaaaataatcggcgtactgataagaaccactaatgtgagcaggggacttagccgaatcataaagagcaaagcaacaacgacggtggccatgccagaaaataattggttgaagacagccgagcaagccattgaaatattgtcaatatcgttggtaaagcgactgacgatatttccgtgtgacgtttggtcataataacttaacggtaattgatttaaatgggcaaaggcatcttttctcagctgtgtggtcgataaataagacacgcgattaccgagacgttgaatcagccattgacttagaacggttacgagtaaaatccctgctaataaacctaaaattttgatgagttgcgcancatttgacttgtcctttacccaccattgtatcaacggatttacctatataataagtcatgaggacagtcgaaaaaccactgagaattcctaggattaaggcgccaataatttcttttggatagcgtagtaaatacggcttaaaacgtgagaaggcaccaaaatgaatttttttagtttgcatgggtatcctcctcctgtgacgcaacgatttcttgatactctttagaagaagtaagtaattcttcgtgggtgccaaggccagcgacttttccactatctaggactaaaatttgattcgccgttgcaatcgaactcacgcgttgtgaaattaaaataacggttgtctctgctcgttctttttgtaaagcacgacgcagattcaaatctgtttgatagtcgagggcactcaaggaatcatctaaaataagtaaatgcggtttcctaatcaaggcacgggcaatggtcaaccgttgtctttgtccaccagaaaagttttttccgccttcgttaacaggcgtgtctaacccttggtctaattgttcaacaaattctttacattgggcgatagctaatgcttcccaacagtcttcatcagttgcatttggtttgccccattgtaagttttctcgaatagtccctgtaaataagacggcagtttgtggaacacttgcaacttgttggcgtaaagtaaagagcggccaatcgcgcacatttacaccattaataaaaaggtttcctgcactcacatcataaaatctgggaatgagttgggttaaggtacttttcccgctgccggtaggtcctgtgatgccgagaattgagcctttaggaatcgtaaaattgatattttccaaagccaaaccggcctctggttcatagcgaaaatctacatggtcaaaggtaatatcaccaaattgtggagatgtttttgctgattctggtgtatctgttaac

SEQ ID NO: 256 - DNA, 9589 bp; double-stranded, linear
ggatgattttcaagaggagaatcctcaattagtcttgatggatattaatttacctgtttacgatgggtactattggtgtcaaaaaattcgtgaagtttctaaagtaccaattatttttatttcgagtcgtagtaccaatatggatatgattatggcgatgaacatgggcgcggatgattttgtcacaaaaccgttccagatagatgttttaattgctaaaatcaatgctttgttgcgccgctcttataactattccgatacggatagtgaagtgctttcacataatggcattactttaaatgtggacaatggacgaatggaaatcagaggtgaaatgatcgatttaagtaaaaatgaataccgattactgtatcttttaatgaaaaagcacggaaaaattttaacacgtgaaaaactattgcgcgctttatgggacgatgaacgttttgtggatgacaatacgctgacggtaaatatcaatcgtttacgaaaaaaaattgagcaagcagggattgctggctatattgaaaccaaagtgggcgtcggttatatggtgccctagataggagtagacaatgaccattctaaagtatttaaaagatcgctggttattactaattggttggttattttttctgttcttaacttgttttattttatggttggctcctaatgtccgcttagattggacagtggttggctatatctttttactgcaaagtgtttttttatcgctatttttaacaattgattattatttaaaacgtaagtggtggctttcgttggcaacggaaaaagagccgccttctttacaagaatatttgaatacagcagaaaaagaagaagaactacttgtccaaacgtatattaacggtttattgcaagagcaccaacaaaccatgcagcaagcaattaacaaccaacaggaccaaaaagattacattgactcttgggttcatgaaatcaaagtccccctagcggctatcacgttactggtacaatctgtcgaagatgatattccagagaaaaaatattatctattggaaaatgagttaggtaaaattgatgaatatgtcgagcaagtcctatattatgctagactggacagcttttctcgagattatttactccaagaatattctttaaaagaaattgtgcaatctgttgttcgtacgcaagcaaattattttatccaaaaaagattgcaattctcaattgaaggggaagatgaagcggttttaaccgaccgaaaatgggtcatttttattttccgccaattattaagtaatgcagtcaagtatacgccagaaggcggcacgattacggtcctaatttccaaaaataaacaaggtatttatttatctttaaaagattctgggattggcattccgacacaagatcaacgacgcattttcgataaaggatttactggtgaaaacgggcgaaaaagcgaacagcattcgactggtattggtctgtatttggctcatagcttagcgaaaaagttaggtcatgatttaacagtcgaatcgacagaagggcaaggtacgacgatgacattgtttttcccttccctcagttattataatgaagtgaaataaaaagtaggtctatcagcaaactaaagaggtgataggcctttttttatttattaaaactttcttgctaacttctcttactcttcttagttgtttagaaaacgtttttattgttagaatgaaatgaaataaatttgttaggagaatattatgagtttacttatcgctttagtgcccatgattgcgtggggcagtattggtttagtcagcggtaaaattggtggaagcgccaatcaacaaacgttaggtatgacaatcggcgcattactattttcaattgttgtcttttttgtcatccagcytacgttgacgacagccacattaattgttggatttatatctggtttattctggagtttgggacagaatcaacaatttcatagcatgaaatatatgggcgtttcagttggcttaccaatttcaactgggatgcagttagttgttaataccgttgcaggggctgtttttttccatgaatggacaaaaacaaaagactttgttgtgggctttatcgctttggcctttttagtttttggggtgtatttaacagctcgacaagatgatgatagtcaaccgaaaacctcaaacagtatgttagattttaataaagggattcgggcgttgattttctcaacagttgggtatggcgtctataccatcattattaatgccactggtttagatccgtggggaattattttgccacaaagtattggtatgttagtgggggctagtttctttgccttcaaaaaagtcaaagttgatcgttttgtttggatgaatatgacgacgggtctgctttggggcttaggaaatatttgtatgttattaacaatgcgtgaaattggcttagctattagcttctctttatcacaaatggggattattatttcgactcttgggggcatcttccttttaggcgaaagaaaatcaaaaaaagaaatgttttatgttatttntggttgcatttttgttattctaggtggtattcttttagggtatatgaaagcgtaaatagtttatttacgcttattttttttacgggggtaaacacatgtctattttcagaaaaaaagaaatcactgtgcctgtcaatgacagtggtgggatgaaaaaaaatcttaagacgatggacttaatttttctaggaattggggctgtagtaggaacagggatttttgttgtgacaggtgtcgcagcggaacgctatgcaggtccagggctcgtcttatcatttctggtagcagcagccgcgattattttatctggtttatgctatgcagaatttgcatcacgtattccggtcattggtgggccgtatgcctacatgtatgtggtctttggagaaattgtggcttggatgactggttggatgattatttgtgagtttttcttggcggtttcatccgttgcttcaggttggtcaggctatgtccatggctttttggatagcttaggtttttctttgccgcaagcgttaagtggcgcttataatccaacaaatggtacatatattgatttgattgccatgttggtcgttgtagccgtaactttttgggtatctttagaagcgaaaacagcgttacgtttaaataacttaatggttttcgtgaagtttgggattattttattatttgttctcgtgggaatcttttatgtgaaaccaacgaactggcaaccatttattccttatggtttttcaggcgttttcagtggtgctgctttagttttctttgcctttctagggtttgatgcggtcagcatggccgcggaggaagtgaagaatccgaaaaaagatattccaaaagggattattggttccattattatttcaacattgttatatattgttgttacgttagttttaactgggattgttccatttacggatttaggggtcaaggatccggtggcttttgcgatgcgcttcattaatcatggcgcaattgcgacaatcatttcagttggtgctattttaaccttattaacagtgacgattgcgatgatgtacagtttagcccgtgtgatttatgcgattagtaaagatggattattgccgcagtttatgagcaaaatcgatgagaagcggcacacacctaagaatgcaacctatgtagctggatttttagcaatggtttttgctgggattgttccaatggagatgttggctgaacttacaaatatcgtgacactcttttatctgatgtttctcgctttaggaattatcaaattacggacaatgaaagagaaccgcaagcagtgratttaaagtaccactgtgccggttctaccattaatttcaatcgtggtttgcgccgctctgatgttccaattgtctttagctacttggcaagtatttggcgtagcgtagtgattggtttggctatttatttcttttatggacgtcaccatagtatcgttcgtttcgagacaaaagaataaaaatgaacgaaaaaagagaggaatacttgtcaaatagacaggtgtttctctcttttctttctggcattttcttcattttcaagagaaaaccgacaagaaatatagtttaataatgtctaattatggtatactgtttaggagtaaatcctgagggtttaggaaaatgactaaaggaggttttttctgtatgtcacagaaagaaacattttatattaccaccccaatttattacccaagtgggaagttacatattgggaattcatatacaacaatcgcctgcgatgcaatggcccgttacaagcgtttaatgggttttgatgtattttatttaacaggtgtggatgaacacggccaaaaaattgaaaaaaaagctgctgagttgaatgtgacaccaaaagagtacgttgataaaatggcagcagatgttcaaaaattatggaaaacattagatatcagctatgataaatttattcggacaacggatgattatcacatggcagccgtgcaacaaatttttgatcgtttagtagaacaaggagatatctaccttggagaatatgaaggttggtattcagtttctgatgaagaatttttcactgaaacacaattagctgaagtatatcgtgacgatgaaggcaatgtcattggtgggaaagcaccaagtggtcacgaagtcgaattagttaaagaagaatcctatttcttccgcatgagtaaatatgcggatcgcttggnacaatattacgaagaacatccagaatttattcaaccagaatctcgtaaaaatgagatgctaaataacttcatcaaaccaggattggaagatttagccgtttcaagaacgactttctcttggggaattccattaaaaaatgatccaaaacatgtggtttacgtatggattgatgcgttatcaaactatattacagcactaggttatggctcagaagatgattcattattccaaaaatattggcctgcgaacgtgcaaatggttgggaaagaaatcgtgcgtttccatacgatttattggccaattatgttaatggccttggatttaccattaccgaaaaaagtctttggacatggttggttattgatgaaagacggaaaaatgtctaaatctaaaggaaatgttgtttaccctgaaatgttagtagaacgctacggtctagatgcgttacgttattatttattacgagcaattccatttggtagtgatggcgtctttacaccagaagatttcgtttctcgcttaaattatgatttagctaatgacttaggaaacttgttgaatcgaacaattgcgatgattaataaatattgtgatggcaaagtaccagcctatgcttcaaaagttaccccatttgatagtgaactatcgacaactgcggcgaatgttattggaaaatatcatgaagcaatggaaaaaatggaatttaacacggccattgcagaaatctggacgctagtttctcgtgccaataaatatattgatgaaacagcgccttgggtattggctaaagaagaagagaaacgcaacgaattagaaagtgtcatgatccatttagcggaaagcttacgaattgtggcaatcttattgcaaccagtcatgacagaaacaccagggaaaattttcgaacaattaggcttagatccagaaacaatgaacatggaaaatattcattttggtgagttcccaacagacgtaacagtaacaagtaaaggaacacctattttcccacgtttagaaattgaaacagaagtaacgtatattcaaaagaaaatgtcccaaagcgaaagtgctacagaagaggatattaaatggaatccagaagaaacaacgttggtttcaacgaaagaaaaacaaattaagtacgatgatttcgataaagtggaattaaaagttgccgaagttattgactgtaaaaaagtcaaaggagcagataaattattgcaattccgtttagatgctggagatgaaaaccatcgtcaaattctttcaggtattgctgaattttatccagatccagctgcgctaattggcaaaaaagtagtcattgtggctaacttaaaaccaagaaaaatgcgtggtcaaattagccaaggaatgattctttcagctgaatcaccagaagggaaacttcaaattgttgaagcaccaaaagaaatgccaaatggtgcaggaatcgcataaaagcataagtggtaaagataaaaggtgaattgtaaccttttatctttactactttttttgtatactagaagaaaagtgatttgatgtgggggaagtttgatggcttatcataaatttaaatttatgagcmacgaaaaaatgaycctaaatggcgtccgtattatttagaagctatgagagtaagggaacaagcacggctaacagtacaacgtagaaaaagaagggcaagaattagaacctttttagtggttgcgatactggttattttagtttttctgttattggctcattggacatattcacaaacaaatgaactctctttctccagttttatcgacgtcctaaaatcgaaaatcaacgaatttttaaattaaaagaatcgaagaaaagcctagaaaaaatcatttgcgatttttcctaggcttttctattttagatttcacttttttaggtattcgtkttttaccaaaacggcctttcgttaggcgacttggtaaaatgatcagtaagagtgaaaaagggacactgataatttgccacgtgagtaaacggcctaagctattatttttatagagccactctaatataaaatgcagccctaaaatacttaacaaagccaagcctgtcaggaaataaggcgttgatacccagttggtcgttttcaagagactaaaacctaaaggaactagataaaagtaagcacttgttaaagtaatacgccaacttttcataacggtgcctaaattaattataaaaaaaagtaaagataggactaaagcgaaaggtggaaacaaagccactaacgccgaatagatggttccccagacgagcattaagggacctttaacaatagcggcaataagtgtaaacaagccaattaggagtaactgctgtgtcagtgagccaaaggttagcaagccaaataaaataagcagtagccagtgccaaatggtttggttttgttgttttcgctcaatagttacatttttttggatagaggttttaaaaaaattttctaaatcaggtgattgtttcaccttctcacgctcctctcaacttaagagacaacaaacgagtaggtctgctaattaaaaagcagtgcctactcgtctattataagtggtttttctaaaaataaaatccgccttaagtctcagttactgggctgccaagtaaggtgtaaaccattcggaaagtgtgccggtataaggtaaaacgacccgtttcattccacgagaaatagcagtatacmggatttttttatctcgtttattgtcggaataacgattaacatttgggttatgaagaattacattatcaaattctagaccttttgccatatcaattgataaaacttgcagtgacggatgctcttccaatgaaagagaagcacagagttcttttgttaattgttctttttctgcaaaagttttagtaataatggcggtgctttctttcgaatcaaaggttgtaatggaagtgacgattgctttaagatagtcagacgcagagtcacaaggaataaatgtcggcttttctccatcatgccggatgggcacaatggttaattgctctggttgagtgcctaatgtttggaagagtcgtgtaatttctttacttgaacgatagctgtttaataattgataggttccaacagaacggctggtttcgttaaccaataaatcatgggcttcagaaaattcaatggctgtattaaaaatggcttgattttcatcaccagctaaagtaaaactagctttagggaaaagtgtcagcagtaataataattgggcttctgtataatcttggacttcatcgactaggataaaagccatttgctggttggcgaggttttcaataaatgcatgtttcaccaaaataagggccacaatttcatcggctgtgaaaacagctgtctctttttgatacgatttttcagtgaataaagaataaaacgtttcaaaaaaggcccattgatctagccaagcatcatttttaatagcggcagtgatagagcgatattttttcttcaaacgttttaaagcaaaatcagccagatgtttttcattatcttcggtaatcactgtgccaaaataacgaacttgttcagcctctgttaaatcttggaattgatccaacatttttttagaatgggcttgttttaataagtaccgtgtccaaagactggttaatttttcttttgtggctgaaattcgtkggcgantactcargtcagctggtgkytcytgataaagtttaaaaatgtttctgaagtaaataaggtctgcttyttaaaagttaaaggmcggawaaaatgtggctgcacaaccgctttttcaggattgcttaaaagaaacgttgcaaattcttttgaacgaataacgtgctcttgctccgttgcctcagagcgagtaatgcgttcgaaatagtccgtttcttcttccattggccatgattctttggtagtgaagcgcaaaaattgtaaaagagtcaaattcaagggatttcgttcgcctaaattcggtaaaacttgagaaatataatcaataaatgttgaatttggtgaaagtaataaaatattatccgctgtaatttctgctcgatgttgataaagtaaataagcaatccgttgcataatcgcagacgttttcccactaccagcaatcccgttgactagtaggagtggctgcgtttcgtcacgaattatttgattttgttcttgttgaatggttgtcgtaatgtccttcatataaggagaagcatcttcttctaaagaatgcaataacacatcatcttgaatcgcaatggttgtgtcaaaatagttgattaattgatctttttcaataattaactgtcttttcaaatcaagttgtacaggaatggtttgttgatgtgccgtgtaggctgttttccctaaaacattgtcataaaataacgaagcaatcggtgagcgccaatcgtgaatgcgcgtttcttcttctaaagaagtaaaatcgtttacgccaatataaaagttttctggctcttcagggctgtcttcaaaagtcacgccaattttgccaaaataaggaacttgtaataggcgtttcactttgtctaaatttttagccgttgcttcattttttaagttccactgatcaatttcacggttcttcatttccaacatggcaaacgtttctagattatcggcataactatcaaaattcagcttagaatcgcgaccaaattcctctagcatatgtttgccatctttcattgtgttcgccaattgctcttcgtaaacttttttagtycgttgcagctcatgataaaccgttgttaaatgctgttgttcataaattttttcatcggt

SEQ ID NO: 257 - DNA, 7992 bp; double-stranded, linear
ggtccttatcacctttaccttccaaataaatcaaaatagcgtacgcawawcttggtcgacgttgttcagtaacttcaaacagttcktctktcaaattttttaatacgtcgatctgctcattaaccccgattgaaatcattagtatctattaaaccgttatccatttcagattgccttttttcaaccaatgtttttaaatgtagttctatagaagctgtttgaaccatgcttctaattaaatcttctgctaacccttcactagcttgtttattttctgccattgtagctaccccctaatttctatgtgaaaacttgaaaaattctgcaacagttgctttaaacactccattgccatatatttttatttcttttaacccactcgacaaaataacgttttgttgccatggctgtaaatgtggcaatatacctaaaagattataatgcaataatccatcgtcacttttaggaaagacaccattaccatctatccaatttgatggatactctagttttattgcatctgtgatatccactccactgatttccaatcggaattcggtggctgttgaaggaaaagtttgaatgccagcactcagactgtgactatgaggatttggatttaattcatgagtatgtggatttgggcttaatgaatggctatggttatttggtggaatattcgtgctacctatttctaatctggtattggttaattttaatgatgcatttgtagtttctccacctttaacaggcatctcaaatccagaaatacgaatttgaagctccataacttcgtgatatacaaggtccttacttacaggcaaataaacaatggctggtgtatttgaatccccttgagcagtatattcttgaccatagatttcagtgacctgatgtctacgttgcatcgtatcttgtcgattttgtttacgattgttttgagttctttctgctactttaatcaatgcatcatcataattcatcatcgttcatctgccttccgctcaattgataaatttttactcaaagtcagtctatttgtttctaatcctgtttcatcaaaattgtaatcaattttcaaaatatagtaccaatcactcatcttcatgatttctttttgataatcagaacatccttctgttattaatttattgttatcatatagcaaacgaatttgatctccgacattaatgtcagacggtaatycagttgttgtgatatcaatgtagtattttcttcttgcttgttttaatcttttaaccgctgtttcatatgcagttctagttgctttatttctatcttcatcactaatttttttatcatttactgcaaatggtgctaaatcattaaacgaataactcgcttcaatagatatattactttcatctcttacactttgttcatcaattactgtgtattcaacattattattagaagcaatctttgcaagattgatataatcataaccacgttcgttattgataccttttcgaagaacacgaactggaaatccttttatctgtgtatgtggttctaaataaacttcacgcaaactcatactagacataccactatctgatttttctccatatacagtagccatatttattacttgatcaaactgatagtcaattttaggttcgctaattaaacgatatggcgcatttctaacggatgatatctgaacaggtttagtttctccaaaagttccaaattctaattttctaccaaaattaaaaccaactctccaccaaatatcatctgttaattcacatgtttttgttaatgcctcaagtttgttttgtctactatatacatagtctattcttttttgagaagagttttgtaaataatctaaatgccatttatttgaatatcgaaaatcaagagtactaaaaatatcattaattgttctattcttacatgctaaattggtggatacttgtcggaattcccattcgctgattatatgatcaagttgtatagttattgtttcaaattccttatcgacatcataatcacttgtaatcccatgaaaaactttattgttaatatatattttcacttcttctcgacctttaaaatattcacgataagtgattggcaaaacgagtgaagttgtaggcacatacatcaactcattactccaagataatgtatttaaaatcttattacctcttgcaacaagttttcctttttcaaagatttcgaagaaaaattttctattatcttcagcgtaattatctactggggcattttcaactggttcaaacattaaaaggttgtcaaaatacaactcctctttttcttgcccgtcagttcgaatacctttgataaatatcgcttcatttgctttcagcgtaaacgataattcaaatcctgacttttcgacatcttcarcattaggatatttttcttttatatcattacgaatttttataggaatgttattgaattggtaaattaatttcgctgtttcagcattatagatttctatattttccattggtaagtcactcgaaaaatgccaaccttttacaaaaacttttccatttttaatacctaattgatcaatttcaccaacatttcgtaatttttccttagtattttctggagttggatcatcataatccccttctttataattcagtaagaagtcgaaccatttttttgcagctgttatacgtgcttgtgttttctcaactcctgcacgttcaaagtttttcagaaatgctattgttaattgatcgacatttgtacccttaataaaatcttttgcatcagtcggactaacaactccaatccattgaccatgaaacataccatagtgaattaatttagcttgtgttgacgccattttataatcaccatcaatgcccgcttctctaagtaaacgttgaacataattcgctccgctttcccatgcattcggacttgtccactgaactactccatatccaccaccgccgccaatttcagaaatatcggggcgcattccacattcaacatcagcattaccacatatagcagcaatagcttgtattgtgtagccttcttttgaaagcacatttctaatatctacagcaacttgttgctctttacttaaaacacgttttggtggaggggtgggattatttccgccatcattttttggatctgtataaataacacttggcattccaccattattttttaaaataaactgataattatctatggaaattccgttagctccgtaattacaatgaatcactgacgaactgtcaataaacatgccagtgtgtcctcctgcaccatcgctagctccacgaacaccccaaataaatatatctccacgtttgggattcggcgtctgtttccaaccaatactttctaatgatccaaacaaggtttctgtattgcccattgtaccacttggcaaaaaaccgcctgcgatcaatgataagtaaactgcgcttgagcagtcgtaactattcgggccaagacgagcactcatagagtaaacaacttttccctttctcgcttcaaaccactgaattgatgcatcatgactaggcattaattaccaccttcctttggcctttcctaatgattattaaatataacgaggtggtttaggtttcccattatttttaaattcaatttgtaaattggctctatcatcagcaacagggccatcattgaagaattctaaaaattgtaaccaaccactagaactagaaatccccacatttccattattatttaattttagtgttttattaatattgtcattaaaggatttagtagtatcatgtgattttgtatatatctcttgttctccagcacgagttaaataaaggtgtaaagtaaatggtactgacctaatgttatttgttttatatgataaattttggattactacatcacgaacttgccaatcaaagctagcatttgatgatggtctcattccaaaattaacagtccctcttatttctccttctcctaaatattgggtctgttcagcgtctccccaatctttccatctaaaaatgaaatcaccattacctcgattaattgaaacactcatcccttttgttgattcttgaatcccatatctagtgttaatttcccaattctgtgaagctatattatcgatatcatcttccatttttgcaatttttttccaaattttttcaatctgttcttcaatccaatgaatctttttccaaattccacaaattgcacaaattgtcatcttctgtagattataaagtgtagatactaatttttttaaatatcctttccaatcacaatcatcatgaatatcgagagcactgtcggctctacctagtaaacaatcatttaaatcatgcatatcttgacaatcgtttttcttgccattaaatcctttatcatcacctaagctagcacattctttgtcgccaatttcaaaacaacagtcaacatctatgcccctattctttaagtccttacaagatttgcaatttttagacatgtaaatcatcctttctagtacgtaattttatcctctttgataaatacacaaactggctcacagcaatcgtttgtttctactagtaagctgttgtacccatgctttatggaccatccaaaagtgttacaattcatcaattcaagattttcaatcggtaacttatcaaaatcgcagcagtcatcttcacgatagaaaacatctccatttgattcaataagtaactctccatcgtatataccttttaaacgcattgcgttaccatttaaatgaataactggatcttctactctgccaataatagtcattgtgaatacatcagtctccaaaacggtattactataaaactttccagcaacatagttattgcaaagctctttcttacaaattttcgttccgagcatcttattatatccccatagatgacgacctttattacagttataaattatttgataaccaccactacaatatttccagtaatctttttctatatctttttgtttaacacacagactgtcttccttagtaagaaaatcacattcacaagaacatttttgacaatctttatgtttaatattatttttttgacaactaatacagcatccgtagatatcgtcctgacaagtgtctatttcttcaaattctagacaatcagcgaaagaacacgcatcgtaaggtttcaaaaatgttttcttttcatctgcatagtgccaaattccttcatataatataaagttcaaatcgacagaaaaagtgtttttttcaatgctgtaaggttctgaaaaactttctacaaaagcatatgtccaaattattcgacgattttcaattgcccatagcttaccaatcttagaaagctcactatataagaattctttataaaactgtttttggtccatagaaaacatagaataatttatctttagtgttaatgctaacttttgttcagttgaatactgttgtatttgttttgcattagtataactaccatgaccaaaactaaatgcttgagtggtagttttgaatcctccactcaaatctgcatcttgaatcatatcgtatgcaccaattacaacatctctgaattgtaagtaccttttttgaggataaattgttctgcaatcatacatcaatttacactcctctcaaaaatctatttgcacgcaaattggcaaaattaggatttccagtcatactaatattttggttaattgtattattgttatttcttgtattttttgtcgtattataatatctattcattacatttgagacaggttgactatttccaaatcgattagtgatactagctagtgctccacttagatctaagttattgatccgttccataaagtcaattccgaaatgatctactgcttttttacgttgaacatattctccagcagttaacattgctggaacacgatctgtacctttggatttaaaaatatgtttcataatgcttccaccgtttgctcgatactgaggtataatgcctccatttgcacgtgtaactcttcgagtcttcacattttctgttacatcaacagtaagactaggcgctgttaatgaatttagattggtttgaatagaagaaattttgttattaatagatgtaacataactatcaatattactatctaaaccttgtagtgcatttgtaaatcctgatttcagactatccccaaatcctttaccaacattattaaactcggtatctttatttcttaaattagttattaaatcatcaataacttttttgattttagaaggaacatcagcatttttgaatccattaataacttgctgtccatatgatttcccaattggttcaaatttagattctagaccttgtaacgtaataagtaagtttttaaaagattcgactagctcgggtatactatccagtccttttgcacttggaaatgtgttcattagttcaatgattgatttcattcggttaacgttgtttaatacactcgtccaatcaaatggtaatgcgtttaatacacttaatttatttgatatcgttcctaacttactaacagatgaaacaatcatacctaacgtttcgctgcttataacgccttcagatatcccttgccacttactaatggccatctctgttgcgacatatttaatactttttatattattactcaattcatcaacacccaatgttaattgaggaatctgattaattctatttgctaatgttatcagtctataactgtagtgtcgattttatcaatgacatcttcaccaatcatcgtgtttgaatcaggaaaagtatctatcgttaacctattaataacacctttaacagcggtaattgttgmatggactttatcattttctagtgtgatactagctaatccattaactctatttgctcaattgtataaagtttatcaaaactaaatccaaagcttttataaagtcagctttgactattccttcattgtaatctcgccaagagctagcctgaaacattcttaatgcccctttggtacttgcaatagtggaatttattttgtcagtttcgatatttattcccgaaagacctgttaaacgatttgctactttagtgacccataatacagctacatctaatccgctaagcatttccctatcaacaaatccatcattaaaatcactccatgaatcgrttcttaacatttcgaataganccntttggatatttggaataacagatggtgccttactgnttcctaatggtaaancgaaagttcatttaatttactgcccactttattcaaccagtaaattgatgtgtctaactggtccawtaatcttttaccaacaattccttcattaaaatcggtccaactatctgcttgcaataatcttaaagcacctttgatatttgctattattccttgtaacttgccaccatcaaattcaaaattagaaagtgttccaaattttttagctatactacttaaccaataaactgcagtgtctagtttatctaatgttccacgttcaactattcccccatcgaagtcgccccaagatttaatttgcaacatacgtaatgaggattttagatttgctatcatggtttgagtttttcctaagtcaaaagaagtttctgatagtttagacagctttttgttaatgctattcaaaccatccacactttggcccgtcatatctataaaatcttttggcacaactccaccaatgaaatcactccaactttcattagttagcatacgtaatgcacctttaatattttgtagtacattttgcactgaacccgtttctaacttactttctgataatgctgctaactttttgcttaatttatttaaccagaatatagtagtatctgcttgatcaataattttagatgaaacgactccagatttcgcaatatcccaatcagcaggrtctaacttttcyaawaatatctgnnataactgtaactttacttggtaaatatcaggatattggaaaatttaatnttc

SEQ ID NO: 258 - DNA, 8991 bp; double-stranded, linear
aagaaaaccttgaatttgttcaagggcaattgcaacaaaatttaccaggtttaacaatcaaattaaaatcattgccttngcaaaatcgtttggatttacaaacagcaggtaattacgatttagcctttggaacatggacgcctgattatgctgaccccattaattttttagaattttatgactcgaaaagtggcttaaatacttctggttataacgattcggcgtatgatgcgggtctccaaaaagttagaaaagattacgccaatgaacctgaaaaacgctggaatgaattactaagtttagaaaaaacattaattgaaaaagatgctggtgttttacccttattccaaggagccattggttacttgaaatcagatcgcttacaaggcttgcaagtattttcttttggtcgcacagtatcctatcgtttagcttatgtagaagaataaattgacttctgaaaagtcctatcttttgaaaaagtctgctttctgttttatccttaaagaaggaaaattaactaaaaaaatcaactatgaaaggtaggtttttcaaatgtttagctttctatgggcattaattgtcggaggaattattggcgcaattgctggcgcaattttaggaaaagacgtgccaggtggcattattggaaatattatcgtgggctttttaggaagttgggtagcatcactcttgttgccttctttaggaccagtcatcggcgggtttccaattatctcagcgttgctaggagcgattatctgtatcgctatttactcttttattgtaaaccgtaaggcgtaaaattgtatcaaaatgatatcttgaaaagcatcataaaacttgtgaaggttgatcaaaccattacttttgatgtcttttctctcatattttaagtctatgacaaaaatctctttggatttttgtcatagactctttttttaaaaatatttattatgagaatttccgcgttagactgcttatttttcatttattattcatttttgataaaggaagttttgttggataaagtgaatagctcaaggctcaacaaaaataargaraaaattaatatgttaagttcaaggtgagtgaaattctgctctcataatacgccgttttattcattaaacgatagttgaaaaaaataagtgcccttgttattctttgaattaaactaatgggggcgaaaagcatggaatcgttaaaaagtaatctttttttgaccagagaagcatatttggaagcttttgaaacaatccatgacacctttaaaaacggctattttaacatcagaaaaacctggcgtgaattttgggtccagtggtgctgtctatgatcagcaacatgctgaaatggaagcgctcattcgaccattatggggaattggaccgtattgggttacttgtaaagatgatgttttaagagatgcttatgtggaaaaattaatcgcaggaactgatccgtcatccccagattattggggcgttattgttgattatgatcaatatattgtggaagcagcagcattatctttaactttattgcttcataagacatatttttggtcctgtttttctgagaaacagcaagaaaatatcatggtttggttaaataaagcacttggttgtaaaattcctaaaaataattggacgtttttcaaagtgctcattcgtctggcactcgagggatgtggacaagtgattaaccaagcggaactagaggaagaattggcgttgattgaatgcatgtatttaggtgatggttggtatatggatggtaaaactacgcaaagagattattatatttcgtttgcttttcattattatagtttgatttatgtcaaatttatgcgagaaagagatcctattcgtgcgaaacgttttacagaacgagccgttatgttcgcgcaggactatctgtactattttgatgaggagggcgaagcgttaccttacggacgtagtcaaacgtatcgatttgctcaaggagcatttttcgcagctttgatatttgcagaagtagaggctttaccttggggacaaataaaaacgctgttagcaaaacatttacactgttggatgcaacaggctattttcacttatgatggtcggttgtccattggctatcattacgaaaatttagtaatggcagaaggttataacgcaccaggctctccgtattgggcttttaaaacatttttgttgctcgcagtggatcaagaccatccgttttggcgtgctgaaccgctggcgataaaacgagaagaaaagcgtttgatagaaaagggaaacatgttattaatccatcctaaaatgaaaacgcatgtcctcggctatcctgcaggactatggcttgaaaatcaagcacatgctgcggctaaatatagtaaatttgtctattctagccgctttggttttagcgttcccaaagctggtgcgcgttatgaggagggggcttttgataacgtattggctgtttctcgtgatggtgaatattttcgtgttaaagggaaagttcatgatttttatttaacagaggagcaagtttattataaatggctaccttttcaagaagtagaaattgaaacaaccatttatccttttggagaatggcatgttagagtacatgaaatagtgacatcggttccattaaaagtgcgcgaaggaggattcagtctaccgttacttggaaaattttcagaaaaagaacttggtaaagagtgggctagagtcgattcaggagaattgtgttcgcaaatagttgcaattgaagggtatgaccacgcaggtattcttcaacctgaacccaatacatcgttgtttttcccaagaacaagtttaccttatttgcaaaaagagctaccaataggaacgcatcgcctgatttgtttggtaggtggtgtgacaagggaggaataaaaaatgataaaaatcgaattgaaaaataaagacaatcagattattactggccgaatcgatcacgagaagccagaagcgccattcgtggcggagggagacacgttagcggtattagcaattaaacagtacctttatcaagttggcgataaaattgtagtgacttatacaggggctaccccttatttgatggttcaattagatgaaactttggctccttcattgatttatctaaaagaaaaagtttgggaatatcaaattccattagaagaatctgctcgaaaagcttttgttgatacggcctttcattcagcaaggcaccaaataatggttcgacaagcgcacacgtttgaaaaagacaattatcaaaatctttctatgaatacacatgaccaaaaagaatattcaggagcctatcctcatgcgtatgcaaacgttgaaacgagagacgatgctgttttctttgcgaaaaatgcgattgattctaagtttggtaacctttctcatggctcgtatccatttgcttcttggggaattaaccaaaaaaaggaggcacagttaacgattgactttggcagacctgtagaaacggactggatccgcttgctatttcgggcggactacccacatgatagctattgggaggaagtcactttagctttttcagatggtgaggaacgagtagttgccacaacgaataccacctgttttcaagaaataaagttcccaatgaaaacaacacaaactttgacattaaaatgcttacgaaaagcgctggactcttctccatttccagcgttgacccaaattgaagtattcggtcggaataaataacaagaggtcgggacagaaccgtttagctccgagaaataagaagaaatttccgaaaattgatctttgatttttggagaccaagtaggtattgttcatcatcgaatcactacgttcttcgtgattctcaacaatttcggcttatttccgaaggaccttcaactcttagagctttagctcttagaagttgttgagatcggagcaacgcgtagtgttggttctgttcccgccgtttatcagtttttgagcgtggagcaaaaatccaaagtgatttttgtcccacgctcttgtttttaagagaaataatcaagaaaggtcgctttttattttcttttacgttataatacaataagttaatatgttaacaagttaaggagtgatggagatgtgtagtcaagaaaataaacaaagactgatctctctaggagaaaatgtcacagatgaatggattcaaacgcaattaaatgaatgcgtttcaaaaattgctaaaaatatgcagcgtttcggaacacagtttccttcagcttgtgctacgaatggtcgatatcgtctcaaagctaacgatgattggaccaatggcttttggacaggcatgctttggctggcatatgagtggtctcaccaagaaaaatttcgtttactggcaatggaaaatattgacagctttcaacaacgattagaggagcattttgttttggaccaccatgacattggttttttatatagtctatcggcgggtgctgggtataaaattaccggtgatgagcgctgtaaacaagaagtgctagctgccgctgaagtattgtcagcacgattccaagaaaatggctccttcattcaagcgtggggccattatggtgatcccaaagaatatcgattaattatcgactcattaatgaatttaccgcttttatttgaagcaactaaattatctggaaatagggtttatgaggaaattgcctcacgtcactatcatacgttaatgaaaacggtgattaaatccgatgcgacaacttatcatacctattattttgatccagaaacaggcaaaccaaaacatggagctacgcatcaaggacatagtgatacttccatttgggcacgaggccaaagttgggcaattttagggattcccctaaacgaaacatttctccattcccaaccatttccagaaatgtatccacaaatagtggaggtttttctagctcatttgccagcagatttaattccctattgggattttgattttaatgaccaaatgccatctgacaaagatagctcggcgctggcaattgcggcatgtggtttattggaagcagacaaactacaggcttttcctcaagcgaaagagcttgccaaaggaatgatttatcaattaggagaatattatcgtacgcaaaatgattccgaaaatgaaggactgctactccatggtgtttacgcacatgcagaaggaaaagggattgatgaacccaatttatggggcgattatttttacatggaagccttaatgcgtttagcaaaaccatcatggcaaagatactggtaaaggggaaaaatgatgcaaacgtttgagattaaagaagactttttattaaatggacaaccaataaaaattattagcggggcgattcattactttcgaatgacacctagccaatgggaagatagcctctataatctgaaagctttaggagctaatacagtagaaacctacattccttggaatattcatgaaccagaagaaggcgtatacgattttgaaggaatgaaaaacattgaagcatttgtccgcttggcagaaaaactgaatttactagttattctgcgtccttcggcttatatttgtgcagaatgggagtttggtggcttaccagcatggcttttgaaagaaaaaggtgtgcgattacgttcgacagatcctatttttatgactaaagttcgtaactattttcaagtattattgcctaaactagcaccgctgcagataacacaaggtggaccagtgatcatgatgcaggttgaaaatgaatatgggtcctatggcatggagaaagcgtacttgcgacaaaccaagcagataatggaagaactggggattgaggttcctctttttacatctgatggcgcttgggaagaggttttggatgcgggtacgttaattgaagaggatgtttttgtgacaggaaattttggtagtcattcgaaagaaaatgctgccgttttgaaaaaatttatgactcgtcatggtaaaaaatggccgttgatgtgcatggaatactgggatgggtggttcaatcgttggggcgaaccagtgattcagcgggaaggtaccgacttggcgaaagaagtaaaagatatgctggcagtgggttctttaaatctctatatgtttcatggaggaacaaatttcggcttttataacgggtgttcggcgcgaggtgcaaaagatttacctcaagtcactagctatgattatgatgctttattaacagaagcaggagaaccaacagaaaaatattatgccgttcaaaaagcaattaaagaagtatgtccagaagtttggcaagcacaaccacgcacgaaaaaactggggaatttaggaagctttccagtaactgctagcgtatccttattcgcagtaaaagatcaaatgatgacaccgaagaccaccacgtatccattaagtatggaagaagctggctcaggctatggctacttgctttattcgtttgatttaaaaaattatcatcatgaaaataaactmmaagtggtcgaggccagtgatcgtttacacatttatgtagatggagatttagctgctacccaatatcaagagacagtgggagaagagctactcatttcagggcaaactgaaaaagacacacttgcgttagatatcctagtggaaaacttaggtcgcgttaattatggctttaaattaaataatcccacacaaagtaaaggaattcgaggtggagtgatgcaagacattcattttcaccaaggctatcaacactatcccttaactttttcacaagagcaattagccaagattgattacacagctggaaaaaatccattgcagccttcgttttatcaagtaacatttgaattagaacagctagcagacacgtatattgactgtcgaggctacggcaaaggattcgttgtggtcaatggccatcatctaggtcgttattgggaaataggacccattcattcgctgtattgtcccaaagaatttttacagcaaggacaaaatgaagtagtaatttttgaaacagagggaattgaaattgagtacttgaaatttacgaatcaagtaatcatagattaaaaaaatagaagtagaagctgaaatttattcggcttctacttctattttggttttgaaatatttccaatgtttataactaataatatattcagcaacactaccatctgcgagataggaatgtttaacttgtttaacagcgggttcacgaaaacttaattgaagtaaattcaataactcagcatcttcgggaaagacaatttcatttgtttctacagaagccaacgagaagaggtctactgaaaaatctttacggactcgttcatacacacttgcataagctgtgaggtcctttgagagcggctctttaacaagctttttgggaagatgtgtgatatgtacgagaaagggtgtatcttcagaatagcgtacacgcttgattctataataagaagcgttagctggtaagcctaattcctttaaaatttcggcttgattatcttcttcaattgaaaggactttaactttttcagagtctaaagaatgcaactcgatatcagaaaattttacattttgagaaacttttgatttcgaaacaaaggtcccttttccttggatacgatacaagtaacctgcactggtcagctcattcagtgctttgacagctgtgatagaactaacagcatattttcgtttaatatcggcttcagaataaaatttatcaccaggaataaaggtatgattttttatttcacgtaaaaggtcttgtttaatttgttcatatttaggtaacatgcgattgcctccattctagtaatcgaatgaattaagcataacatgttaactagcctttagcaaacactttgaaaaagaggaaagacaatttttatttaagttcaaaaaaaaataatatattaagaataggtttacggataacttagtatgtgttatagtaagttcgtagagaacataacatgttaagtagggtcacctacatctagggagggaaattcgtggaaaacattgtactaattagtcatggtagcatggctgaaggcgtcaaagttagcttagaaatgatcgttggtcggcaagaacacgtgcatacagtctcattacgaccagatagcgacaatcttcaatttgagaaagagctaaatgaaaaaatgaaagcccttaacggtacgacactgattattgctgatttactaggaggaacgccatgtaacgtggcaactaagaattatttgaacgttgacggagtggaaattattgcagggatgacgctctctgttgtgattgaagcagtggttaatcaacaggcttcgattaaagaattagtttgtttagcacaagaaaatattgttgatgtaaaggctggaatgaatcaagcggaacaagagatttcagaagccagcaaagaaaaagagttaagtaactatagtcaatatgctggaaaagaaaatattgtaaacacacggattgatgaacggttaattcatggacaagtagcgggaatttggtcgacaagtcttagtacacagcgaataattgtagccaatgatgaggcggctacagatcctttacaaaaatcatctttgagaatggcagcgccttcttcgatgcgtttatctgttcttggagtagaggctgccgctaaaaatattcaatcaggaaaatatggtaaacagcgtttatttttattatttaaaaatccgaaagatgtgctccgctttatcgaagcgcaaggacctatcaaaactgtaaatgttgggaatatgagttacaaagaaggagcacgcgaagtaacaaaaagtattcaagttttaccagaagaagaacaaatttttgaaacaatcgcttcaaaaggcgtcactgtgacagcccaattagttccaaacgatccagtcgttgatttnatgaaaaaattacgcggctaaaactgtcagactaagaaagaatatn

SEQ ID NO: 259 - DNA, 4245 bp; double-stranded, linear
atanaagtanatamaatggcgattattgctgtctgaaaagataaaagaattggtcgaacatccattttcccacctactttgttaacttaaagccaatattytcaaaatattttctgcattgttgactctgtaaaaaatttaaaaaagcatctgctgatttttgtttcttagaggcggcaactttaccaactggatagataattggctttttcaaaacagcttcaggcatggccgcaacaatcgctacttttgaattggttgctgcatctgtcgcataaactaagccagcttctgcacttgcattagctacccattcaaggacttctgttacattcgtgccaaagcttgcgtgtttttctacataagaccaagcgcctaaagcttttaagccttcttcggcatattgaccagctggaacacttgcaggatcaccaattgctatcatttgggctttttttaaatcagaaaaatcatgccactttgcttgatcttggttaggcacaataagaacgagctggttttccaataaaggaacgacactttttttattaattagtttttctgcaaccaatgcattcatttgttttgtcgaagctgagaaaaatacatcggcttttaggcctttttcaatttgcatctgtaattttccagaactatcataggttccagttacctgaatatctggatgctctttttcaaaggctggaataattttcttctccatgactgattctaagctagctgctgccgcaagggttatttcttctttttttgttgaaactgtttctttttgcggctgatttgtacatgcagcaattagggcaactaaactgaataaactaagcaggaacacagcctttttttgtttagacatttgaacgcctcttttcttttataaatacccgccataactcaagtcaataatttcagattttttaatcacttctttggccattaatcttggtaacaacaaatcaaaaaccgttttttctgaaaataaaacaccacctggtaagccaatgatcgtctgctctcctttataagccagcaaaaacattgagcctggtaagactggtgtcccatgggttacgatttcagcacctgtctgcttaattgctaacggtgtcaaatcatcaggatctacactcataccacctgtacaaacaatcagatcaaccccttgtgctaacatctttttgatcgcaacagtaattttttgcggctgatcatcgacaatttcttgcttgacaatcgtaactaaaggatacgcggagaacttggcttttaacacagggtaaaaagcatcctcaaccaatcctgtgtaaacttcactgccagtagttacaatcccgacccgtatttttttgaaaggtttcacagagattagtggctcagacgtgctgagctggcgtgccttttctaattggcttttagaaattgttagtggaatcactcgaaaggctgcaactttttcatctttctgaacttctatattggtaactttagttgacaaggcgagaccttcaatttcatttaaagcaattaatttttctcgattgacttttaaaagacctctcgtactagctttagcaacaatttttccttcatggacttcactcggctgacatgagtcatctgttaacaggttatacaaaaatgtcgckgcctcttcttcatgtatttctgctggatccaaggaaacaaacagatgttttttccctaatgataaaagaattggaatatcttcttgaacaactatatgtccttttttaaaacacacttcckggtcttcccatagtcaattcgcgtaatatcatgactcaatggaaggccaactgcctcttctgttcgaattgttttcatggtttattcctcatcatgtatgatttttttatttgtgattaaatccaaagcgtggggcaaaacaggcaacaaaaaatgcaaatgttctgttacacttttcgggctaccaggcaaattaacaatgagcgtgcgtcctctttgaacagaaacgcctcgacttaacatagcaaatggtgttttttccaagctaagttgacgcaagccctcactgatcccaggaatgattcgctctgctacacgtaaggtagcttctggggtccgatcccgttcactcaaccctgtgccgcctgtcgttaaaatcaaatcacaggtcttagaccactcttgcaatagctctactaattgattttcttcatctggtaaaatggtttgtttggttacctggtagagcgcaggtaactgttcacgaatcaagggccccgattggtcgacagcaagtccttgaaagcaacgatcacttaatgttacaatgccaactttaaacaacgtctaactggtctccttttttaatatgaccttctgtcacaacaactgcaaagattccttctctaggcatgatgcaatcgcccactcgcgcgtaaatctgacagtgtttatggcactctttcccaatttgagtaaccaccaattcggaatcgcctattttcattttcgttccaacaggtaattgacgtaaatcaatccctgagacgattatgttttccccaaaagcaccattgccaacccgagctcctttttcattgaaagccgttatttcttcaaaagataacaaactgacttgtcgatgccaattaccgccgtgcgcatcattttctaatccgaaacctttaattaagttgacttcaggaatttcctttttctgtgtgcctcttcgcgggctaatatttattgcaataatttctcctgttttcatacttaccctcctatttgtgacataaatcgttgttctccttgttgttccaagaaaagatgtttttcaggcttacaggcaatgccactcttgataatccctaacaattctgctgtttgttccatagctaaagcttcctttaacgagtagccgtctgcagaatgcaggcacgtttttaaatggccgtctgcagtaattcggattcgattgcacgtctcgcaaaaacaatgccctaatgcactaataaaacctattttccctttaaaatcttttaaggcgtaataactagcagggccattgcccaatggtttttggtatggttgtaacgttccataatatttggttaaaatggcttctacttcttcttgttgcttacctggatgctccttccctaatccaattggcatcatttcaatgaaacgaagatgcacagtctctttcttmgcgatttcagccagtyctacaatygttgcttcacttagctctttcctagctacagtattaattttgatattaggtaatcccacatcaatcgcttgttctaagcccgccagaacattccttaactgaccaactcttgttatttcacgaaattcttctggatccaaagtgtctaagctaatattaatgccgtccaagcccgcctcttttaatccttgagcctcacgagctaacttcatgccattagtcgttaaggttactttttcgatgcctgagatttgctttatccttttaattaaagagagtaaattcggtctaacaagcggttcaccacctgttaatttaacttttttgatgtcttctttcgctaatatcctcaataaaaaaataatctcatcatctgttagaagctgctctttttttaaaaagcaaagacctgttgctggcatgcaatacgtgcaagtaagtcacaacgatctgttaaagacaaacgaacataatcaatttcacggttaaatgcatctttcatgctgttcactcatcactttcctttgatttaattgaagaacgaatgaaatgaccactacgtccaccatttttctctaataaaccaatgtttgtcattgtcattcctcgatcaattgctttacacatgtcataaattgttaagagtgctgcctgcacacctgttagcgcttccatttcaacgccagttgaacccactgtttttgtaaagcaacgtacttctaaacaagtttgattgcgccaatcaaactgaatttcacactttgtcaaagcaaccaaatgacacaaaggaatccattcaaacgttcgttttgcggcggtaatcccagctactcttgctacctgtaatacttcaccttttttaatcatttgggtctggatcgcttctgctgtcgcttccaacatgtgaatttctccataagcgagggctgttctttcagtgtcatttttttccgaaatatcaaccatgtgcacttctccttgtgtattcaagtgcgtaaattcct

SEQ ID NO: 260 - DNA, 4013 bp; double-stranded, linear
tgaaatcagcatggtacgtttaaaccaagattgtatccgctttaaaaaacaagaatgattgacaaaaattaactttacactataatatttttaatagataatgttgaaaattgaaaaaggcaatggtaaaaggggctgttaaaatgtcaaaaaaaacaattatgttagtttgctccgcagaatgagtactagtttacttgttacaaaaatgcaaaaagcagcatttaatcaaggcttagatgcccatatatttgcggcttctgcatcggaagcagaaacaaatttagaaaataatccagtcgatgtgttattgttaggtccacaagttcgttatatgaagagtgattttgaaaagcgtctatcaccaaaaggtatcccaacagatgtcattagcatgtctgattacggcttaatgaacggggaaaaagtgctggaacaagccttgggtttgttagcacaagcagataaaaaagagtaaaaacaagttgttttttcgagaatcttcgaaaaagcaacttgtctttttttatgactttagttaattggaattgagctgaagcagtcattctggtttatcagttccataaattatagagccgaaattagtcctgtgagctagagaaagacaactgtctttaattttttactttaatctagatactaaaaaaacatacttaacaatctattttctgaataatgaacgcctttttccgtagtctgaaagtagtaattcaaagaatgattaacaatattttatatacgagtcattatagtatggcataagcatttcgaataacagacttattcagcaaataaatgagagagaattctgtttttattgtttaaaaataatgaggttatttcataaggcatactttcttcatacgtgatttctaaaggactatctttatcaaaagaaataatttgtgagtcaggcattgcaagtaatataggtgaatgagagacaataataaactgagacccctcatcaattagtttttttatagatatcattaaggctagttggcgttgaggtgagagagccgcttcaggttcatctaacaggtacagaccatttcctctaaaccgatggttcaccagattcaaaaaactttcgccgtgtgattgatgatgtagggatttatcgccgtattcagaaaaatctaagtctatattttctgcatatgtagcaacattgtagaaactttcagctcttaaaaagaaaccatccgtagcacgctttacactttttccaacagttaaataattatgtaaatccaagtgagtatcttttgtagagaaattaaaattaatactaccgccttcaggattaaatccccagttgactgcgattgcttctaataaagtgggattttccagttccattttcacctgaaaaaaaagtaataggtttttaaaatttagkgaatnaaatttattcmgcccttcaatttttgaaaaaacagaatcttcttcaaaagctttgaattctagtctttttaaaaaaatattttccatgataaagcttgctcctttctagtcttttcaaattaaagcttggattactagatatactttaacattaatttttctttaaaggtagataaatttgttataaaaaatctgcatataggtaagtcgaaagtggaagattcgtgtaaacaataaagcgtatcaagagtttgtttagtaggtaacgactagataagaatagaaagataacggtgggagatttcctttttcgcaaaaaagctagagaaatgcgtattttataattgaggtggttaacatggaagatttgcatggacgtaaaataattattgaagaaacagaacgttcaatacagacaaaactggtttatttaccaacaatgttagagcgttcccccctaacaattcaatgtcagcggtgcggggaagtcgtatccaaaaaagaaaacagactggcgacaaatgtatactactgtcatgcgtgcattcaattaggccgtgtgacttcttgtcaaaaattttgtcatttaccagaaaggcccaatagcccaagaactgtcttttttgagtggtctggacaattaacaaagggacagcaagcgatctcggttgaactttgtgagacagcaaaagcaagagagaatcgcttagtgtgggcagttacaggtgcaggcaaaacagaaatgttatttgctgttttacaccaaaccttacaagaaggggggcggattgcgctgsttcgccgcgtgtcgatgtttgcttagaactgtttcccagaatccaagcggtttttcctcatgaagcaattgctttactccacggaaacaatcaagaatcgtatcgttatacgaaactagtgatttgcaccacccatcaattattgaaattccatcaagcgtttgatttacttatcgttgatgaagtcgactcttttccttttgttaataacgaacatctttattatggagtgcgtaacgcacgaaaaaaaagaagtagtttggtgtacttaacagcaacgcctacgaaagaattgcggaagcttttacagcaaaagaagttagcagccagtattttgccagcaagatatcatcgtaggccattacctgtgccacgccgattttgggttcagtcgtggcaacgtctttctagcaaaaatattaaaatcattgcacatcatttgaaacgtttattggtgcgtaattcagttttactattttgcccaagcatttcattaattcaccaattgcatgcattaatagctgagcgattttccgacaaagaagttgtcgccgtttatggtagtgatgagcttcgcctggaaaaagttcaagcaatgcgtcagcagaaaacggatattttgatcactacaaccattttagaacgtggtgtgacttttgatgcagtctcagttattgtttatggtgccaatcatcgagtcttcacttcttcaacacttgtccaaattgcgggccgagtcgatcgaagacaagaattcaattacggcgaagttttatttttacatgatggggaaacaagagacatgaaagaggcaattcggcaaataaagcaaatgaatcgcttggctagtaaacgagggatgttagatggattgtaaaaattgcgcaagcccmttcgtttggagataacattaaaaatgctcttacgttttaacaaatggatgagcccttcactttgcccagcactgccaagcaaagttccagaaactgccaatgacaggcacttgttttggctgtagtcgcgtcagccaagagcgctattgttttgattgtcaaaggtggcagctgctttatccagagtattcttttcataatgcagcgttgtttcattatgatgaaggaatgcaagagtggatggaacgctataaatttcaaggagactatcgcttaagaatgtgttttaacgaggaaatcaacttttactttcagcaacagtctgcggactatattattccggtgcccttatccgaaaaacgaatgcaagaacgaggcttcaaccaagtaattggcttactagaagcggctgatgttccgtacagcccttttttaattagaaaagaggaaaatgttccgcaatctaagaaaactagaaaggaaaggatgcagttgcaacaaccatttgccatccaaaaagaaaaccaaaaaaaattaaaaaaatgttctgttattttggtggatgacatctataccactggacgaactcttttccacgcagctgctgttatcaatgactgttatcctaaaagtttgaatacgtttactctcgcgcgataaaaagaaaagaattcataaatttgatgactattttgttggcaaaacccagattattcgatataatgaaattaagaagaagggaattaaagagtggtcctttaatcttttctttactggtagatgaaaggggtaattgttatgtttagatataatgtacgtggagaaaatatcgaggtaaccgaagcgattcgagactatgttgagaaaaaagtcggtaattagaagatatttc

SEQ ID NO: 261 - DNA, 4951 bp; double-stranded, linear
tcagtgaagattgttttattttcgttatagacgatggtaaagatgcttttttatccacccatgatacaggttactttacgtcagaaatgtttgaatatcttgaaaagagccacttacttcttagtattgtttctttagattgtactagtcaaacaaacgaaactggcaatagtcatatgaattgggaagaaaatttaaaattaattgcagaattaaaagaaagaaaactcgtcacagataaaacgatttacgttgccaaccatttttctcacaatggcggcttgtcttatgcggagatggcggctttatctcaaaagcatgaaatcattacgagttatgatggtttagaaatactaacttaatcggattatttgccttcttttcagcactattatatgcttttaaccgataattacaaggtacttttatcgtaacttacactatcttaaaaaacaaaaatactcgagatttcccgtgattctggaaattccgagtatttttatggttctttacgctgctggcacagcggataaacgtttattttcttcttcattcactcgattaacaataaagttataattcacttcatttagtctttgaccatgatttcctgtttgcttaatgccgccattggaatgaacaccaactacttcaacctgatcattatagattggtgaaccagattgaccgccggttgtatcgatatcataaaatagtaatggattttctaagtctgtaaagttagatgtaaacaaatcattttcatgagaccattgtgtgtggtttttctcacctggatagcctgatattgtgacatgggtatctgaagattcaaactttttcaaaacaaatggcgttaaaatttctcccaactctgggccatctggacgatcgttttgtttgccgacagtcactaccgcaatatccgcattcggggaaaaagctacatcaatcactttgaatttgccaaatggtgtcgcactgccatctcgacctggataaaaccaagcatcatctttggcattcggatttaatactttggcattcttaaaactttcagccacatgattattggtgacaattgtattggttccaacaacaaagcctgttcctaaagaaatatagcctggtttactggcaggggaaatgattcttccgattgacgcaaaaggcgcttcggttgtatctgccacttcttgtcttctgtcctcagggtccagtaacgatcttttttgtcgtgaatgactttcggcaggaacgatatactcttctgcatttgcagacaagctaaaaccggcgatcaaagttactaaaatcagaaacaaaaaaccagcactaatttttcgtatggagaactttttcataagattatgccactccttatccatttttatttaattggggaatttttttcattcattgaccagaacagattcacttggttggtttacctgaatgtcctctttagctccgattccagcagagttaaaggctgctgataccactgaagctgcttcatcgccatattgaacttttgcagcagcaagcatcgcatcacgagcatcactgaattgtgctttaggtgttaagtaatttactaacgagctgtagaaaatagtctgtgctttttcaatgcctaagttctggataatggtgtaaccaatccgattaataattccactattataatgaacaccgccttgatcataataaggcgttcctttataccgtgctcgatcgtcgtattgagccatggtttctggttgtccgtgtttacttggcgtttgtaaatttcgaatacctgtttttcggtcaacactctgagtatccgcaccaatttctggattagatgcacccgaaataatataacccatcaaatcagaataagattcattcaacgcacctgattgtcctaaatattctaaaccggcagtatgttccgttacaccatgtgtcatttcatgaccaactacatctaaagaggaagcatacgtttttcctgttggtgtacttgtttcaccataacgcattgcttttccatcccaaaaagcattgtcataagcatctggatgttgttcatcaacaactgacaagatgggcatccctcgatcatcaatactgtgtcgttggaaatgatcttcataatatgttttcacaaattttccatgcgtataggcgtcaacagcattctgatttaatgctactagtgatggtgcttgaataatagaataattatttttgccatcaactactgcatggtaaacccctgtgttatccgttccgtgtaaagcaattcccgtattgcttttttcaactggcacattaaacgctacttgaaaagagttttttaacgttacttcactaccgacatgttccgttaaatcttgtttttccataattgttccatctgtagcgttcactttataaaccaatgatacggggtcaccagttggcgaagaatttctctnactttataaaataattgcccctcattatttacacgtttgtcaatagctaaaaagacaagatctytagtttccggattatcagaagcaataatttttttaactccttcttcaccgattgcatcarccgattgaattttcactacttgatcaactggatttcctgtaacacttgttactgcaccatttctatctaaatgaataatcacattatctgaatcaacagtaacgccttccgtttgcttttctaacttaagatgcttcatcccccacgcatcttcttttcgatctacaaccgtatattgttcagcagctgcctcagaaattgcctccttttccaacttcgataaaactgttgaaacttcactttctgaataaacttgttcttctgcggctacaaaaagtgaagaaaatagacatgaacttccaacaaagatgcctgtacctaaaatgtataaaattttatttcccttcatcaaacaattaactccttccccagtttccttttatttcttttcccaacaaaagtattgctttatcctccctaatttttcccgttaaacgaccgcccctttccctgcgtaaatatttgttgctattttcattatagacaactacctaaccggcactatctaaattccttaatcagccgacatttttccctgtattgcccctcataactcaataccatagcaaaaaagttgttaacaaattcattcgttaacaacttttttactgttatgatttttttcaataattaaatgttgagtgaccgctccttcattgaaggacgtttgcaaatcaaattgatctgaaaaatcaacaatttcttttacatataacaatccccaaccgtgctcttctggattacttttagaactaaatttggttttcttcataaccttaaaatcaaattcggcttggacactatttgttatcacaaactcttgtgtttcatttttattgaaaattgagatagcgaacattttcaattctgattttgcactgttttcaatcgcgttatctaatagaatagccaacaaacgaatcacaaccactaagtcgattgatgtatcaagaataaatacttctggcacatcaacaatcacttttagttttgcttgctttgcggtattaattttcatacttatgagtgccttaagttccatatttttcaaacgatttaacttcataagttcaaattcttcattatcaataatttttttggttggtgcaatcgtttcttcataaattcttttgatttccagaatatcttsgkatgaaatagcaatttgtaaactatacaataaatttttataatcatgacgaaacatcgctagctcttcgttaatggattctattttttcagtataaatcgttaaattattcaataattgagtgttgatacgttgttcttccaaataagcttcaatgactaagccaatcagaattaaaaataaacctacacttattaataactccaatttagaactatttaccgtgacaaatcctcgcataaagtcaggtgaaatctctggcgaaatcaaaaacacaaaaagtaacaacagaatcaacaataaaagtaaacaaccaaaaaaaattcggctattttctaacacacgatttaatcttaaaaaaacactattgggaatttttaaagcaatccagatatttataagcaacagaagaacatttgaggcaatccataataatttattttgataaatctgttgaaaaaaaacacttaaaatcgtttgctccgtgtaattgataancgaaaccataagcaatgtaaaancagacaaaaatatcgctttaaaaattgagaacctctttttgtgaatgagtaaaaatcctgtaaaaataacgactgtcagcgcataaatcaaccaagagtagcccaacattaatgccgcaaacgaacaaagattaatgacaataagcaatgaaagtaacggtattttacattcaatcttgatcaatgttactcgtaaaaagacaaaaacgataaagctagatacaagcaaaacgttagtagctaataacgacaaaatcatttttcaatattctttttaggtttttcagtttgtcccatccattgtccaaatatattgggcgaattttgatttaatctaggcttagttcccacaccatcactaacttttgcaactcttttttcaataacatttttaattatttttttaccaaatttcataaaaacacttccttcaattaaattttttgttacagggagtatcatcagaccttggatgacgagaccgtagagtattactgaagcaatcttttctttgacaaacagactacataaaataagtaaacacacccttataaggctttgctttttgagcacgtttaaatcagatggctgaacaggttcaatcgctgttccttgtggcgcataccaataaaataatacgactaagaggcacatcaatagaattttataaataaacggtaagctcaca

SEQ ID NO: 262 - DNA, 5277 bp; double-stranded, linear
ttaattgataatcaaagtataacattttttaatgaatttacataataatacaagtggaggtctgttcgtgaaggtagcaggagacaaaataaaacaagcgagaaaacttaaaaaaatcacacaatcagagctggctaacggcatctgtacgcaagcaacaattagtaatattgaaaaccgtaatctatgtgacagtttagatattttctcatctatttgcctccgattagatttagaagtagaagaatgcatgatgatttctgaagaaaagaaaattgaaaatctactaaacaaagtcgaggatttatctttacggttatttcacttagaggcctacaatttattacaagaagtgcctgaaggtcttatcttatctaataatgaactaacgactaaattgttatattataagggrattacttgtttattaggaaaaaaagataaagcagaggccttgttttacctataccggggcgcggaaattgaccgtaaagtcaatatttacaacattttaagcctgaatgcgctaggtacgctatacgaactggaaaaagatatgagaaaagcgcaagtgtattacgaaaaatcattacaagaattggaacaatttaaattagaatgttccttggagcgttgtagaatttattataattctgctaaattctactcggaaatgaaagactaccaaaaaagtgtcattttaagcgaaaaagggattcagatttgtcgtgacaaacactccatttatttgctagattatcttttatatgaaaaagcctttaacaaacaaatgctcggggaagacacagccgatgactatcgccaagcctattattttacacaattttttggcaatacggaagtcctgcaatatattgagaaagatatgaaagcttttaatatttcctattaatttaatcaaaaagccgataaaagctgaaaactcagtttttaccggctttttgaaaaatataggcaagttgcttttaaaaatcagcagtcacggttacgataagcaagacgaagtatttaggaggatttaaaaatgaaaagagtaatatggtttagacgtgatttacgattacaggataataaagcattagcacacgcgttacaaaattctgcagctgatgaattgattttattattccaaatgaatcctcaacaatttattcaagaaagtgctaatcataacgctttttttgcaagcttagcctcgttcaaagaacgaatcgatcaagaggcacatttacaaatcatggtcggcgaaccattagatttattttcacgtttgaaacgcaaattacccgattggcaggccatttattttaatgaagatacttgtggctttggggcaaagcgggaccagcaagctatgcgcttttttgaagaaaataatattcagtctttctcttttcaagatgcctatttgcatggctctgaagaaattaagaagaacgatggcagcaagtaccaagtgtttacgccctattacaataaatggaaagaggcgcctaaagaaacaccgattcctgtttcctatacagctgmaaaaatttttagtgcgtgtctttttccagaagaggaagcagcttatcgtgaacagattgcgaggattcctttaacacactatagtgtcggcgaagaaacagccagaaggcgcttaaatacttttattgatcaaaaacttcaatcctatgaaaataagcgtgattttccttatcaggatcaaacgagtcatctgtctacttttttaagaacgggagaactttcgattcgcaccatttggcaagagcttgcatctgtgccttctagcttaagtaaagaaaccttcaaaaaagaattagcttggcgcgacttttacaatatgatctatagtgcgtttccacaacaaaaagaggaagctattcaagaaaaatttcgttatattcaatggacaaatgacccagaaatgtttgtcaagtggcaaaaaggggagacggggtaccctataattgatgccgcaatgcgacaactgaatcaaactggttggatgcacaatcgcttaagaatgattactgcctcttttttagttaaaaatttacacatcgattggcgttggggtgaaaaatactttcaaaaaatgttgattgactatgatgctgccaataatatcggtggctggcaatgggctgcttcaacaggaacggacgctgtcccttattttcggatttttaatccaattatccagtcaaaaaaatttgataatgacggccagttcatcaaaaaatatgttccagaacttaagcaagtgccacaaaagtatattcatcaaccaaatctaatgaacgaagccttacaaacgcaatatcatgtacatttaggagaaaattatccaaaacccattgtcgattatgcatcaagtaaaaaacaaacattgtttctataksaagcgagcaaagaaattcatcaagaaatgaacaatccaaggtttcaataaacagtaaacccaactagcttagcaaacaacttgtaaggttagttgggcaaattaattagtcgaaagagaagtgcnatttatcggctaaagttttttattctattctagttaacataatatacattatacaaagtagagtaaaaagcattgaaaagcaaacaaaaccagtctttagtttatctagactggtttygtcacgtacgttatataaattatgcttgttgcttgatggcttgtgcgacacgtgctccatattctggatttactctagtgaacaaatcaatttgacgcgcgatgatttcttgatttttcacttgacctaaagatgccgctatattgttaattaagttttctttttcttcgcttggcagcaaattatacaaagcgtttgcttgtgtaaagtgatcttgattatagctataattaccaacatttccttcaacttcaaaggaactaattttcgctgtaggatcttcttttggtgtttcagtataactatttggttcataattaatttcgctattgccattgttaaaacgcatattgccgtctttttggtagttatttacaggcgcttttgcttggttgattggcaattggtgactattagcgcccacgcgatgacgatgtgcgtccccataagcgaacaaacgtccttgcaataatttatccggagaagcttcaataccaggaacgaaattccctggtgaaaaggttacttgtkcaacctctgcaaaataaktckctggatttctatttaaagtcatcgtgccaacktcaatcagcggatactctttttgagaaaccgtttttgttacatcaaaaagtgtttctttcattgttaacgcatctgcatacgggataatttgccacagataatgtccaagaaggaaattcttgattttcaattgcattatgcaaatctycaatatggraatctgggttttcccagcaatttcytctgctaattgactctctagatttttgattccttgattcgtcttgaagtgatatttaacaaaaaatacttctccagcagcattgacccatttgaatgtatggctaccaaaaccatgcatatgacggaacgacaacggaatgccacgatcactcattaaaattgttacttgatgaagactttccggtgaatgagaccaaaaatcccaaacagcttctggacttttcaaatgcgtccgcggatttcttttttggctatgaataaaatctggaaacttaattgcatcacgaatgaaaaaaatgggcgtattattgccaactaagtcgtaatttccttcgtctgtatagaatttaagcgcaaaaccgcgaggatcacgcaatgtatctgatgaacctaactctccagctacagttgaaaaacgagcgaataaaggtgtttctttgccaacttcagataaaaaatcggctttagtatattgtgccattgattggctcaccttgaaaatcccatgagcaccagcacctttggcatgaacaacccgttctggtacgcgctcacgattaaaatgagctaatttttctaataaatgaacgtcttggattaggacaggaccaaattctcctgcagttagcgaattttgattatcgccaactggacttccttgtgacgtagttaaatgttgatttttcacctaaaacactccttcatctaaaattatactcattgtataaaaaaaccactctgcataacaaaaataatgcttaaaaacactcgaaaacatttgttatttaatagaatgattaaaaatagcagtagaatttaaatcaaaaacaaatgtattaactttaaactgtttacaccaccaaaaataacaaccaataattcaaagaaaactaaaatgctgtttttttattcaaaaaagacctagcatcccaatcatgctaggtctttcgttactttttttgagcggccgtttttattggtcattcagcgttattgattgatcgcaacagtcgtgtcttcagtcgatagacctgtcatagaggtgctatcggaaaatattttttcaacttcttgttctgataaaatattytctttcttaggcatkgaaatcgtcgcttttttggctttttgtgtaatgctaattttactagataatgattcaagtcccatatcaacgttcttgtcttgctgcggtttcacattaatcaacatatttgttttattttcttttgtattaacagaaactttggcagaaacatctttgactttttcgaaaggatcttgttctttacctttttcagatgtttctgtcgtaattttgattaacttttgtaattctttttttgtaaacgtatgggtaatggtgtccccttttttctcgaacgtatccttgtctaatccttctaaaaactctttgtattccttagcagactgttttcgttctttttccgattcttgatactctttgattgtatcttgccattctttcgtactttcctcgttcatggctaaaagatcaatgtattttccttttagtttttctgtatctaactgagaactatcgatagcaccgtcagtcattgagtctgcgacagcgacaatatattccatcatatctgttgctaaatagagttttggctctttgccctcgttatctaacgatccaaccaatgaaatcggtacatccattcccatcgcttttaatttcatctctaagttgaatgctttttcttttttggcatctacttgaatcttcccagaaagcgatgcgtctttgatttgcgtgatgagcatcccaatcataggattcgtttgtgmaccatcttcttgtgaaaat

SEQ ID NO: 263 - DNA, 891 bp; double-stranded, linear
tcacaataaataaagaaaagtaagaggataaataacaaaaatctcatcaaattgaaaagaagaagtggttgttttcacaagtgtgaagagggttaattaaatacaaacaagatttcaattacattacagaaattttaaaactcaaaatttaatacgtttatttcttgtttcaataggaaattaacggtaaaatagaaaagtgagacagtgaggaggaaaaatgaatgagcgaacagttaacaagaagtagtaaacatattcaaaaagctcttaaaaagcaaaaagcttataaacgtgctaccgccgttgcggggacttcaatgattttagcacctgtggttggtgctgcggtacctgcccaagcagaatcaagccagcaagcatttattaatgaaatcggaaattcagcagcagccgttgccaatagcaatgatatgtatgcttccgtcatgattgctcaagcgttgctagaaagtagttatggtagttctgggttagcatctgcaccgaactataacttgtttggtgtaaaaggaagttataatggacaatctgtttatatgccaacaaaagaatatttagacggacaatgggtgaccgtcacagcwgcatttagaagttataattcttatgcggaatcgttccaagatcatgccaatgttattcgttccactgcttttggggatacataccattattcaggcgtttggaagagtaatactagcagttatcgcgatgcaacagccgctttagctggaagttatgcaactgatccaggctatgccgaaaaattgaattggttaattgaagcatataatttaactcaatatgattggggagcaccagtcgctcaaaccactagttattcaggactcaccgggaaccgttgat

SEQ ID NO: 264 - DNA, 4030 bp; double-stranded, linear
aattctctaattcggatagtttggctggcttaaagtccacataatccacctctgattattttttcttcgtatttatcgttccattggccattgctttctcttgtaaacgacgctttttctttttaatttttgattttttcttacccataaattttcctcttttcattaattaatatcttattatttctttttttcagtcgcaaatcccatgatgatttgattctttagatatcgtaattgctgtctggcatatgcttcctctctacagcaagataatctatagttaatatcctttaaaaccgctaaatcaaaattgtatttgcccagtaattcattaatttcttcttcagctgttttcatttaattctcctttagcgtgatcggtctgccatactttaaaatttcccaagcgccatctttcatattggttttattcatatgatttctttcatcacgagcaattgtataatcgaaaaataaatcagcttgctctgatccatgcaggtactcaacatacacgccgtctacttgacggcccagtatatataattctggataacttagcattgttgttctccttcaagagatatagtggccccagtgatttttaagccaattagtttacttaaaaccataattgcttcatccactagcaatccatctcgttgaatagaactggcacatgtaaagcggtccatgcttacaatctcatccaccgtaacaggatatggaatagtaacgcctgcttttttggcaatttgttcaatagctcggacatgcgatttattcgatgctaaaatatactgacctgttctagctgattctttaactagctctgttgtttttccagtccctcgatctcttgctataattttcatctatttggcctcctcacttaatccccaaaaaggctttaccttgtaaaacttctcaacttctcgatttaaagatcgcaccatactttctaagacagttgctcgtgttcctaacgtgacattttgctttttcgcttttttaacacttgtaatacctaagttgtgccttagttcagaaaaaattagtattccctgattgctatatttccattttaaatctggattggcttgaatcttttcccataattcgttagtgaccactaaatagttataatcacctaaaaacgtctgtttcgcagaacttttcaagtctgccattgtaactttaatttcatagcatctaatggtgttgtcagtagaataagtcataaagtcgactctttctttgccaaaccacccaatagtaacttcaaaacagccgaacacgcccattttgttggtatagtgccacaagcatttctcagcttgtctggttaaatcagttttcattcaccaccatccgctttcacagcaaacggccaatagcgctcatcaattgctttgatttcttgttctgtgaatatttcttgaaccaacccaatcaaattatctgaccagtcaacaatattatatttaccattttcatgatcaaaaaccagtcgcttatgcacatcatcgttttttatgaaatcaacataatacaattgctttttctctacttcgtagccgttatcaatcgcattcaatagttttactttattttctggatgtaaaagccaaccctcaacatcgtcagttatcaatgtatattcgttataatataagcattctaactgttgaccaacgaataccataaatgcagcaccagaacttagttttttatcactaattttcccttttaacccatcaagccaatcagccacaaatttctcttcatgcgaaaatataacttttccctgtactttgagctcttttatgacgtcaattgctgcatttactccgtcgtcataacstcttgcccattcatcttctgcctcgcagcctccgatatcatagagcgcttgaattaaatcttctttttcttgtttattcaccgctgatcctccactctaaaaagttcgtcttctagtccagttttttgatacttcaaaaattcagtaattatgatcggttgtttattacgccatgaaatttcagtaatatctgtatttttaagaattacagttgatggcaatgcaccttgtgcattttcattaacataaccccacgaacctaggtccatatattttttaggcttcaaggaaaaaaaggaaagatattcgctgttgcagtctctgaccacatatttaaaccctcttttaaaagcttcttccataacctctagcgcttcagctcttggtctaatctccattatcttttttattcgatctaaataatcactcattccgcttcctcctgttcaatggcccatcggctaaacgcttgtaagacttgtaattgcccagtttttgacatatatctgtaacttctatagacaggtctatcacgatagtctggttttatagaattaactctcagtctccaaaataattctataggttcaatatttgtgactgtatatttttctttcaaccaatccagaacaatctgctgattttcgtttagatatggtcttttaaaaccttttacgatgaataaaacatcttctgctgacatatttccttcttcaacacgatccatctcaagttgacgttcaatttcttttattagttcatgcatttaatttccctccaacagttctgggttttcatggatgttaccgatgactaaatagccatcgcgatacaaaatattagattgacaaaatacaagatctaaaaattcccagaaaaagcgcccatctgcataagcaatttcgtgcatacttcttcggtgggcgtatttttttggtgcatcataaactaaaatgtccccctcaaaaatttcaacgccgttcttgtctttcaagcctgttgattgcatgatgacataaggaaattcatcccaattaaaagttgtatcatagcttcctatctctatttcagacgtgccaggacttcccttaatctgaaaatccgtaattatggctatcatgctattcgagtcatcaaacaaaggtgtaacattttctagcatttctttctcgtaggtatcccacgctctaaattttggaatcatcttcttcactcgctttctccaacagttctggattttcgtgaatatttccgataatacataaattcctgtaatatgataggaagttgctagcatcgttcttaaaacaaaattgcgcatagtctacatcgtaaacaatttcgcaagcttcaaacgtttcccacgtgccatttatattgtcatcatgttcgactaaatccccctcaaaaatttcaacgccgttcttgtcttttaagcctgttgattgcatgagaacatatttatcaatcattccccacatgccattttctagattgataagaggcgctataaatcctgtatcatcatcaatagtccattctacatttttatcttcatcaggataatacattatgttttcttctactgaataagctctaaacttcggaatcatcttcttcactcgctttctaatatttccacttcttccgctgaaagaaaactagcaagacaatttgcatcacaaaacatattgtctgttccatcttcaaactggaaaaaattaactatcataaaattgtctctaattgttaaatatgattgattagtaaattctccatcattaaacaatgcgttaccacaattggcacaggtagagctatctttctcaaaattcggataagtcacaatttttcactaccttctgattatttaattaatacataaaatccatttttctttgcaacgtctcctcgaattcccaaatggccttccaactcttcaaaggtcctttttgtaattttggaaagttgcgtatcatagcccaaatttctaagtgtcacgtattcatctggtgttaactggtctaaatctatcgcacaagtggcggaaagcgttcaaccgacgactcaaatatcacactagttaatttcattttttcaccctcaacaatttagaattaattttttacggctttcgttaaatcaaaaccaagagcagttgga

SEQ ID NO: 265 - DNA, 4147 bp; double-stranded, linear
taatgcaatgcttgcagcagattactgtattattgttcttcaaacacaagagttatctttagacggtgctcaaacatatatcgcttatatgcaatacttagctgacacatacgataatgatttacaggtcttaggtataattccttgtatgttgcgtcctgggggtagggtagacaataaagtattagaacaagcaaaagaattatatggaggaaatgtattaaacactgttgtaaaatatcaagaacgtttaaaagtctacgatgttgagggaattaaaattagtcataattacacaggtaaagcagacggttgggacgttaaagcgcataaggtatttattgacgtattaaatgaattagatcaacatcaactagtactagaagaattggagggataaaatatgagtaatagtttcgaacctattatcaaaactaagaagaaaaaatcttctttagaagaaaagcatgttagtgttaaaggaaatgataatttttcaagagatactacaaataattttgctacaaaacctacatcagtatctaaaaaaacaagcacagataatagtgatgttaagccttctacagtagatcgacgatataaagctactatgactcaaaaaatatctccttcagtcaatcttaaaataaacactttaaaaccctttcttggtgatttagaaaacatgcccaaagccacagtaaatgatattttgaacatcttgctagataattatgtaaacacaaaattttctactcgccaacaagaagcattcaattctatgtataacacacaaattgaacttttaaagaagtagtaagtttaacttaggtataccagtatactggtatacctaaaaaagagagtatttaatatactctctttttttatattataatttatgattccgcattatagaattcttcttaatcgtgtatattcgtttacataacgagcatttatacttgtctaaatcactcgacactctacttgcaagacagccacacgagcactgcacataggcaatactagttgtagtagtatcttctttgattagttttccttggtaatcatatgttttcataaaaatctccatcactgtaatagtcgttaatgaaagcatcaattgttttactttcttcttcggttaattctgaaaattctacatctataaaaggctcttctacagttcctactgcagaccatttcaaaaagttatgaattttaatgtgccttatgtcgtagaaatcgatttgaaaatcactaattaaaacaacatcaaactcagccattccacggaaaacaccaaacacatgcggttttacacgatcatattcatccaatgagttcaactggatttcaagcactttattttgtttaattgagcgttctaataagtattctatttgtacttgagattgctgtggcagtctttcaatctctcgtgcattaaattcatccgtttctttgattgctgcttgcaactctcctaaagggaaagcagttggccacttcaaatcaaaagggcggtctacataatcgttataaggtgtaaattcctttttagttttcttcatttgttaacctccaagaccgacgttgccacctgcatgaccaccaactaagcccgaacgattcacagctgtcgccccttcaagaagtgaggacgcatggatcaatgctttaaaaccaaatttctgacgaattttatcaattagaaagtctaactgattgtttattatttgttcttcaggaggggagaagagatctatttgaagtgtagtatcccaaaccagctttccaaaggagactcctaaatttcgaatatccatgccaggaacatagttttctcgaaaaagtttcaaaacatgctcggttaacacttttgtgttgttgctacgagcgattttaagctgttttcgccaatgagacctgcccagtccatcaacttgtcctttagaataaccaacaaaaattgaaacacattcagtttgacaatttgaatttctcaacctggttgctacctggtctgaaagttccttcagcactaattcaatttgatcctttcgagcatagtctctaggtaatacttgactattaccgaatgatttttctttggccacctggcttttttctcctaaaaaactacgatcaatgccccaagcatgtgcgaacagttgtaatcccatgacaccaaagcggtgttttaatagataaggatctgcttgtgctaaatcataaatcgactcaattcctgacatctttaaacgagcagccatacgcttgccaatcccgcaaaattcagtgataggggagatagaccaaactttttcttgtacatcttcatatctccattctgcaacaaaacctggtgtattttttgcttcgttatctagggccagctttgctaacaatgggttatctccaatgccaatcgtgacgtatagccccatatggttataaatgacacgttgaataattttggccaatcgataagcagtatcacaattaaaatacttcagagaagcagttatatcaatgaagctttcatctacactaaaaacagaatggtcttcatctgccacaaaccgtttgagcagattattaatttcactatttcgcttcatatataaattcattcttggtggaacaataagcaattctgggtgatcaggcacttcatctttacgagtcacattagaaattcccaggactttttttgccattggcgaagcagcaagyacwartccgcctgcattatccgcaccactcatyactataagcattgttttraggggatctaagccacgttctacacattctacgctcgcgtaaaaggattttacatcgatrcaaggacatctctccgggttcttggaataatcaatttcatgcaaaaacccgtcctttcgagttacattatacgaactaacgttcttttttgcaacaacaaaatttcagttttccgaattattttaaatttaaagtagctcagaaatctacagtcattatttttttagtttgtttttaacgcgcaagtagatatcagccagccagtaaataattgtaattaatactattacttttagaaagttcaccatgaatactagattgaatgcgtattttaaccacaacagccataatataatcgcgataactacttttccaaaggtattcaatttcctaaccaataaccaatgtaaaaaatcttctcctttatttttagtagctctatattcttctagaatattttttttcatgtttaaacctccttttttctcrtcttmtattmacatatatataattacatgttaatatamatawatgaaaaagaaaggaggtagttttcttatgaaaaaattagcactaggttcattgcttttagttgctctaggtgttatcgggacatcttttgctttaactactgaagtaaaacaagaggctggatatggacatcctcttattgatcacaaaatttagtcttaaaaaggacatagccttgaatatttgtaaaggttatgtcctttttcatttttatctcttattactattttcgggccgtcgtatagattcccccaacctaagaacttttcatttggttgagctgactaaacgaagggaaaccaaactaaaacgttgaaggccagttgagcaaagcgaaactaattattcgtcttttcgggtttgaccatgttcctggtataaaaaattattcgtatttaaatagaaatatttttattatttccgcctgcagatcaccatttaatcatgtaaaagcgaacgttaaaacaccttcattgcataactaccgatcaatatttgtgaaaatggcttagaattgctctctcaaatctaaattctagtttcttattttacttttggtactaattcatttatttttgaaatatttaaggcaatcattaactcactgattgtttgtacacctacttttgtatcatcaaatagtccttcattgtacattccatctagtaatactgggtctatttgtacatttcttttcagttcgtcaattgtcattccttgtttatccatgatttcctttaacttgatktccatttgattattcttcataactttttccttctttcttttttatcccttattactattttcaangtggcacata

SEQ ID NO: 266 - DNA, 2705 bp; double-stranded, linear
gttcttcttcgaattcatctccaattacctcgacttcctcaccttnaatatctggtnggtcaaaaccaaactctgtcatctcaaaatctaamtctaaatctgctaattcatctaactccgcatttaataattcttcatcccatgtagcaatttctccgaccttattatcagctaaacgaaaagctttgatttgctctggagtcaagtcatcagcaataattgtaggtacttcttttagtcccaaatacttagcagcttttaatcttgtatgcccatttacaatgacattagaagcatctaccacaataggaactttaaatccaaacttttcgatacttttagcaactgcagtgatagcaccttcattatgtctgggatttttttcataaggtatcaaatcttctgttttttgtacttttatatccatatatgtagaacctccttgtatttaagtatctagtgggattcgaacccacgaatgctagttttgcaaactagagcgttgccacttcgccatagatacatgaagcaaacttatagagcagtataagcttgcttgactaaacgaaacatttattgacatacattttttattttgtgaatcactaaaattcacaatggaccagataggatttgaacctatattcagcatctgcctacttcctttatatgcacttagatatcattacgcataactgatccataaaatatgcaacaaaaaaaccgactgcataatttgcaatcggttttgtgttttacatatttttctatactagtataataacatcatttttatgactttatccgccataaaaccgcaaaaaaaccacaatttcagtcagtcgcacttttatagcattgaagcagaccagattcatatgcttcagcaaattcaagaagtgcgacacactttaacgtttccacgttgctaacagaataacctagttcagaagcaatccaaacattagttttcttttcaacactgcagtaagtataatacaatagttgtctatttatcaatgacaatcgggccaatgcattatctatttntaatttttctttttccgcatcaatttttctaataaaatgctgttgagatcgatgtgtatttgtgtgctgaataggcacttctttaattatcggcgaagttatattaaattgaggtgttcctgcaattctttgcagccgtctgtatttttttaaaagatttcgtgcattctgttttgtttttttgtcatcaatatcaggaaatagctgcattttttatccctccgtgatacaatatctatgcagcgtttatttcgggaacgctaaatcacacatccgaattatatttgaagtcggtttttgtttaatattttttcaagatgccaaccactcgccgtctaacgagtggttgttttttttattgtctatcatcttttaatttttccagttcttcttccaattgtattttttgtttatatagcgaacttacgcacaacgctaacaaaataattacaagccataagaattcatttagtgttatcatatctattctccagttaattaaatatttttattcctccaatgcccagcccattaatttaactatttcaaatactgcattccgccttacaccagttgagacacctaggtwattaaacttcaaaacatccctgtctagattatttgtaactgtttcaaaattcctaacatcttcarasttcattgttccgccagtcggtagccatataatcaaactttttgatttttccatttattgatcctcctcacttaatccctaacactacatatccatcttgttgggcataatctgtaatgtaagttatttctgcaacatggacatcacctgtatattgtccgtcttgatattcgtttaagcgtaatatatcgccgttttgatagtttcggtcattcttacgtatttcaaaacgcttatcacctgaaacaaccgcttcaaagtattctggtaagatttttagttcgtgaatggttggttctttctcaattcgtatccgttagctaatgcatcaatcaataaatctccatttgtcttaaaccacttagaaaattcagcagttggcattgcacttgagaaagaaactgccgaaccgataatgtctactttatcagaacccattgataaaccttcttttataaattcatcggcacttctaggcaatgcagcttttttcgattctttaattgttttgctaagctaattgctctttcgttggcatagtcagcacctttcaaataatcaaggctatctgtagaaacttctaagcattctaactcttcaatcaattcttgtttttccattagagtccaccttccaaaactttaaatgtacttttacgctcatcgaataacgctttatttatttcctgttcagaccatggaacaatcatttgtgctgtgtattcaacaaccagatcaacaaactcatagttaatactattaattgaaatcacttcatacgccatttttttatcactagaaaatatgatatttcctattttagctaattttggctaatcttagcgtgtcatcttctttactttgatgtaacgttcagtgaatgtaaaattcatttatattatgataatcgttattcgcctactttttggaccaatattttactctaatcttacaggttactaaaatacaattttttcaatcagtatgcgggataacaatat

SEQ ID NO: 267 - DNA, 1302 bp; double-stranded, linear
ggtaagtagatcccatggttgattcaccttccaaaaacnagcacncatagaagagcttcttaaatctttcccactgtgcaacataattataaataaatttctttggtgtcacctcgccaaaggcaaaatccatatcatagtatgcgggaattattatctcttttttcgaattttcaggatataaaatatttttctccaaacgcgccttggcagctttaaattcaactgattgttctcctaaaacaattgccttagaggaaataccgccattataaaacatagctacatcttccttatagcgatttgccatgtcaactwgagccaagcgggcactaagttctttccccgcattacgtaattcccataaaaaatacaacataacaataataaaaactataattagccaaggctttaacgaccttcctattcctaataaatataaccaaattttctgcaaaaaactaaccttaggtagcgaggtcgttttggacatagtatcagtagtaagtagttccttaatccgagtggtgacaatatgtattcctgcattaaaatcctttaatttataaaaatctttcacggtactatctgttatttcatcggttaaactatctgggattatctcttcaagcccatagcctacttcaagtcttgcttgcctgtctttgacagctactaagtaaatcactccattattataaagtttatttccgatacctaatttattacctatttgattggtaaagctttcaatcgtttcgttttcaggaactkgctcaactgtgataaccattagttgtggtttcgtntccgtcttactaarttcttgattaatttttkgtacattattaakgacttcytcgttcaaaatttgtgcattayctgaaacaaaaagatgatttygattaatttttactacgacatcgtctgttggagctgaataagtcctttcaaatcgttttaagaaactcattcccaaatagatccctattaaaagaacagctagataaactaaattcttcattacaatactttttacttttatttttcgatactcccccacgctcatttgtaattctatccctactttatttttcccatacactgattttttctcccttccactcctaccgaatgttctagctctgattttccacagagctaaataaatttttttgtattaaaaatttattttcttaatagttagtataccgaatatagacgttcaaatctctatctttttaactaatttctgttaacacgcataaaaagaacgtaacgcctagtggataagcggtacgn

SEQ ID NO: 268 - DNA, 2311 bp; double-stranded, linear
aaacttgcaaaagagaacgcaagcaagataatagaagacggttttatatagatagctaccgnaaagggtaccagaaaccaaattaaaagcctagaaacgttggaaaatcaacgtctaggctttgtttttagactattcccactctgtagtagaaagaatagtttgacttacttttgtttgtatatcaaggtttaagtttggttgaattgctaaaatatggcttaaaatgatatatactgtgataaaactgtgataaacttttttgatgaaaaaatagattttagtaattaaaaatttgtctgaatttatttatatgcttaatttgaataatgttcttttttagttttattgataatttaaaatttactatgtgttttattgtagtaataatttaaatatacagaaattatggktttgtatagkagtttttattataaaagtattgaaaatacaggtttttaatgtctttgtttgcatagtaaataagttaaaaaataacttttgtgttaacacttattgckttttgaatttattattttaaattaatctggaatgatattgttatgtataaaaaaactatgttgtttaaacttatcgacgtggtataattaatataggtattttgaaaataaaaagaaggggtattttatgtttactaacaataaaaataaaagcttatattttgaaagaatgcaaatgattgatatgataagaaatttggacaatattagttacaaagagtttcctaagtttatnggggagctgtacaatcttatggggtataaggtagaacttaatgagagatgaataatattgatttatacgcaagtaagttttcagaaaagttagcaatacaggcaaaagcttacagcttaamctataataagtcgaaagcaattaacmaaagaagagtagagtcatttgctttgcaagcaagagaaaaaagaaaaaaacctatatatataactacaggagtttatacaaatccagcatatatagaagctaaaaaaattggtgttactttatttgacagaaaaaatatttttgatttaatttcaaaggctgatcctagcttactggtcgaggttagttatttggaatcagttgaaaaacacgatttaaaaaaatgtaagcattgtaaaattgggcatgctacgaaagtttactcagaagatacgagtaagttttattttatttgtatggattgtaagaaacatacatagggagaagtaaaagtctagtaacgtttagtttctagacttttttatttgagtaaaatctctttaagttgtgtttgttgttgaaaatagtaactattataaataagattggcttgtttataagataagttgtgggaatagattaattcgtcaagaattcttatcttgagaactatatcgtttacgttgaaaaaactagccattttttcaagatcatcataagtactaaatgcatactttaaggcttttttattaataagtaacattccggcacccttatttgctctgaattctttaggataatcttcaggaagatagcccttttttataagtagtgtatcaaatgatttttcattgttaggcatatctgtcgtatagtcaaaataatgatgaattatttcgtgcattttcgtaaaatttttaatttctattttcaagtgttgggcagtcgctaccatagttacatcaccaatttttgttactgatccccagattaattttttagattgttttttgaatggataatcaaaaaaatcaatgttttcggtttcttttacgtaggcttcaatatcataacaattgatgagttcttttcttttagacatattgattgaaatttcatttataagtttgtcagtaaatgcctgtgtttcgaaatataattttttcttatttagtatcataaaaaattactcactctttttttttctttcttttgctcgttttataagaaattcttgaaaatcaatcaattctttttctaattcttctatgtcatcagaacttaaatcattagtgtttaatctgaaatgtgaaataatattttgtccagcttctttttgattatttgaaggtgttgtagggttatcagtgcgtcctgttaaataatcaattgaaacattaaaaaaatcagcaatagcagtaagttcttcttctcttaatggacgtattccaagttctattttattatatacactaacattaatgtctagtgcgtttgaaatttctttttgagtgatttctctatttnctcttaattgtgtatcttttcgtaagtnttcatactatatctgtccttatctaatgtttat

SEQ ID NO: 269 - DNA, 7989 bp; double-stranded, linear
caacaccaattttatataataatagcgcagcaccagtaggcccccacctaatacttaagcttgtaattggtcgcgactcatcagtaggtgaatccttcgtaatcattcctccggtatttgtactaccatcaggatgaatgatcaaactctctcctttaccatttttccatattccaactaaagtagtaaaatcgccagcattaatcgctgtagtatctaaatcagctacagttagctgactattgtttccatcagctgtcggctcttcatttttcactgattcgttagactcgacactgctgctcgcttgttcgtttgtcttatcaattgtttcactcgttttttcattcgtctcttcaactttagaggatgcctccgttgaagcggttactttctttncttttggttcccgacaagcagttaatgataaaaccgctagcacgacaaaaaacgctaacattccctttttcacgcctattcaccccgttcaatgatctatcttactagactattgtactattaattcaactgtttagacaaatatttatggaacagacaaaagttgaacctgtcattgaatgctttgtgtcacatggacctatcaatcaactttcttttttctatgtattatatgaaaaaaagtgagccatcagtcaaaatgaccgatggctcactttctaaatcttcaaataaacgaacaaatggattattcaggtaaatctacattatgatggactttctgaacatcttctaaatcttctaaaacgtctaacattttttcaaagttccctaaatcgtcgccttctaatgttacttcgttttgtggaaccatttctaactcagtaaccgtgaattcttcaatgcctttttcttttaacgcttcttgtgcatggtggaaatcttctggttctgtgtaaacgataatttgaccgtcttcttcaacaacatcgcgaacatcaatgtctttttccattaagtattctaaaatttcatccgcatcgtcaccagcaaagccaatgatacctgtattatcaaacatgtaggaaacagcaccgctgacacccatgtttccgccgtttttaccaaatgcggcccgcacatctgctgctgttcggttcacgttgtttgttaaagcatcaacaatgaccattgaaccatttggcccaaatccttcatagcgtaattcagaatattgttcatctgctgaaccttttgctttttcaatagsgcgatcaataatatgttttggtacattgtatgttttggcgcgttcgattacaaaccgtaatttttggtttgcatgaggatcagggtctcctgacttcgctgctacgtaaatttcaatcccgaattttgcataaacacggctattgtttgcgtctttggcagcttttttctctttaatatttgcccatttacggcccatattctcacttcgctttctctgatttgttgttagtatcttatcccttgtttattatactggggaaactgatttttgttaagtattttttaggtatctggcgaaaatcgtaagggaaaccgaccaaaattttgttcttttaaagaagaatctcccatttggtatagttgatggcgcgaatatctaacgaaagcattgcgcggttttcyttagatactttggaaattaccggcaattgaatctgtgcyttggkttcytttagataagcttgtccctttggcgtaaatcctagcacatggagataactgktttgccmaacagtttcaacttcttctttggtcatatttaacaatatataggttgctaatcgttgcaatcttgtccaagtataacgcttcgttttcatacgttccattaattcgtgaaaagaacctgctgcttggatttgatcttttagtcgatattcaagtccttccgtcatttggtaaatggcttgtaactcttctaacgaggattgaacaattttatactttaggaagggccaataattttcccatgaaatcattgtctgtgtttgtaaatgttgtgcggttatagaaggcaccgttggcagcacttgcgttatttcttgttgaaaaacactttgcctaatcgccgtggcgctagcaactttcccagaaatcgttgcatcatgaaagcccgcttgttttctagcaattgggtagagcgtcatcggggttggatacgtggcattttcctttgcataactcatccccaaaatatgattaggcgaagaaaaatcaaacctgctttcaggatatacttgacgaaaaacagcagtcattttttgtggataactcaattgtttgtctgtcaatgcgtggaacgtttgatcaattaaggattgattttcttggacaaactggccgaaagccgcataatcaattgcgcttgtactatctgttccaaaacataagctctcacattgcaacgcctgcaataactttataccgcctttggcaaagtaatccgcagactgtaccgaccaagctgtcggcaattcaatgactaaatccacaccattttgcaaagcttcttctgctctggcccacttatctagtaaggctggttctcctctttgtaaaaaatttccactcattatagcaatcactacttcagctccgctttgttggcgagcttgttgggcatgatagcgatgtccattatgaaagggattatattccacgataatgccacaggctttcactctagccacctccgttataaaaaaatggacttatcagcaaagagacaaacgtttttaagcgctgtcccaagctcataagccaaatcttattaatctctttgacaaacaaagaaccagcgttcacttgtttcagttggtgcttcatctgtaaaatctgcataaactttgacgttcatgaaaccagcactttctaacattcgtaaatagttatctaacgaataggttcgttcttgatgcaattcatcataccgaacaaagtgctcatctgtttcctgttctttcacaaaaaatgttaagaaatgttcgatgctgtgttctttttcaccagcgtaactatcccatagaaaagcaaattcttctgtttgataatgatagctatattctggaaaaactgaatcaattttgtaagtagaatgaacatcaaaaatgaacgttccttcctcttctaacgcttgataaacttcatcgaacacttgttgtacttcttggcgattagccatatagcacagtgaatcagaaaaacaagtgatggcttggtattgtcccacttcagataaatctagcatatttccctgaacaaattgaactggcacttcttcttcaaaggcccgttcactagcaatcatcaacatttcttctgataagtctaaggccgtcacatcgtaaccacttttcgcaaaatcaactgctaaagcgcctgtaccacaagccatttcaagaatttgttgggttccttgtgggagatgacgattggaaaaatccaaccatttttggtataggctttcgtccatcacttcgtcatagacgaaagcaaacgtttcataggccattttagtcgacccaagcgcttagatcaaccattggggcatctgaccataatttttctaaattgtaaaaggcacgttctgaagattggaatacatggacaataacatcgcctaaatcgattaaaatccattttccgccttctttaccttccacacgtttgacttcaacttgatttttggcttcttgttcgttaatttcatcaacaatcgcattgatttgacgttcactattggcttggcaaattaaaaaataatctgctaataatgaaatctctcttacgtctaatgcgacaatttcttctgctcgttttgaatctgctgctttgacagcaatttctaaaattttctggctatctatgatagttccctcctagtaattctttcttcttttatttttgattaacgacccattgattgtaggtctctaacgtttttggataaattttatgttcttgttcaatcaaatgtaacaaggtatgtttcgtttcataagcaaccgctgcatctaagtcaacaagggcaatttcacgggcttctttcacacctgggaaaatcacgtcctggttcaatggtaatctgcgacataaataattttatctagcaagctcatcttagcagccccagttgtatgcacacgaattgcctgcaagatttcttcgtcatcaatggctaattcccgttgaacaatatccgccccaactaagccatgccaaatttcattgccatagtttaataaagccaaatcaaaaccatctcggcgaataatcaactcgaattcatcgtttggacgttctttggcgtaatcatgcgtcaaagcagcaatactggctttcgcttcatcggcaccatatttcgctgccaaggccacagctgtttcctcgactcctaacacatggcgaaaacggcgttcactcatttgcatttgaactttttgcattaataattcacgttgtgcagcatcataatttgttatccagctcatcttgatacagtcccttctcttgaatatagtttatcacattctctggaagaagatagcgtgttgagcaaccacttttgactttttgtctaatcaaagtggaactaatcgccatctgcggaacatcgacccaaataattggataggtagattccgttggataattaggacgccgaatgccgacaaattgaactaaatggagtaagtcatcaatccgatgccatttgggcaagtattccaccatatctccaccaattataaaataataatcagtatctggattggcttcttttaaagctttcatcgtatcatacgtgtaacttttgcctttgcgaattaactcaattggctcaatatctaagcagggattatcagccactgctagttctaacatcgctaaccgatgttcactgctaattgttttcttttcgtctacatgtggtggtaagtacgtaggcattaagtaaactttgtccaaacctagttgattttgaacttgatcggccatgacaagatgtgctaaatgaacgggattaaaattaccacctaacaagccgacttgctttcttgtttgaaaacgtaacggttcctcttgcaagagaacgtccgctccttgacgcgcttgtcttttttctcccattgttcatccctccaatattaaatctctttgactgctgctgaaattttttgatatttttctttacttgatggcttgaataagaccaacacgcgaccaataatttgtaccacatcgcaatgaatggctgctgttagttcttctgcaacctcttctgctacttcatctgtattttgtaataacgtaattttaatcagttcacgtttttccaacgcttcatcaatttgtgtaatcattgcgtcattcaaaccacctttgcctacttgaaaaataggttgtaaatggtgtgcctgactacgtaaataacgtttttgttttcctctaagtttcaaattgtttgccttctctctaaaatttaaattaatgcttttctacgtaaaacatcgacacctttaggcgcccaaccagcgactacaccaggttctgtgacagtaatccaacctagaccagcaaacacaatatccgttttttctttcacggaaaattcaaagcgcactaattcaggaaactcagcgacttcatcggcacgtggaggctgcaataagccaccaacatgtttttcataaaaagcatcggcggttgctgtttttgttcggtgtaattttaagtcattggaaacgtaggcaatgaaggaacttttagcaccttggacataatcaaagcgagccaagccacctaaaaacaaggtttgttcagcatttaattggtaaactttcggtttgatttctttttgcggtgcaataattttcaagtcttttttacctaggtaatgtgccatttgatgacggtgaataattccgggcgtatcgattaagaagtggccatcgtctaatggaatttcaattttatctagcgttgttccaggaaattgtgatgtcgtaatcacatcttgaacacccactgtttgttgaatgatttgattgattaatgttgattttccaacattggtcacacctacgacataaacgtctcggccttcacgatatttttcgatcgtatctaataactcttgcatttcttgtggtttcttgccacttgttagtaaaacatcaacagggcgtaatcctgcttcatgggcccgttctctcatccattgaaccattttaggtttttttaatgatttaggcaaaatatccactttattgccaactaataacacaggattatctccgataaaacgatgtagtcctggaataagagagccattaaagtcaaaaatatycmctacgttcacaatcagtgcatcttctgttcctaaaccattcaataaacgtaaaaagtcatcatctgttaattggacatcttgaatgtcattataatgtcttaagcgaaaacaacgttggcaataaacttcccctgtttccattcctttttcgaaagctgtttttggtgtatagcctaattcatgaggattttccgtttggataatcgcaccacagccaatacaatgaattgcctctgtcattctaatccgcctctccatgtcatttctggatgtttttttgataagtatttcataattttccgttcaaagaaccgattgattctagtattccagccatctgtatcgacaatcggttgaactaaaacattgcgtatacccgctgcgttagctccccgaatatctgtcataatctgatcgccgaccattaacatttcagatggcttcaagcctaattttttttctgctaatttgaagccacgtgcggttggtttcaaggcacgtgctacataatctaagtcaaacttttcaacaacgcgtttaatccggctgtctttgttgtttgaaacaacgaggacagtaattcctgcatttttcatttctaataaccaagtttttaattcttctgttccatcgggattattccaagcaattaacgtattatctaagtcagttagtactgccttaatccctagtttttttaattgtgcgggggtaattttataaatcgcatcaatcatccatgtcggtttatattttgaaaacatcgtgactcctctcactgacactatgtagtttcttcgattttaagagactgaaacataactaaacaattatgcttcagtctctacctattgtattatactgcattttactgaaaatttctataaaggacggtcgttccttgtaaaagaacaagtaaaataaaagaaaaaataaaaaaaagccacccatcaacccctgaaaagttcgttgatgagtagtaacttctaatatttgcgaaaacgttggtatcttttttctagtaacgtttccgtatctaatttagctaattcagttaattttgaaatgaacgctttttgtaacatgcgattaatttttgcttgttccagaggctgaccgttcataacttctggaattactttatctacaatagctaattccttcagctctgtcgctgtgattttcatcaattctgctgcttctttcgcacgactgccatctttccacaaaatagaggcgaaaccttctggcgaaagaaccgcataaatcgtgtgttccaacatccaaacttcatctgcgactgctaaagctaaagcaccgccactaccgccctcaccaatgatgactgaaatgattggcactttcaaatcagacatctctaacaggttttgcgcaatggcttccccttctccccgctcttcggcaccaatcccacaataggcaccagcagtgttcacaaaggtaatgactgggcgattaaatttttccgcttgtttcattaaacgtaacgctttgcgatacccttcaggattaggtgaaccaaaattacgttcaatattttctggtagatttcgacctttttggatacctaccactgtaactgggtttcccttgacaaagtagcaacacca

SEQ ID NO: 270 - DNA, 5136 bp; double-stranded, linear
aaacacaagggaaatttgattattcctcaaaatatagcggtgtgctttgtgaaaaacattggcatttagatgaacagcgctaccatgcagatcctagagcaattcattttattcgcttattttcgcaagtctcctatgaaaaagtccaaaacattcaagtaaaagaagaaactaagaaaagtattcgagaaacgattgatatgttatacgatgaatatgttggtttgcacttaaaaagtaaaaaatttattgatcaaatgaaaacgtgggaaaatacgttaaaaattccgccacgaaagaaggaagaaaaataaacatwaacaagcagacgtttttctaaaaaaaatttgacaacttccctcagacaccgtattatgatagagaagttaaatacgtacgaagaaaaagagaagtaaaaagaaccctctgttaagcgaatctgggagagtgggagccagaaacacggaacttttgaaaggcactttggagtacgacaaacgaagctgccgatgaacacatcggaagtagggtggaaccgcgataattattcgtccctatgtctattaataggcatggggacttttttctgtgaatcactacgattggcgcaaatgcgacagagtagatgatgaacagtacaaggtgaccaaagggaacgttgtctcctctatgttaaaacaaactgcttagccaaaaacatggagtagatgatgaacagcacaaggtgaccaaagggaacgttgtaaccgaataaaaaaagcaaacagttaacaccaaaagaaaaaatagtaacgtttattcaaaaaagctcaattggcgcaaaggcgacagagtagatgatgaacagcataaaaattatcccattctacaaaattgtttctctgtagccctttttaaatttacattccagaagcaaagccaatccctatgtctataaaaratattccaaggaggaaaacaatgaaaaacaagttaaccgtacaagaaatgattttaaccttgcaaaaattttggtcatctaatggctgtatgttaatgcaagcctatgatacagaaaagggagccggtaccatgagtccttacacgtttttacgtgccattggacctgaaccatggaatgctgcctacgtagagccttctcgtcgtccagctgatggacgctatggtgaaaatccgaaccgtctataccaacatcatcaattccaagttgtaatgaagccttctcctgaaaatatccaagaactttatctagaaagtttgaaattattaggaattgatccattagaacatgacattcgttttgtagaagataactgggaaaatccctcaatgggttgtgctggtttaggttgggaagtttggttagatggcatggaaattacccaatttacgtatttccaacaagtcgggggcttacaatgtcatcctgtcacttctgaaattacttacgggttagaacgcttggcatcatatatccaagaagtcgaaagtgtctatgatttagaatggacacaaggcgttaaatatggtgaaatttttgttcaacctgaatatgaacattcaaaatattcctttgaaattagtaaccaagaaatgcttttagaaaactttgacaaatttgaaaaagaagctaaacgctgtattgaagaaagtttagttcatccagcctatgattatattttaaaatgtagccatacattcaatttattagatgctcgcggcgctgtctctgtaacggaacgtgcaggatatttagcccgcattcggaatatggctcgttccgtagcgaaaatttttgtggctgaacgtgaaaaattagggttcccattattaaataaagaccaacacgtatccaaggaggcagaataacatggcaaaagatttattattagaaattggcttagaagaaatgcccgcacatgttgtcacaccaagccgtatccaacttgaagaaaaagtaatcaaatttttagatgaacatcatttagactatgaaacagtgcaatcctttgccacacctcgtcgtttagccgtgaaagtaactgcgattcctgaaaaacaagcggatgttgaagaagaagtaaaaggtccagcgaaaaaaattgctttagatgctgaaggaaattggtcaaaagctgcacaaggttttgtacgcggccaaggagttacaactgaggacattgttttcaaagaattaaatggtgtcgaatatgtctatgtgacgaagtttaccaaaggccaaagtgccaaagaggtattaacaaaattaaatgacgtgattacaagtctaactttcccggtaacaatgcactgggcaaactatgatttcgaatatattcgtccaattcactggattgtggcactacttgatgatgaagtaattcctttcaaagtgttagacgtgacaacagggcaaacttctcgtggccaccgtttcttgggagacgatgtgacgttccaacatgctaatgaatatgaagcaaaattaaaagaacaatttgtagtggttcaaccgaatgaacggaaacaaatgattgttgatcaagcgaacgctctcgctgcagaaaaaaattggcagttagctttagatgaagaattattggaagaagttacgaatttagtggaatatccaactgcatttgtaggtagttttgatgaaaaatatttatctgttccagatgaagtattagtgacttctatgaaagaacaccaacgttattttgacgttcgtaacgaccaaggcttattaatgccgcattttatcgctgttcgcaatggggataatgttcaccttgaaaacgtgattaaaggaaatgaaaaagtgttaattgctcgtttagaagatgcagaattcttttacaatgaagataaaaaattaacgattgaagcatgtgttgaaaaactaaaaaatgtgactttccatgaaaagattggctcaatttatgaaaaaatgcaacgggttgctttaattgcacaaatcattggtcgaaaagttggcttatctgaggatgaattggaagatttaaaacgtgcctctgaaatttataaatttgacttagtaacaaatatggttggtgaattcccagaattacaaggaattatgggagaaaaatatgccttattacaaggcgaaaaaccagccgtagcaacggcgattcgagaacattatctaccaacttccagtgaaggtgaattgccagaaacagcaatcggggctgttttagccttagccgataagcttgacagcgtcttttcattcttctcagttggtatgattccaacaggttctaacgatccttatgcacttcgtcgtcaaacctatggcgttatccgaattattgaagataaaggctggaccttcccattagttcaattacaaacagaagttgatgaagcagtgaatcaagatgttgagaaatatggcgttttactaaacgaaggacaagcagaagtcgttgaatttgtgaaagctcgcttacgtcaattattaatgacgaaaaatgttcgccatgacattatcgatgcagtggtgtctgctgagcaagccgatttatcgaaattatttgcttcagcgaatattttaaaaagccgttttgaagatcaagattttaaaccatcaatggaagccttaacgcgtgttattaatttagcgaaaaaaggtcaagaacttttaggtgatactgaagaagggattgatccaagtctgtttgaaaataaggcagaaaaagaactgtatcaagcagttaacgatttatctgaagcatttgcgacacgcacgattgcagaaaactatgaagcactagtaaatctacgtccgttaattgatgcgtacttcaatgaaacgatggttatggttgaggatgaaaaagtcaaacaaaaccgattaaaacaattaatgcaaattgctaaaatggcgttatcaattgctagcttagatttattaattgtgaaataaaaagcgctgtttttcgaccgctaaggaggaaccgacagtatgctagaaacaacatttgaacaaattttaacacaattatcaaagccagctgttcgtgcgctaacgaatgaaaaaatcgacagtgtggatgaactctacgcacgaggccgaaaagcgttactttcgttgcatggctttggtccaaagtctattcgaactattgaagagatgactgggaaagaattgaagtaaaaaaaggatcgccgtttagaggcgatcctttttttatttacgtttttgttttccagcattacgacctttattgccgtttgcttttggttggttcgttttttgcgttactttgtttgtttcttttggtgtcacatccttgataggagtaaccacttgttttggtgggttatttttcaattcttcttgtacttgttttttaattcttggacgtaagaggatatttgtgatggcagattgaatacatgtgaaaataccaccaactacccagtaaagcgtacgcctgcaggtgagctaaaggacatgaaaacaatcattaatggtgaaacaatcagcattgatttcattgttttcttttgttcttcaggaataccaatcattgaaatatagccttgagctaaataggctaaaccagctaatgccactaaaatcatatttggttgccctaaattcattcctaagaagcttgccgtggcaataccttttgtataacgagcagcaaagaacagagaagagaaaataggcatttgaattaataaaggcaaacaaccaattccgccaaccatactcacattgttttctttataaatcttttgtagttctgcttgtgcggccatttgttcttcacgcgtacttgcttgtttcatttttgcttgtgcaacatccacttggggtttgattgcttgcattttttccgtttggataaagctttttttcgattgatgtaagcctaacggtaaaataatgatccgtacaataatggtgataaaaataatcgcccaaccatagttccaattaaagttatcgacaagataagtaattgcattactcatcggtaaaacaaggaagttatagacaaaaccttcaccagttggttgtccatctgctcctgttttcacacagcctgataaaaacattactaaaaatagtaagccagagccgtaaagccatac

SEQ ID NO: 271 - DNA, 13808 bp; double-stranded, linear
ggcgaaattgttgaaaaaaaactagttacagcacctctgtcaactgaacaaattgatcaagcaatggccgaaatgacaggtgaaatcacacaaatcccaccgatgttttctgcggtgaaagtcaatggtaaacgtttatatgaatatgcgcggaacggggaagaagttgaacggccccaacgaaaagctatgatttattcatttgaacgcactagtgaaccaatttttaacgaatccgctcatacacaaagttggcggtttaaagtggtctgtggcaaaggaacctatgtgcggacactatcagtggatactggcaaaaaattaggctatcctgcccatatgtcggatttaacgagaacggcaagtggcggtttgcaagctgcgcaatgcttaacgttagaagaagtagccaaacaaatggctgctgaaacaatcgatcaatgcctgttgcccattgagacagcagtagaacaattcccacgaattgatttatcagatgaattgtatcmaaaagtaaaaaatggcatgcgtttgcacmaaaaagaattaggrataaaggcaatgccagaatccttagtcgccttattttaccaaaatcaagtggttagtttatacatgccacacccaacgcatgataaattattgaaaccaagtaaagttctacggaacaattaaataaaaaagaaggaagtttttgcacatgcaagttattcaactacatcatccctatgaacccaatcaaattcctaatgaagaagtcgtgatggtcctaggcttttttgacggtgttcacaaaggccaccaaaaagtaattgaaacaggtaaaaagattgcggaggaaaaaggcttgaagttagctgtgatgaccttcaaccaacacccatcaatcgtttttcaaaaagttttaccagaaaatatgaaatatttaactagcttggaacaaaaagaacgcctaatggccaacttgggcgttgatattttatatattgtcgaatttacttcagcgtttgctcaattaaagccgcaagattttgtcgatcagtatatcgttaatttaaatagtgcagtggcagtctctgggtttgattatacgtatggtcctaaagaaattgctggagtcaaacagttaccaacttatgcgcaaggccgttttgaagtggtgacagtaccaaaagaagaaatgactggtgccaaaattagctcaacaagaattcgcgaaaaaatggaagccggcgaaatggaggaggtcacggagttgttaggatatatttatgaaacagaaggaacagttgtccatggcgatgctcgtggccgtttattgggtttcccgaccgctaatgtcaaagtgaaaagcaccgtgcgtttaccaagaattggcgtctatgctgtgcaaatcgaagttggtggcaaatggtatgtcggcatgggctcaattggtcataatgacacctttggagaaggacgcgatttaaccgtggaagtctatattttggacttccatcaagacatctatggtgagcaagtggtggttcgttggaatcattatttacgtgaccaagtgaaattcaatggggctgaagccttgatcgaccaattaaaacaagatgaacgagatacggctgactatttccaacaatctgaggacaaataatgaagattcgtcaagaaaaacctgcagagtatcaagctgtagaacgtttaacgtatcaagcgtttaaggaattaaacttgaccgaaaactggcgtcccacagagcattttatcgtgcatttattaagagaaagtgccgactttattccggagttgtccttagtttcagaaactgatcaaggaaaattaacgggtcatattatgtcttcaaaagccaaactacgattacctgatcatacagaaaaggctgttttgaccgttgggccgctaagtgtccatccagaagcacagaacacgggcgtaggctcagcgttaattaagcattctgttcagaaggccaaagaattaggcatcggcggattgattatcctgggccatccaacttactatacgaagttcggttttgttccagcgactacttttcagattacgttaccggaaaaagaaacatcagaagcattattggctttggaattactgccaggttattttggcacaagtggtggggagtggcatttttcaacatgctttgcttatccagaaacacaccctgcagaattagaagcctttgaagcagaactcggaataaatgaataaagaataataagacgcgacaactactagttaagtactggtggttgtcgcgtctttactactttttattacaaagtagttgacagaaccggtactcagtattattatgtagtggtacgtagtactaaagagtagtttagggaggaaaagcagtgaagcagacagagttgctaaaaggcattttagaaggtttagttttagccatcatccaaaggaaagaaacatatggttatgaaattacaaaaattttaaatgaccaagggtttactgaaattgttgaaggaaccgtttatacgattttactgcgtttagaaaaaaatcaatgggttatagctgaaaaaaagccktcagaaaaagggccaatgcggaagttctatcgcttaacctcatcaggagaagcagaactcgctgatttttggcagcgatggacgttgctttcaaaacaagtaaacaagatgaaaaaaaatggagggatagagcatgtcaaattttaaagcgttgatcaaaaaagttgttggggataaaaaagagtacaaagaatataaacgacggattgcagcattaccagtagagtatcgacaagtatttcaagaaattgaaaaatatgcttggcatttttcagatcatagtggagccaatatgttcaatgcgttgactgatttacttgatttgtttgaagaaggagctgctaacggaacacctatcaaaaatattacgggagaaaaagtaggtgattttgctgaaacaattgtcaatgaagtcgctggcaaatggactgataaacagaaagaaaaactgaatcatcaattttctaaacaatagtcaaaacaaaaaaaggagaataaacatggttgaaaatttttttaaagaaggaaagttgctggttattcccaagaaaaatgcgaaaaaagtccaagtgtttcaacgtgtggccaaccaatttgaatttgggaaagaatatacggaaaaagaagtcaatcagcgacttagagaaatctatgaagattatgcacttttgagacggtatttagtagattatcagtatttagaaagagataagtttggaaaaatttatcagaaatgtgagcaacacacaaaaattatataaatggctttttttaaaagtagcgaaactaagtgaaatgaaccaagtctagctactttttgttatgtaagcttagtaatagttctataaaaaactctctatttgttttctaactcagactggtaagattgatttaattagaaaaagatagaggtgagagaatgaatctacgtactttaggtctaacaaaaattcttttgacctttattatattaagtattattggcgcgttaatgatttatagcgccagtagctatgacttgttgatgcaaggcgtgaagcccactgctgtgtttattaaacaaggcattattatgtgtctcagctgggtgctaatgttcgtgatttacaaagttcgactagaagtgttatttaataagaaaattgcgattggactgcttttagtttcggtactattactgttaatggttcgactacctttttttggtgtagcagtgaatggcgcacaacgttggatttctctctttggaatccagtttcagccatcagaactttgtaattttgcgattatttattacttgagctgttatttaggtgaaaaagaaaatggcttgacaacgaagcagttaaggaaacaatggctgtttgttttggtcgttgcatttttagttttgattcaacccaaagttggcggggccattcttattttagttattggcagtgtcttgattttctcagcaagtattcatgcaaaatttagtgtaattgctgcggggattgtcgttgctagcgcggcgcttctttctaaaataattatttttctaggcgatcaccgctacttaccacatttttttgcgcatgtgtatgaccgcttagttgttttgaaaaatccgtttttatcctttcatgatcgaggatttcagccttcaatggcctatttagcaatgtataacggtgggttttggggcactggactagccaatggtatggtaaaaaaaggtggcttgccagaaggtcaaaccgattttatctttgcggtgattgtggaagaacttggtttgattggcggcttactgttgctatttcttttgttatttttagcggcctcgattttgcggagtagttgtgtaataaagaatcattgttacggcttgtttttgttaggggtcgggaccttgattttagctcaaacggcgattaacattggtggcgttttgggtttgattccaatgacgggaattcctttaccgtttgttagttacggtgggacaagttatttaatcttttcagtggcattaggaatcgtcattaaaattattgcaaacgaaaggcggcagttaaatggtcaatacaaaaaaattcaacttacatcttaattatgatttattattgcccatttttttactcacacttttatcttctggtgtgcaatattggattgccgttaatgaaggaaaagatggaactgtgccagcattaaaacaacttttctttatttttgttggctatgcaggcatgtttttagctagtcggctgtcacagaaatttatttggaaagtagctccttttttctatgggttttcattaatcttaatgagtgctttgtatttttcctatgacaaaggaatgtatttattgacgggcacaaagcgctggttagatttagggtttattaaatttcagccatcagaaattgcgaaaattgcgtttattttaatgttggcaaaaattattgtccaacatgagcaacaagactggtctgataaatggcgttcagacaagcaacttctaaaaaaaatcgttgcggttagtgtccctgtttttttcttgatggcggtacaaaaagattttgggacatcccttgttttcgtaacgattattctatctcttttagttatttcaggaattgatcgcaaaattttaatcattattttcagtgctttagcaacgttaggcgtggtcttgattctgttagtctttacagagtgggggcacaaagtactcttctttttacattttaaacaatatcaattggatcgaattttagcatggattcatccctatgattatgtcgataaaatctcctatcaacaagtacaaggcttattggcaattggttcgggtggtttatttggcaagggtgtgcatgggattgaagtgtatgttcctgttcgtgagtctgatatggtttttacttttatcggggaagcctggggctttgtgggcagtgccaccgttgtttttctctatttttacttgttttatcaagttttagtagctggcttgcggagcaattcgcgtttttgtatgtacatctgtgtcgccctcattttttcgctggtctttcaaacggtggagaatatcggtgcggtgattggactgttgccgttaaaaggtattccgcttccgtttttaagtcaaggaggcacttcgttagtgatggctatcacttctttaggatttgtcaaaggaagagaagccgctacctgaaaacacaaataaaaaccaagactggaactcgcttgccgacaagctctagtcttggtttttactattgaaattgtttttggcattcagccaaaagttgttgaagttgtcgactcatgtaacgttcttttaaataataaactgccatgtttcgtttaggtagttcttggtaagttagtgtatggatcgaattgtctaaaagttgaatatttgtgtattcggggacaatagcgaaactatcggaatgagacaccaagtgagtaataagtgaaagagtatccacttgaatgactttctctggagaaaaattagaaaacgtatatctagccaattggttaatttgttttgctcggaaaattcggtatttaaacggacgaaggggtacattgttagttcttttaaaatttcttccgtcgtggcttttgccaaagctggatgatcgtttcttaaaatgaattgataatttgctgtaaataaatcaattttaccaatatgttcaggtaatggtaagtcagcaaaggaaataccaaaatctgcatccattgtttccaaggattgaagaatattttctgtaataatagtgtggacttgtaagttggatgaacgatccgttaatgttgtcattagtaagtcattcaatttatattctaaatcacagagataagtggccacataaatatggttggaagaatgattaatttcttttagctcttcttcaattgagaccaactcattggtgatgcgccaacawtattttyctaaaattaawccagctggcgttaaggtggtagtttggccttggcgattaaaaagttccgcgcctaacgttgcttcaagaatttttatttgcttacttaatgcagcttgagaaattgctaaattttcggctgctttagtaaattgtttcactttgcataactctaaaaaataatgtaaacgaaatagttccatgggaattcctcctttttctattcctagaataaataacgtaattgttcgaataaataacggtgtgcttcacaatgtccgtgatgattattctgaactaaatagatggctcgttctggactatcttccagaggaataccaactaagttacgtctgtttagttcatcagtgagtgaatagggaaggatgctacaggctttttctcgttggaccatgtctaagactaaatgaagagaaggaagttcgatgacgatttgccgattttcccaattgattttacgttcccaacgtttgaacacttttttttcatatacttgatcggaatatgcagcaaaaggtaaagaacgaatttcgtcaatcgtcacgctatcggcatgggctaaaggatgatttttattgacacaaaggagatagctttctgtataaattaattctttctctaatggaatcgaggtatccaaaaatatcccaatcccaatgtcaattaaatctgtttccaaggctgtttcaagatcgtaataatacttaaaatcaatacttacatacggataggattgattaaataacaacaagacttctccaaatgctttatctatatcaattaagtttgttccaatccgaatggtcgttgtcgatccttgggtcactaattcattaatctcttcttgcgcttccttaatgagtgcaaaaatcatttctgttcgcttggcgacgacttcgcctgctggagaaagccgacaatgtttcttgtctcttaaaattaatgaagcacctaattcacgttccaactccttgagctgggtacttaaataaggttgactcgtatggagcttttgagaagctaaagtaaaactcgcatactttgaaactgccataaaatattctagttgttgtaatttcattttcctcaccgccgtttctttaactatacaaaaaatagcagaagaaaagcttctcgacaaggctatctgatggtctttagattaatttaaccagttatgattctatgaataaatacgaatcataccagaaaaccatagtaaataagcggattatttttctttttgttactgaatggacaaaaagttatctactaaaaactttttctatatcgttattttttcatggaagaattatacttgctgttgtaattaaataagatttgttaggtgaggctcctatacaaacataggctactgcccaaaaatgtcgagagacgccaatgggtagaacaggaactgtcgaatgaaggcttttcttaaggtagctaaaagcaatcgctttttacgttgtatagtgctaaagctcaacgataagaacgattattctttgacacgttgagttttcagcgtgtctttttttgtggaaagggtgaggaaaatggaagatgaaccgatcgtcaattcaagtcaaccacagataaatgaggtgaaagaaaatggaaaagaaaatgcgtcacttgggccatgactatagttacaaaaagtttgcccattcagaagtagaaaaagttttacaacgttttggctcaacttgggatggcattaaacaccaagatattgaagaattacaagaacgttatggccgcaataaaattatgaatgaaaaaaaagnttcgcggctgcgactttttataaaatcgtatatcacgccgtttactttggtgttactagcactagccacgatttcattttttacagaatatgtctatgctgcgccagaggaaaaagatgttactggcgtgttaattatgttagcgatggtcatcttaagcggcacgatgagttttgtccaatcagtcaaatcaagcaatgcagttgaaaaattacaaaatatgattaaagttacagcgacagtcattcgtgacaagaagcaaatggaaattcctattgaggaagttgtgtgtggcgacttagtccaactatccgctggcgatatgattccagccgatttacgtttaatccaatctaaggacttatttgtttcccaatcatccttgactggagagagttttcccattgaaaaacacgcgactcatcaaaaagatagtgatcaaattgatacagaatacgacaatcttttgtttttaggaacaaatgtaattagtggcactggtttgggcattgtcattaaagttggtaatcaaactttattcggaaggatggcttctgataacggagaagagcagcagcagacgagttttgaaacaggaattaataaaacaacgtgggtgctgattcgctttatgttggtcattacgccaactgtttttctaattaatgggttaacaaaaggtgattgggcggaagcgttaatgtttgcgattgccacagctgtcggcttgacaccagaaatgttacctatgattgtaacaaccaatttagtcaaaggttctcgagaaatggctaaagaaggcacgattatgaaaaatgtcaatgccattcaaaattttggcgggatggatgtactttgtacggataaaacaggtaccttaacacaagataaagtaattttagaataccactataatattgggtgccaagaagatcaaaaagtcttggatttagcatttctaaacagttattttcaaacaggtttgcgtaatttaatggataacgccgttattcaagcggcgmcacargaaagtgatatacaatcagatgatttttataaagtagatgaaattcctttcgatttcaatcgacgtcgaatgagtgtgattatcaaagagtttaaaacgcgagaaacacgcttaattaccaaaggggcggttgaagaaatgctcttggtctgcacacaggtacttttaaatggcgaaattgtgcccttaacagagacgctgcgtcaaaaaattaccaaagacgttgaagctttaaatcgagatggtttgcgcgttctagcaattgccgataaaaaagtcgaagcggctgaatgggagtatacaactaaagatgaatcagagttgattttacaaggctatcttgctttcttagatccaccaaaagaaacagcggcggcagctattcacgccttgcatcaacataatgtagctgtgaaagtattaacgggggacaatcagtatgtgacgcattctgtttgtaaagaagttggtctggctggcgaaaaaattattacaggaaatgaacttcaacaattaaaccaagaagaattaagaaaaaccgttcaagcgtataatattttcgccaaaattacgcctgaccaaaaagttcgtattgtaaatgcgttaactgaaaatggtcaaactgttggctttttaggtgatggaataaatgatgctggagcaatgcgtgctgctgatgtaggaatctctgttgatacagctgtcgatgtggcgaaagaatcggcggatgtaattttattgagaaaagatttaatggttttggaaaaagggattttatctggacggcgcgtgtttacgaacacgatgaagtacgtcaaattaacagcaagttctaattttggcaatgttttttccgtgatcccagcaagtatctttttaccatttttaccgattgctccgattcaatcgctattattaaatctaatttacgatacttcgtgtatgtcagttccttgggacaaagtagatgaagaatacgtagaaaaaccaaaaaaatgggaaccaaaatcaattggtaattttatgcgttggtttggcccaacgagttctatttttgatattgttacctatttatttatgtatttcattgtgtgtccggctatcctaggtggctcattctttgaattaaatggagcagatcaattgctctttatcggtattttccatgcagggtggttcattgagtccttatggtcccaaatgctcgtcttgcatttcctacgaacagaaaaaatgcctttccttcaaagtagtgcttctggaattatgacgttagcactacagcagggattgttctcgggaactgttttaccctttaccgctttcggtgcagaactaggatttgtcggtttatcaccaagctatttctngtatttaatcccgacaattgttgcttatttagcactggttgcgttcattaaagttttatacgtcaaacgttacggtcaattactgtaactgatttgtactattatatatagaaaaatttttttacttttctttcaaggttgaggaggtgtcggtttttatgacagctcctctttgttgttttaagtgactgtgcgaatttttttatggatttatttgtcatttacagttagtatggctagtagagactttccaaaaagaacgagctttttggtaataaggagataaaacgagctaatgaccaaaacaaaccaactttcaacttcaacgccgatgttcgatcggtcggcctatattcatattccattttgtgagcatatttgttattattgcgattttaacaaggtctttttagaaggacaaccagttgatgaatatattcagagtttattaaaagaaattcaacttacgcaagcattgtatccagaacaagaaatgaaaaccatctatattggcggaggcacgccaacttcattatcagcgaaacagttagatgtgctactaaaaggggttcgcgaacagctaacgtttgatgaccgaaatgaatttacggtggaagcaaaccctggtgatttaacccaagaaaaattacaagtcatgaaaaactatggcgtcaatcgtctttcgatgggcgttcagacatttgatgatcgcttgctcaaaaaaatcggtcgcaagcacaccgccgcagatgtttatgaaacaatgaaatttttagagaaagaaaattttaccaatgtcagtattgacttaatctatgctttacctggacaaacattggaaagttttcgcgatactttgacaagagccttagcattggacttgccgcactattcgctttattcattaattcttgaaaataaaacaatgttcatgaactgggttcgtcaaggacggttacagctgcctgaagaagaaatcgaagcacaaatgtttgacgaaacgattgaagcaatggagaaaaaaggacgtcaccaatatgaagtcagtaattttgctttaacaggaaaagaaagccagcataatctggcttattggaataatgaccactactatggatttggcgcaggtgccagcggctatcttgggcaaactcgttacaaaaatcacggtccaatccaacattatttgaaacccttgcgagaaaatcaattgccaattgtggagactgaagaattaactcgtctaaatcaaatagaagaagagctatttttaggcttacgtaaaaaagtaggcatttctaaacaaaaattccaacaaaaatttcaggaaccaattgaagcaatttatggagaggtcattcaacgcttaatcaaagaagaattattaattgaagaagcagatatcttacgtttaacgaaaaaagggctatttgtggggaataatgtttttgaagcatttttgttaagtgaaaaagagtaaaaaaataaaaaaatcatcgaagtgtgacaaagcatttcgatgatttttttattacaaaagttggtattgatggtttttgaaggtggtttgcagcgattagcactcttgcgttaagagtgctaaaaagttgcgtatttcccttgacaaaaaggtaaggacttgttatattagtatatgtagttagcacttagatgttaagagtgctaatgaagggtggtaatamcgatgattacagaaagacaacaaaatatcttgagacttatcatccaaaattacacgaacacgggcttacctgtcggttctaagaaattgatggaggatggcattgcctctagttctgccacaattcgtaatgatatgaaagcattagaggaatacggcttattagctaagacccattcttcttcagggcgaatcccctcaatggctggttatcgttactacgtggatcatcttttacmaccmacacaagtagaagagaacgaacttagagaatccgtcaatcttttggaaaagaatttcatgagattaatgatattattcgacaatcagctgaaattctatcagaattgacaagttatactgctttttcattaggacctgaagtgaaagaacggaaattaaccggctttcgaatggttcctttgaatgatcggcaagtccttgctattatagtgacagataaaggcaatgttgaaaaccaagtatttgccattcctgccgctgtttctagccaagatcttgaaaaaatgacacaaatcatcaatgataagttggttggacaacctttgttgaccgtttatcatcgtttgcggacggagattccgatgattttacatcgctatttccaaacaccagaaggaatgatgaacttattcgatgagatgttaggacatgcctttgaagaaaaagtctttgtcggtggtcgcatgaatttgttagattttggcatcaaacaagatattgaacaattgaaatctgtctattcctttatgcaaaattctgatgagctgacgcatttattaaatggttctgcaacaacagaaaatccaattgtttttcgtatcggctcagaaattggcaacaatctcttagaagatatgagcatgatcactgctacgtatgaagtatcaggacatggcaaaggaacaattgccctgctaggaccaaccagtatgccgtattcaaaaatattcggtttggtagacacgtttcgacatgagctagcttcacaactaggtgactattaccgttttttaggtaattaagcaaaccttgttaggataagaagtagatgcataaagagaaaggaagttgctgaagtgagtaaaaaagaagagaagcaagaagaattacaagaagaaatggaagctgttgatgctgctggcgtttctgaagtagaagttgaagcaacagagattgaaaatcttaaagcagagctttccgaaatggaagacaagttcttgcgggcaagagccgaaattgctaatatgagcmatcgaaataaaacgracgagaattattagtcgttccgctcacaagattwggtaaagatttaccactattgtaatt

SEQ ID NO: 272 - DNA, 3379 bp; double-stranded, linear
aataaagcatcgttacgctctttaattttagcagcagaattcgctgtgattattgctgtactttcacaatttacaattccattggggattgtccccttaactggacaaacatttgccatcggcttaaccgctaccgttttgggcaagcgaacggggacctacgctattttaatttacttcttattaggattaattggtttacccgtttacgctgggatgtctagtgggttcggtgtactctttggaccaactggcggctatttaatcggatttatctttaacggcttattaactggttatattttagaaaaaacaacctttaactatacttgggccattatcgcaaatattgccggcgccttagttaccttagttttcggtatgatttggttgaaatattccgcaaatctgccgtggccaaacgctttcgctggcgggtttgctccgtttattattcctggtatcatcaaggctgtcgcagctgcttatgttggtattttaattcgccaacgctttatgaaacgttttttagcacacctttcttaaggggaaaacttttttcttttccttgtctgtagtacactaaaaggacaaaggagtgaagtccatgtcctcattattaaaacgattggttcagttggttttgttagtcgtcgctgtcttgctgattcgacactatgttttctcccctgctgcggtgaacggctcttcaatggaaccaacacttcataacaacgaccgtttatgggtgacctcgattaaaaaaccacagcgctttgatattatcgctttccctagtcctcgcaacggccaacgagtagccaaacgtttaattggtttacctggcgaaacagtcgagtatcgcgatgataccctttatattaatggtgtatcactcagtgaagattacttagcaagtgctaaacgaaatgtctctaaaaatgaaaattatacccaagattttacgctagagaccttagaagccacccaatccctgaccgttccagaaggcatgtattttgtcttgggggataatcgcccgcgctcagacgacagtcgttattttggctttgttaaacaagcgagtgtggaaggtgttttgacttttcgttattatccattagataaaattggctttccataaaatagtaaaccgccctcaaaaagtctaactttttgggggcggtttactatttttttaaggtccagtgactaagttccacgtcaccgttccttgatatttctcatttattttcccttgattggcagggacttctaatttcacattggcaaaatcaaaatctaattgatagacatcattacctgtaaattggttattaagaattactggtgtagatgtaccgtcactcgtcaaagttaaggctttcgtaaccccaactttatttgttaactctgtgacttgattatagttttcgattgctataacatccgcacttcctaataataaacgcgtactagttggcaaactatcagctgacgctgttaactgtgacaattgtgctgttaactgccaattaggttggcttgtctttattcgtagatatggattacgtgtgccgctgccatagtaatcagctgcttttttcagtccgtactgcttagtgctactgttaatcgtaattttcccaaaatcaaacattggtgtactaatgaaaccttcttctactggtgttggcgtaatcgtttgatcttctccttgaatacgtacaaagttactagctgtcactgcagaaaaatttccactagctgtcatttctgcggttaaaagttgtcttggttctcccgtaattttcgctgtgttcactgtcactaaagttcgccgttcacaggaatctctatatctaagttaactcctgcttgccattgttctgccgtcactagaataattttatttggtgtattaccaatgcgaacagctaattgtgttggtggtgaaatacctgccgcccatttggcagttggggctagtttaacgttggtcaatggaacttcactggtgttttttagtctaactgtccaaaccatagaagcttcatttgggatcacttctagtaaccgactaaccgtcatttctgctgttggttggacttcctcatagaccgctgtcatgtcatctttatcgtcgtaagtcacggcgtaacttggtgttttagtcgttgtcaaggtgcctggtttggttttacctttgtaccagcctctgaacttatagaatttgtctcctgttgtataagtgtctggtaaggctttcgtactagcgtaagtgaaattatcactatcaatcactgtttgttttccttgcgtgaagcctgttggcggtgtaattttagcgccgcttggatccacaaagttttcagtgactcggcgattttctaaataatagtagattgttccctctggagaagctaggttatagttttttccgactgtccctgaataaattcccatagcatacaacgtgttattcgggtcccatgtccaaaaagctcgtctggttctaaaaaaagttccagcgtcagttaatttgaaggcttctgctccgtcagcttgagaaacaaccgtatatggcgcttctatatttttccggatctctttgctcataggatactttgttttgtctcccgtataagtagctagcggtgtaatcgacattgtcttatattgtttaggaattgtatgattaacagaccttgcaccgtatgtcttaagcttatctatcgggaaatcatatgacttgccaggaatcgataatttttttaatttactcatcacttcatcagttccttggattttccctaatactgttgattcagtttcgtcactttcacctaattcggcttctacagaaaagcctgctgtattcaataggttatctgcctcatcaacataaccaaagtacacatctttggctggtaaattatacgttttcatcacgacttcttcatagacaaccgtcaaatcatcatcatcattataagtgactggataactgggagctttagtcgtcgtcaaggtgtctggtttgtttttacctttgtaccagcctttgaactgataggttttcgtgccgactttataggtatctggcaaatctccgctttgcttaaaggtgtacgaatcactagtaattactgtttttttcccttgggcgaaacctgacggtgcggtgattttagtaccattggtatctacgaagttttccgtaacacgacgattttctaggtaaagatacatacgtgcattttcatctagtgtatagacactcggttctactcctttaccagtaatagtcgcacttaatagtgttgcaagtctaacatttataggcattgatgaccagtatataccgctcatcgtaaac

SEQ ID NO: 273 - DNA, 1314 bp; double-stranded, linear
tagattgtttaaaaaaactatcgaataatagagattaagcttgcattttagcggtgtttcctgnaaagtaagcttgtgtggaaacacaccatctatcacttggtttagcgagtcaccaacgcttcactcagtgatcagacgaataatagagaaagaggtggaacaaatggcaatttcacaagaaagaaaaaacgaaatcattaaagaatacgcacgtcatgaaggagatactggttctccagaagtacaaattgctgtcttaactgaagacattaaccaattgaacgaacatgcgcgtacacacaaaaaagatcaccattcttaccgtggtttaatgaaaaaaatcggtcaccgtcgtaacttgttagcttacttacgtaaaactgacatccaacgttaccgcgaattgatccaacgtttaggattacgtcgttaatcattacgtataaagcgaggttcaatcagaatctcgctttttatcttattgtcactattgaaggtcctctttggaaagtttttaggaactactaaccaaatgaaagagcagcaacgacttgttactttttcatttgtttagtagccgtctgacttttccaaagagcaagagtaaaggagaagaattatgacagaaaaacaagtctttaaaacaacttggggcggccgcccactagaagtagaaatcggccaattagccaaacaagccaatggagctgtcttagtacgttacggcgatacggtcgttttaagtgctgctgttgcctctaaagaagcaaaagatgtagactttttcccattaactgtaaactatgaagaaaaaatgtatgcggtaggaaaaattcctggcggcttcattaaacgtgaaggtcgtccaagtgaacgtgcgacattaaccgctcgtttaatcgaccgtcctattcgtccaatgttctcagaaggcttccgtaacgaagtccaaatcacgaacatcgttatgagtgtggagcaagactgtacaccagaaatggctgcaatgtttgggtcttccttagcgttacaatttcagatattccgtttgatggaccaattgctggtgttgacgttggtcgtattaatggcgaatatgttttaaatccaacggtagaacaagcggaacaaacagatattgaattaactgttgctggaacaaaagaagccatcaatatggttgaaagtggtgccaaagaagtatcagaagaagatatgttaggtgccttacttttcggttttgatgccattaaagaactagtggcgttccaagaagaaatcgttgccgctgtagtaaaccggggatcttaa

SEQ ID NO: 274 - DNA, 1234 bp; double-stranded, linear
gccgttttgcatacagaaggaccactgttagtcatggctggtgctggtagtggaaaaacgcgggttttaacacaccgaattgcctatctaattgaggaaaaagaagtaaatccatggaatattttggcgattacgtttaccaataaagctgctaaagaaatgaaagagcgtgtaaataaattactggaaacgggtggcgaagatgtatgggtctccacttttcactccatgtgtgtaagaattttacgtcgtgatgtggatcagattggttacaaccgtaattttacaattattgacccatcggaacaaaaaacattaatgaaacgcatcttaaacgacttaaatattgattcaaaaaaatatgatcctcgctcaattttaggtacgattagcaatgccaaaaatgaattacaaacgcctgaaaaagttgctgaaatgcaaggttccttatatgaagaaattgtcgcaaaatgctatgaagcctatcaaaaagaattgcgcaaaaaccaatgtatggattttgatgatttgattatgaatacgattcgtttatttaatgaacaaccagatacgttggctttctaccaaaataaatttcactatattcatgtggatgaataccaagataccaatcatgcacaatataccttagtcaatttattggctgcacgtttcaaaaatctgtgtgtcgtaggtgatgccgaccaaagtatctatggttggcgcggggcggatatgcaaaatatcttggattttgaaaaagattatccagatgccagtgtaattttgctagaacaaaattatcgatccaccaaaaacattttggcggctgcgaatgatgtcatcaaaaataaccgtaaccgccgcgagaaagaactgtggacagaaaatatagacggtgaaaaaattgtctattatcgcggggacacagaacgggatgaaacacaatttattgtgagccaaatccaaaaagaaatgcgggaaaatgaccgaatttatggtgattttgcggtattatatcggaccaatgctcaatcccgtgtagtggaagaaatgctcttgaaatctaatattccgtataccatggtgggcggacmtaaattctacgaccgtaaagaaattaaagatattttggctwattaagtttgattgccaatccagatgatcgattagttttgaacgaattgtcaatgaaccaaaacgagggatcngtaaaagtcaattggaaaatnac

SEQ ID NO: 275 - DNA, 6415 bp; double-stranded, linear
aaaggaccgcctaaaccaacancgacctgtcggagcgnacgatcattttagayccatgcccgttsccaaatcacccgtcgagaatcaatctttaattcatttccttgctgtaaatgattatctagtaacgcagctaaggcattattggctgtcgtaatcgcatgcatatcaccagtaaaatgcaaattgatttcttccattggtaatacttgtgcgtaaccgccacctgttgcgccacctttaatccccatcacaggacctaatgatggttctcttagggcaataactgtttttttattgatttgatttaatgcatctcctaaaccaatggtcacggttgactttcctkctcctgctggtgttggattaatcgatgtaacgaggattaatttaccttctggttgcgcttctaaggattgaagcgttggaaaatctattttcgctttgtattttccataaagttcgagcgaatcttctgaaagaccgattgtttcggcaatctcttgaataggttttaatgttgctgcttgtgcaatgttaatatctgtcttcataacggaccccttttcaattctttatcgtctttgtgacacattgtttcttttaaattatagcttgtattgaatagaatggctagaataaccttttttaaacaacccaaccattgacgtttggtagccttttctcgtataatgaaagtgtctttacaaatctaaaaggagcgtgaattggatgcaaaaaggaattgtcaaatggttcgataacagaaaaggttatggttttatcgtttacaacgaagaagatgagatttttgtccacttcactgctatagaaggtgatggattcaaatcacttgatgagaatcaatctgtagagttcgagataatggaaggcaatcgtgggctacaagcagcacatgtcaaaaaaatagataactaaaaaagctgaaccaacagcgcttagctccaaaaagtaagtaaacgtagcgtttgtttcagctgattattttaagattttgagagtgggtcaccagtcgtttcgacttatgactcactcttgtttttttcttcttttttatgaaggcccaaagaatgatcttctgctaccttcaattcaggcttttttaccttaagtgcctcaagaaataacggaatcgttttctttttcattaaaaagacttttgagccttccttaaattctgaggaaaaaatttcgatgcttttttcattgtaggttactttttctatctgagaaagcggaagtgcttttttgcgaaaccacaaaacatctctgacaattaaagatgtttctgtcatattaaaagaccgcgcaattcctagataagcaaacacaaaaaatggaaccatcaccagattactaatcaagtaaggaccattattttccaatgctaaaattaaactaataaataatatacaaaatgtgcaagaccagtaaataattgttggatgctaattctgggctggccaataggaatttctgttttttcataaaggtgccctcactacttctggatcaacgccgctaaatttaaatatgttataatagtaacatactttttttaagaacmaaaagaaattaggagtaattttawgttaagaatttatgtagatgctgcaacaaaaggcaatccaggtgaatctggcggcggtatcgtttacctcaccgaccaatcgcggcaacaattgcatgtgcctttangcattgttagtaatcacgaagccgaatttaaagtgctgattgaagctttaaaaaaagcgattgccaatgaagacmatcaacaaaccgttcttctccactcagatagtaaaattgttgtccmaacmattgaaaaaaactatgctaaaaatgaaaagtaccagccttatttagcagaatatcaacaactaganaagaattttcctttgctcttaatcgaatggctacctgaaagtcaaaacaaagcggccgatatgcttgcacggcaagcattacaaaaattttatcccaataaaaagtagcactgtttacttaatgcttttcctttattaatttgataattaaacacgtggagcaaaaattccaagtgatttttgctccacgtttaaaaacagataaacggttctgtctcgacttcttcttatagccacttattcttttgtcgttattyccgcaaatkgcccattggttagcgaaaggattgcttcaggcgctaattcaatttgcatgccacgtttgcctgcagaaacaataattgcagaatattgttgagcttcttcagccaaataggtgggaaattgttttttcatcccaattggtgaacagcccccacgaatatagcctgtggttgcttctaaatcttttaagtgaagcatttctacctttttgttgccactagctttcgctaattttttcaaatctaattcttgattaccaggaatgacagccacgactggacctgttttattacctactgtaaccaaggttttaaaaattcgtcctttttcaatacctaaactttcagcgacactttctgcacttaaatgatcttcactccaagcgaattcatattctttatatggtactttatgttgttccaccatgcgcatcgcattcgttttttgttgtgtttttttctttgccacttttttcaccttctgaatcacttgttttgttcgaatgtctttaaataatttcttaatacttgtacggatagttggcctggtgcagacgcttgctgggcggagccaaaagttagtgccgatccgaacagttgacctgttacgcgactaatcatccctaactgtcccattgacatagtaacgattggaacggatgcataatgggtgtacatttcattggttgctgaaagtaacgtaagtacatctgtcgcatcttgtggcatcacagctattttacaaatatctgcctgacgcatttgcatttggcgtaaccgcgcgacaatctcctcttgcgacggtgttttctgaaagtcgtgattacagagaacaattttaatccccgcctttttagcttcgtgaattaacgtatctgccgccagcggattcgcaaataattcaatatccaataaatccaacgcacccttttttactaattcatgatacaatgcaaaataattttcctcggaaaaagccatttcgccgccttctttttgtgtacgaaaagttaacaataacggtttttgccccaaccgttccattacttgttgtgaaagattacatacatcggaaaaatcagcgacattttcataatagtctaaacgccattccaccaaatcacaatctagtgtttggctcgccgttgcttcggccaaaatatcctcggctgttggagcaacaatgggcaccacaattttgggattcccttcacctattcgcacatttttgactataactggcttcacagttccacctaacttcctagtttgtttttctctcttcatatcataccatttctattcttttttgcaatttaaagagctacaaagacacctagaattaggaatttcctaacactaaatgcctttgtttgggttatttaactctttctattgttacgttaaacttccgtactttgtaactgatacatatccgcataaanggcaccttctgccagtaacgttcgtgcgttcctcgttctacaatctgccctttgtctaaaactaaaatcaagtttgcgtcacgaatcgtcgaaaggcgatgcgcaatcgcaattgtcgttctycccttgacgcattttggctaatccttcttgaatcaatccttctgtttctgtatcaatattagcggttgcttcatctaaaactaaaattttgggatcagtcacaatcgttcgtgcaaacgaaattaattgacgttgcccgctagaataactcgctcctcgttcaatgactttcgcatgataggtattgggtaacgtgtgaataaatttatctgcctgaacaaattccgcagcctgtttaatttgctcatctgtaatattgggattcagtaaacggatatttccagcaatatctccataaaacatgaaagcgtcctgtaatactaagcccatcttttcccgtaattctgtcatgggaaaatcacgaatgtcacgatcatcaattaaaatctgcccttcataaaattcatagaaacgcatgagtacattaataattgaacttttaccacttcctgtatgaccgactaaagcgacggtttccccgggatttgcgacaaagctaatatttttcaatacttcgtttttgccgtcataagaaaaagtaacattgcgaaattcaattttcccgcgaataatttccccattcgcacctactgattgttgcggcgttaattcttccgtatccataatttttaaaatacggctacctgcgacaatcccatctgtaaagatacttaggaagtccatcatttgcgtcatcggattaaaaaaagcttggacatacgttacaaaagcataaatcatccccgcttcaacaggtgaatgtaaagcatcgatgccaaacatagttaaggccaatgcaatcgccaacgtatacaacaaattaatgatgggacttaataataacgaattcatacgaatcattgctactcgtgtttttaaataatcatcattggtttcctcaaattctttttccaaacgcttttcttggcgaaattgttgaatgatttgcataccagagatgtattcatttagtttggtgtttaattgacttaatttttcccgcatactgcgatataattttgaactaaatttttggtaataccaaatcacaactaataaaatcggcaagaaaattagacaataaaatgagatttctggactgagttgaaacattgcaaaaaatgacgagattacggcaaaaattcctgtaatcaccattaggaatacataccagaattcaaacaatgtttctgtgtcatttgtaacacgagacaccgtcgaacccgctggtgtttgatcaaaataacgcatacctaaagtgtgtaatttttcaaataatttcactcgtatatattgatacgtttttaaagaagccatcgaatacaaataccattggaaaaaccaaacaatacttttgacaatgacaccaaagaaataaatagcagcaaaagttagaatcacttgcattgtagcagttttaggcgttaaataattatccataaaaacttgaatgactctaggcaaaagaatattgataattgataagccaaatgcaaagagaatagctgtgtaaaacatgcgtcgaaacggtttggcaaaacgaaacaaacgctgaacaatcgttaattgttctttcatcggtaattctctggaccattcggattgatacttttcttccattaactctcactcccttcaattttcgcttctaattgctgtttttcccacatccgctgataccaacccttctgagccagtaactctggatgcgtcccccgttcaataattttcccttcatccaacactaagatttctttggcatgcatgacactacttaaacgatgcgctgtaataatagtggttttttcttggcgcgtttcttttagatttgataaaatcgcctcttcagtcttcgcatcgactgcagataaggcatcgtctaaaattaacaattctggttcaacaatcaaggcccgtgcaatagaaatccgttgttttkgtcctccagaaagcgaaacgccacgttccccaaccattgtgtcatagccttcagggaatgctttaatttcttggttaataaatgctaatgctgccgcttgttcaactgctgcttgttccaagtgtggtttagcaaaacgaatgttatctcgtaccgtcatggaaaagagaaaatggtcctgtggcacgtaccccattgcacccatcaatgcatctaatgtgtaatttttaatgttatgttttccaaaggaaatcgttccttggtattggtcatattcacgcatcaacaatttcaaaatagtggttttaccagcgcctgttttgccaacaatccccaaggtttctccttcttgcaacgaaaattggatattttccaacgccaccgtctcttcttttggataagaaaaagaatcaatcttcattgaaattgtcccttgcgccattgttttgatggcatcttttcgttcgataatatgcgttttttcatgtaataattcgttcacacgatcgtaactagcattcccacgttctaacacattaaataagcgcccaatcgcaaacattggccaaactagcatcccaatataggcaatgaaagagaccaactgacctaaactaatcgttccttccatgatgaaacgaccaccaataataattgkcaaaacataagaaacaccmataatcagcgkaataaacggatcaaatrggcatctaaaaagtcgtcgtgaattttgac

SEQ ID NO: 276 - DNA, 20633 bp; double-stranded, linear
cctaggactggcctaagatggggcccctctttctaaaccgaaagggtcttatnggaaagggtaactctatggtaaatggaggtncntctaaatttcaaccgatttggcaaaaaatccaatagctcaatgtttgaccagaataaatcaagttaggatttgctaatccgtttaatgcagctaaggtttgataagtcgtaccaagcttagctgcaatacttgataaattatcaccgtattgaactgtgtaaatgttgcttactactgatccatttactttcaaaatttggccagggtaaataagatttggatttgtcaatccatttaatgcagccaatctttgatagtttgttccgtattgataagcaatgcttgataatgtttcgccgtattgtaccacatgagtcgcttctggttgtttatcaggaacagttgccgcatctggcaataattcaatattgcctttgctgatccatgacaagataccttcaagcaatactctgctctcagttacttcttgtactttatagctgtttccttttacccattgcggaatagttcgccagttgcccaagcatcaacactaaatttcactttaacagtgtcgcccactttaacatcggaacttggcgtattttctacttctttaccttcctcaatagctggtgtgtttgttgctggytggttattctttgtataaccattatcagtaatacctgttaaatcaacgttaccatctagccctcctgcaacgtaggttgacgtgaactgaaaaataccgatattttcaaatgaaggaaaataattgtaatttggataaggtgtcacttcataatctggatattctgccatccataattgatacttctttgcaattcgtgataaatcataagatgaagtaagataccctttgtatccgtaaagcatcggtgtatatccagcctctttgatatagtctaacgcccatagcgttacatccgtcgattgaacgccgtcttccgcatctaaggcgacaattgatccctttggtgtttgaactttaggtaaaaagtaatctaatacttgctttgcattttcgtaggtaaggacgttttgccaccatacatacgtatgcgctcgtttaccttgagcaatcgtactagctacttgactagaataagtaacttgatcataaatcccatagttgttttgcccaccaatttgtgaaattgagaatttatcatgtgcataaccaaatgttgcttgatacccattccaaatagacaaatcaacgccttggtctccttttgcagcaaatgtgctaattggtgatacaaaaaataagactaccagtaacgttgccaatagtttctttttcatttatttatctcctttcctatctgataatccaggtgttgtgggatctgtcacaatacctagaatagttagcacaacaaataatgcattaacaacatctaacagttgcttattaatcatttcaatttgaaatttatatccaaaaggaactgctactacttgaattaataatagaactgctggaataatcgaaagccaaaattgtttgttctttattcttgatttccaattaatcatttttatttcctccaatccctctaaagagggttttattttgctcttccaatcggctaatgcgtatttcatggttatttaaacgttcaacagcttcctttagttctttcatgctatcttctaattgagaaaagacatgataaaatttcattaatgcgaaaataattccccctaagaatgtaatcactgctaaccattgttctactgttaagtcatcctgcacctacttctacttacaagaaaaaccgcttagctttcgctaaacggttctccacaaatttttgtatattcttcttttgttaagcaattcatattcacgtaatctactaaatcttgttttgtataacaattccaatcatacaactgtttaatattatcgaaacctggaaaagcattcgttttcatcttattccgctcctttcgtaagttcagcgacttgtttcatcaattcgccagtcattctttgtgtttgttgaataacttgattctgctgagaaacttgcttcattaattccgcattttgcttttgtaaaagttccaattccgtaggtggcgttggctctggttctggcacattatcaggatcgtatattaagcttgttccgtcccagcgataattaaaaaaatctgttggctctttttctacttcaagttcaattttattcggttgttccattgtggaatatccgtctaaataaccttgaatatcatcaatccaaattttcatgttctctttcctcctagtattcataaatcgcacttaacgcaaacattttactgcctgaaccagccgtatcactagaagaggcatttaagtcgtttccagtaattttagtatccttaatatataaatatttccgtactaaattagtatagtatccatgtaaaaggaaaataactcccccagaacctggattctgcgcatgctgtttaggcactaagaaaaagtgataacacgcaccgttcaaagctccttctttggtatattcttgccattgtaaaatccaaccattctcacactgtgaaagagacttagaaggtacttgcccatttcctgcagctccgccataccatgcacctgtccacaacggttcttttttggtaattttttgatatgctttgtccgcatctattttttttatataagattcaagcccatcaattgcggcagtatgtgttttaagatagactggttttcctttttcttttaattgaacaatatctgttgtcattacacttcccctaccttttcaaacgtaattgctggcaatccatctagctttgttttatcttctttagacatcaagccattttttattgaggttgcaacgtctgtcgttgttgcattttgccctgctggaccttgcggaccaacgtctcctttatctccttttggaccttgtggacctgggtctcccttttcacctttcaatacttctggtttcccttccacagcattccaatgtgtttgaggaaatacctgtgttcctccttgttttactttaacaatatctgtcattcaacttcccctactctctcaaacgtaatatcaggtattctgtcaatggcttcttgaactttttggtcaacatattgttgattcactccgccgccatcgccaccaccagttgctgaaataacaccatcttctgaaatagaaatattcgctccagcagtataacctttcaactcttccagtttcgattttagttcagtggtgaaattttgatctgtttgctttaccgcagacaacgttccgtcttctgtaatttctaacagttggccaacctttattccgcccagttcatctgcggtagcgattggaagaatgtacacgcctccctcgccatttgacaaccgttgaaacatttcagcagtgataataccgtctgtttcttctgtcgcataaggaagttctgtcagtgcattttctaagcctagatctgctttagtgataattactgccccagtatatccattaacagataatacttttgattgacccgcaataattttttctaatcctcgaacagcggatgcatgtgtaataggataaaactgacgttccacgccattttcatcggtttccatcattcgttttgctttaaccacttatttcacccactttttcaaacacataagcgttctgttttgtatcatcaactgttgcgataaccaatgccccatcgatcgcaggataatcaactgttccaacaatttctgtttcatgattcagtgaaaaagcatcatcttgtaaaataatcaagtcacttatttcgccatattctaacgtatataagcgtttctctaatttctgatacaaatattccatatctgccaataaacgttcagaaattgaattatggcgcactccttgaatgtctacacgtgcatccattagctcggctaacatcgtaccgccaggatcaatcgtttttaaaatatctttgattgattcgaaccatgaagtgaaatctgttttttgcgcatctcgccacgcttcgaactcttcttttctagcattcatccaatcagtaaaatcacccttattttcgttgataaaagcgttcatgtccgcgattaaatcttcaatggactgccaataagaacccatttcaccttctgttttcgaagcagcattcactacaaaataagaaaagttttgcgttgcaccaatcaggttatcacctttatgaatactgaaatatgcttcttgtctgtgtaacgactgcatagaatattcatcaaaggtatactgaataatcccttttttggcattcacaatttttgctgaacgttgaatcggatatttattatcaataaccgattcaaaaaaaaacttcgcaacctgttaaatcaagtggcaaagcattttcaactagtatggcttctaagacttctgtgtttcgatttccttgtcgtacattctgaatcccaatgtaattgtaaggttcagttgtacttagcgttgcttgccatttaaccattgaaaaatcctcctytcgttattttggtggaataacaatcgattgaatagaattagcaaaatataatcggtcatattttgcgacaatttgyccttgctcggcrttctgttctatsgtttggatacgtccgttatttaagccgtaaatcacgcccgtgtgaccatatgttgggtctactgtccaacctgttccccattggccacctcgtctaatattgacgattgctcctacyactaaatcttgatacgttggattttggattactcgccaacctaccgcattccaatcatatgcttcaccaatatctgcagcagatgatgtatcaccaattacatgtgaaaagccataaattgttcctgcacctaaaccacagccgcccataaaaccagaatattcggctggaacggcataacattgcccattaccaagccatttgcccattaaggtctccaaatgttctatgccagcttttcctgttgcagtagaagctttcaaatctttgaatttgtcataccatrcttgtgcataggtttgtctttctggatgtgctgcagctggacgttcaaagtttaattcaaacgcataagcagctgttttaggcgagctgacaactttaaattcatcaactgttaatggacttacttgtcctaaccattgcccattgaacatacaccaattaattaattgagcttgggctaatgacgtcctatagtcttgtttgatacctgcagctgcgattaagcgttgtacatattctcggccattccaagttggtgcgcctaccaatggatatgctgaaccgtcccattgaacccatccgtaagctggaccgcctatttgttcggtatctgggttcatacttggaccaacttctccttgtacatttccgaggatacctgcagcagctgctttgctgtatccgttagctaataggtaactccataagtcccaagcaaatttatctgcatcgcttgtaacttctgatggataaccacctgtaccagctccagaaccaccaccaccattttgaccagggataacttctttgccgcccacaatcaatcgatcaactgtcagaattgctttacttccatttggaccaaaaaagttaaaattatttccaacaaaaaactgtgtaggaccagtaattaaatgtcctgtgcctgattggttagacaaaccaataattttttggggattatctgcgactaatagtaatgaattcccatcagaaactattggatttccatttttatctgctaaccctggaaaaggatttccctttgttcccatcgtgccaacgtgactattaccattccaaaactccatcccttttttagttaattccatgatttttttcttattattccaagcttgtaaaataccgtttaccatacgtaaaatatctccacagctattaaatgatgtttcaaaaatattagattttattttgccagctcctataaagtccgcattcaatactccattaattccccatgcatttttaaatggacctttccaaccagttcttgagaatccaattcctttgtgattaattgcaatcacatcttttgcagtatccgtggattccgtatctaagtaataatgggtgttaggtcgatttttaggatactgacgtatacttccgccttcaacaccgttaatcaaatcagtaatataatctacaaaatcactcatatactctttttttgtcaatgtttttatagcttcttgaaagtcttgactttgctgtttataaaaagcaacttggatatctcccgcagtgatttttattgttttttctgctaaagcatcatagacaattcctgtaactttcgtttgaatgtcaatatcataaagcttgtggtacacagtgaatgtatcgaataaattatagttacgcatcttagcaaattcttttgcttcttctgaatctgtaagtttctcaatttctaattcaatagaaactttaggcttatcacttcctggatataatgtagtgaagtatttacttgccactttatttaagctagctatatcttttactccttgatcttcagtaaactgaatgtattgagcgtaaacatcaggatacttactgatatattcgcttttaactgcatttccataaatccgttgagaagttccgtctgctccactttgaagctctgcaaatggcaaaactttagtaacaattgattgccaatcaaatttaatggttaatccttttaaatctttaccataacgaacagttccaacgttatctcgtcctctacgccttagcaaagataatttaaaaggctctcgttttatttctccgccccagtattgaagtagagaaccttgttcccctgcaatacaattcaatacatttctagcttcaaatgtagtgctagaagctgtatttatatcagaatatagtttgatatcacaaggttcgtccatgttctgttcgattaatttcattgcttctgcaccattacgattatcaactgttactagcctcacttgtctgtttcctagcttataagtacgagattgggcataaataacaatgctattagtaaaagtatctttaaacgtttgtttgatctcaaaaatgtggtattcttctaagtcatttggctttgctttaatttgatagccattttcgaaataatcactaaatctgctaatcgctggatagtccatttctagttcatattttccgtttgcttcttcagtgatttcgcaacgtgtcgcatcaacaagacgtcctaatccatttgttgaaaaatctttttctccaggtttaaaaataactggaatcaaacctttcgcctccaattcggctgaaccttaaactctgttactttaccagtccagcgaaaattattctctccacattttaaaatcggataatctttaaaaagtgttttatgatccaagatttcaaatgctccacctgattttctataagcttcttgtttttctgaatctataatgatgtcaccgttaattgcttttaatgaatatgattgattattgataaaaaaagaaatatccccagaccccaaaatctgaataatgggttctgaaggatatttttctgtattgattaactgattaggattacttatccaatattggccaatacgatttttcttaaaaggtcggatacttacagtaaattcaaaaggaattaaaaccccgctttttcttgttcctgtaaattttggtggactcgttacaatcgcctgataaatataatgctcatcaaaatagacaataaaatcagaatagtttcccatatcgagccaaaaggaaatttcatcttctaaaaaagaaactycttgkaaagtatttgctttcgcatagcatgtaatggtacgttctacatttttataatatgcaaaatcaacggctattgaatcattacccattcgctccctaagctctaccacacgtcctgcagaaagtcgttcaggtctttctctcataaatacattgaattcagaactatgttttccattaagaaaaaactgtcctcttttaaattccaccaaaagcacccccagtkgcatcactatctctatttttaacaatttggaatatacttaacgaggtctttagccatatccattaattgtttttcatttaattttcccatagcttgtatattgatattgaaagtatcaccgccaatattagtcgtagcattacctttatttttagctaagctttctgtttgagctccttgttggttgatatatctgccagtagtagaaaaatttggtaactctgttggtaaatcggtcatttttttcactgatttgtcaagcgttcctttttcttggtcaataccagctacaacacctaatacaatatttttaccaatcatatcccgcatccatcttgaaggtgaatgaatgcctaaagcacctttgattttttctttaatattaccagcaacttctttaatttttttattcacagcaccaatcattgaaccaataccgttaactaatccttggataatatttttaccaatttcaaataaatcgatatggcgcatatcattaaaggtttgcttcacattttcaactgtatcactaacgcttcttttaagattattccacgcatttttagcaccttgtaccaaattgttgaaaatattaactgttccctgttttaagttttcccaaccgttaatgatgccgtcttttatacctgtcacaagatcaacaatccactgtttaaaattattccaggtatcttttgaccattgaacagttgcgttaaatgtatcaactgtgccttgttttaagttattccaaccatcaattacaccatttttaatgttttctactgtttcaaagaaccaagttttcaaactttcccatattctaattgcttcaaatttaatatttatccacgtttcgatgatagaatatttaatttcaatccaaacgttgatcgctccatatttaatgtcaatccagagtaaggtgaaaaataacttcacatcaatccaaatctttttaattgtcaacatcaatccattaaaaatagaagtgactgaataggaaatagctgtaacagtgttataaaagatatttttaatcccgaaccaaatagtctgagcagcttcagcaatattatcccaaacggcaatcatgttttcttttgcctcttcccatccacctgtgatcattgatgtaatgaaaagaattggagctaatagaacattttttagaatggtgacgacattttcagcgatcattttgacattttcaatgttcgctttcatagcgttaacaaccattttaaacgcatttttgattcctgttacatatggaccaatatatttccagacaaaatcaaatgctgttgtgaaaacatctgatattgattttccaacacccttaaaccaatctttcacattatcaaagccatttttaaaactttctccaacacttttagcactgtcagcagcactttgtttaatattttcccatgtattttttgagcctcttttgktgaatyccaaaagtccactgaaaaattccttggtaccgttccacttatttttaacccagtcggctgcatttccaggtacttctttcatccatgtgccagcattcgaaaaagcctcttttgtgccatcccacatgttactgaaaaatttcattgtggaatcccaagctttcacaactgtttctgcagcactagaaataaattcttgtatatttttccaaatatttttaacagcatccctaaaccctcgttagtcttccaaagataaataaatcctgtaactaaacctacaactgcagctaaaatagcgacaaacggattcgccaacatagttgaattaagtatcgttgcgcaattgataatccttctgttgctttttgccaagccgtgaatgctgcacttacttttttagcaagcatcaacgttccaatactgccagctaaacctgcaagcaatggagcataaggttttaacgtatcatacaatgttttggctgttttaatcattggcggaatcatctcggcaaatttagataaagctgcttccatttttgcccctttgtcagcaatgatttcactaatacttccaaaacctgcactttttaagccttcgtcaattttagttacaacgttagccacaccacgaacgattgcagtcttcatgttagctaaacctgttttaataccagcggtagaatctttagcaatctgttctaatgatttaagaccgccaccgccttctttatttaatttgattaaagcatcttgaaattcttcaactgaaattgagccatcagaaagccctgctttcatctgtccagctgttaatcccatctgttttgctaaagcgtttaatgctggtcctaaaccactattaatcattgaattccaagtttcagcatctactttaccatttgagaacgattgggacagctggataatagcattttctaccatttcagcagaaccaccaaaaccgaggataccgttatttaaagctgcgaaaatctgttctgatttacctaaatcatttgttgatgaagcgattaattgaacacctttaatagcgctatctaacggcgtaggcagcccttggatacttttctttaagctatccattgttttagatgtttcaccagctgaaaagcccatattttcaaacacacgatttgcgttatttaacgtatctacacgattaatggccccgtcgatgttgctggtaatcaatccaatacctttagagataattttagttgctccgctagctaaaaagttaccaacaaaagacgtccatatgctcccaagagatcggccgcctttttgtcctgttctatcaacttcaacatcaaagccttgtaacttttttactgctgaatttaatccttgtgaaaagccagattcatccagtatcatttttaagactaagtcttcattgttcaaaaagtaccccctccctcttagaacatagtattttcatcaagatatttgatattttcaaattcgtctacagcatctttaaatgcataaattttcmaaagctcgtttaaatctgtgttttcgatctcatttaaagtccacccattctcaagaagcgaactttttagttctgcttctcgatattgtggcgtgtacttaaaatgaggatgatataaaagttccgttacttttttttctgttcagaataaattgcatcataaccagaagtaacagaacctaacaattgagctgtaattttcaataattcacgagcatccataccgtcaatatattcttgtccagtaaactgtttttcaaaaataacgtcagcaataaagtcatagcattctcttaaaataggacgaattgcttccatatcatttgtttttgktgcttcytctaacctgatttgtaaatccgtacctgtatccatgactgaacctggtaaaaattctgccgacgtgaattgttttgtagtatatttgcttccatctttaatcattaatttaattttttgttgaaatttacttgccattttaattccctccrtataaaataggacgacaaggtcgkcstaaactgttatttttaatctgctgttgttacatttaatgtacattttgcggtaaagttaccatcttctgttgtgactacgatttccgttgtcccttctcctacagcagtaaccttcccttgaattggtgttacagttccaatagcctcactttctgaacggaactgatattttttatttgaggcgttatctggtgtaattgtcggtgttaaggttgctgtttggccaacttttaaatttaactctgtttggtctaaagttacaccagtaacagcagtagtattttctttacgtggatccattacctcagtaaaccagtttttaatcatctctaagtcaacaccttcatcgtcttcatccacggaatacatataacccaaccctggaacatcaacgaaagaccccgtccattctggatgggtataagatactgaacttccttctaatgtagatgtttcatcagatgttaaagcaaattttcctttatagaaaatcgtatagcgatatttaccgttcgattttcggcgacgataagcaaatgcgccatctgatgcaatatcatccgcagaccgcaatacgccaccctttaatttttttccccctgtaatttcagctaaaacttcattttggtagccgtttgtttctaaagtaacttctgcaccaccaaatgcaacatactgatcttgaactacactatcgccatagtcaggcgttgtttctgttgtaacatctggtttgatacttacagcagtaccgattgtaattggcgctccgtaaactggaaaagcgcccgtttcgtctgttagtgggaaccacgttggcttctctacagaaatgacacttacatttttcttttttgccatctatttttcactccattcaattaattgagggaacgcaacattaaaattgatatgttgaattccgtctgttttaaacgtttgataatcttctggaaacaattcgtttccgtccaaattcaacacattaaaaaaagccccacagctttctgttaggctttttactaattgtttatctttcttactatcaaccagtgcaatatcaacattgtatgctttattttgaacgttttgacctacattatcagtcatgctttcttctacgctcaaaacgaaataaaacggttctgacgattgcatcacattatcaagatagataggtgcatccgagaactgttttattgtgtcagtaagcatttttaaaattttatcgtacatatctatcctttcttaacaatgataatcgccatttgtttaaatcgtttcggaatatatgttgcattagctaatttattagatttttgcaacataaatctgcctttaacaaatccgccattttttgttcggtggccatcgtttacatatctaaaatatttttcattattaatcaatgctcccacgatacgaccactagacagctttctagctttaatgattcgrtaacctcgtcttaaatcacccgatttaattggtgtcataggtacaattaactgataaattttagctaacgaatcattcaccattgcagcaccttctttttcagcaatgggtgtcattttctttaaatttgcaataactttatcagcatttgatttcattckaagatcgcttttactcatcaattgaacttcctgatagcactacttctatatggcttggataataaaaaggtttttttgaaaataacacatgtttttgacctgtaccttgagtaatagttattctatctccttttttaacttttatattaggttctaaaaaaagtttttgttcttcataagagatattaaacttaaacgcttctttgttttctattacaggtaagtttcccatacttccttgagagaaagcacagggtaacttgccatcatgaattggaaaataaacttgtycagtaattccgcttyccacattttcaatatcacttattcgctcaatamcacaggtatcaaaataagtagctgctaaaacttctgcttcattcaatagaaaaacaccccgctatcacagcctaaaatacgtttaatggcactgctatagttcttcatgagtgattgtatgtcttttgattcaactacataactaattgatgtatcaccacgttttacactagctacagacttatctatttcgttttttaaagctttatagataacctcaattataagtggttcaaactcgtcccaagcaatatcaattttacaagtattgtaagaattgatttcaaagataacaaggtttaaaacagacaaaatcctatcttcagaagcgttaggtagcatcaattgaattttctcaacgatttcttcttttttttcatcaaccataaagcatcattacctaaactttaaaagtatctgcagcacgttctaatatttcaatagcttctttatcgtcttctgaaactataaattcattattytcgtttgctgtgataaatttttttgttttaggatgcataaagcccacaaagtttttcttgtcaagtacacgataagttacttctttttttgctgttgccatttttaattycctccttkgttattatattttaggctttcaaattcaagattgctccagaattagaagctttgtattcaattgaatactcaccaactaatccaatccgtcttgaatctgttgtttttgctaattcttccgcacgccattcacgtaatggacgtaattttacataattagtatcaatagctgcgattgttccattaggtaaattaggttcaattaacgcaattcctgaaccgtaatttgagacaatatttccaagttgcaatccaaaagtaagtttatcgccaaattgcacaatttttgttgatttttcatccaactgatcaatcattaattcttgcatatcaggtgctactaaacataatttttcgcccatgtatcctttttggaacattgttttaaataaggcatcaatatcttttcttgttactgcccccgcagctgctgtttcgactttattcgttgagctaatcaaatttaaaattccgttcatctgacgacctttagaaccagattcatcagcctttacaccaacaatcaatttacgatttaagtcaattttcatttctgtagcacgaagagctacttggctattcaattcatttcctacaccatctacattaatagcatctaatgtgccagatacagaagttgattttctgaaaatttcagtatagttgttaaaccatgkacgatcagattccgcatctgcgtattctccgccttctaattgagcagatgaatcatcattattcatgccatattctcgccatttaatctcagttgacttggcagcttcaacttkgcctgcgcctaacaaatagcttaaaaatggtgtgtttgggaacttgtaatgcgttaacttcckgtgaaatatctaaatactcaagattattaaggaactttttttcatttgtagtttcctcctaatcgataaaagcttgtaatttttgtcctaatgctacctctggattttcaaacgattttgtttgattaccagttcccatgttggtttgttgcgatttattaccaaaagctttagtcatttctacatttttaatagcttctgcatgcttatcatttattgcttctaaaagctctgtaaagccttctacagccttcttagtaaattcagtatctgaactaacaagattatttaacataaattgagaaatagaatctttcaaatctccgtcccaatctaagccagcaattttttctgcaacaaaagccttattatcactagtcacacgtaatgccttttcagcttcaaattcagcctgtaattcttctaatttaatttgttcaggagttttatttttcttagattcttcatactccttgattgttgtttccttgattttttcaagattattttgtttccaagcttctaattgtttatctgcagctgattgtgactgtgattgtacaaatttttgtgcttcctcatttgattctacaaatgccttaaaatcatcgaaagtgaagtttgtaccaccgtcttcttcagcaaacatttgtaaattcattggtaataggtttggtttcattttgtttctcctttcgccccacgattcgactaatcgccccgcattgctttagatttatttattgcgccccaccattcaattaagcccagcattgcgctagtttaacgtcatttcggacaaaataaaaagcctaactttcgtcagactttaattgcttttcttctcttagtaaatgctcttcataatctgcatctaagtaatcataggggatccatctaatcacttccaattcttatggaccagttcagcacctaacatttgataatcagtgacagcatcttttacgttttgcagagtcctagacacaatcgaaatagttaatttactttttttacctggtaacgaatacaaaatatcaacgtgacaataattaccaccccaaactgatttaagctcatctttgacgatattaccgttgccatctctcaaagtgtgtttggttaagtatcgttcgttttcttgttcaaaagcttttttataggctttttctgtaccattggtaacttctagatttaatactgcttcgaataatcctttcatgatctcacctccaatttagggtataaaaatagcactcaaagttatcctttaagtgcttagtaaagtctgctatggtaatctgacgggacgtggaccgatttattttctttaatatgctcatcaatgaatttcgctaatttttttgcacctagaatagaaaaatcgaagtcatcactctttgttacatcgatatattcatatattggaaactcatcatggaaatgttgttcatactttttaactgcatcatcaataatagaccatgcgccatcttcgcaactaaacacttatttcaccgcctttaaaatatcatctactaatttttcccattggcttactgctgtcggaaaaatctctttcattaattctcttgacttatcgttagcaaccacttctgtcatatgtgcaaaaaattccgtttctgtgctacctgttgtttgccaatagcgcttgccgtgaccaaaacctaacggatagtctcctaaagaacctatagattcaatcatatctgaaatagcggatactgagttaggattttccctaactatttttgataatcgktctcyagttttttgtaagttctctgtatnnnttttataaatttccgcccttaagtcatcataggcctttttcttatccgcatttctaggtctattacctaaatcattataggatggcaaatctccgtttacatatttccaaaaatcgcgttctagcgcttctttaatgttatactcagaaagtgacgatgcgtgtgttatatgctcttctataaaagtggttcgtcttcctagctttctttttatcagttttcctgtcggcatcgtattttttcctgttaatacttcaagcccaagatgatccaaagcatgtcctatctcatgataaactgtttgataaggattaacacccctatccccatcaaatgatttttgactaagttgaattgatttgccttgtgcaaaggctcttacttctttgatgtctttaaactccaacttatgccctatcacatttattaagtttagcaccctttggtcagttatcccatctaaatgatctaaaaaattagaataattttcttttcctaaagcttcttgcatgtttgttttgtctaatacggattttaaatcgagtttagttgcactaacttttggatgatttaatttaataccccactgcttacttgcgaattcatccaataaatcaccaaacatctcttcatacaatttatctatgtcatcgctaatttcaggaataattggtatttcagtacmacggcaacgtccatgatacggtggatgccaatcatctttaatctcttttccatgacgtccaccacaaatagaacaaacacgctcatcttctgccgaccagctttgtgtttgcttaacacctatatcctttagcgattttcttacaccttctaccgcaaaatgtgaatattccgttctaacaagattttcaatcgaacgattaaactttccttgttccaacttaaacataccgctaataacaccatcgtttttcatcgttctaagagcttccacaactccttcaccacttgccaatgaattaataatggaattgctcaaacgttgctctagggttgatatattgccccataaacgagatgaaaatgtttttccgctccacggatagttcatgatgttttctagttcattcttagttaaaccaggtgctgaaccgcctaataattgtatcaacgcattagaattagaattgtagattcgttttgtgatattctctaagtcgttattaaatttaccgttaacatcactagctattgcttcacctgcaatggtagaaaaaatgtctgctcgtaattgtaacaagcgattaactttcgcatagtcaaaggatggaaaatattcatcaatgaattgtttataaacttcatctgattccatcaacttttcatagttcttctcaatatacttacggtacttctcttggtctcgtttgctaaaatcttctagcatctcactttgagtaataccgtgtaaatcagcttgtgccaataactgtctttgaattttaactaaagcacgttcgaaaacagattctagttcactaagagttttcttttccagtttcaagcgtgctttgtcttctaattcacgacgtttttcccagtagcgttcactaactgttgctttcttcttcgtcattatccgcaccacctagtttgtagtcaccactaggatatcttgaccttgttctaaattcatcaagtccatttcataatctgggtctttagcaaatggaatctgattaataattgttcgtttagatagaaacggcgaaagttttggcaatgcatcagcaagatagccaatatctgttggcaaactgcgactgaatgtaaacacaattttagacacatctaaatcaagcttatcgttaaatttaatgaaagctgccatcgtttcagcgacttcttttaaaccttccctgaaatactgctcttttgtatttgtttttgcttctaaggcaataatttgccatttacgagcttcaccagaagcgtttgatttaaatacctcatcattaaaatcaattgattttgtgattgtatagaacattttttttagctggtttagatgatactcgttgaaatctttattaatatctttcgttacatacccaaccttagcttgtggatctggtaagttaaggatacctaattgttccatcattctttgtgctttttcttcatctaatattgagccgctaatggccatgtaagcaagtttaaactgttcaaytcgttttgttggtctgataagcttctatcaaatgcatcagaaagttcttccgccacttcaaaatcgcaataacgattcgtattgtttttaaattctgataggtagaacgtttctagcgggttttctacttcctcaattaatttaaatgttccagatacactgactaaattaaattcaatgtatctgctatatatgcgtattctttctttagtaatgacttkcatttcttcaaaaaattttttttgatgtgtgtcgtatttttcacgaataaagatatctgcattttcgtatttttcagctttccatggttcgatattgctcgcccataattgccaaccttccttggttttaacaggttctaacaaacgaaaagcaacaccacaagctccttgaaaccgagctgtgtcagaatcaagcatggcaaaccgcatatcattcactaactctgtcagccgttcgaactcttttggtgttttggtattttttaatgtattattcaaaaataaatctttagcacgttgcataattgatcgtctctgctctgtaatatcgtaatcccacttaattggaatacctgtgaaatggtccgctgcttgatcgacaatagtattgtataaaccagcatgaagtttattattcacttttataatctttgtgtttggtttaggtcttctatcgatctcattttgttcgcttgtataagctttgtatttgcgctctctatcatcaaaaaatggcttcatttcagtaataaaatcattaggatcgaaaacttcttcattaatttgtgtagaatattttgttcgtaatcttttataccgcttcaaacttaaattgttttgaaacattttcacacctcctaatattggataaatctgacttggttatcatttgctaatgtttctacaatgcctgttacagcatctggtgcatcatcgtgtctgtttttaccttccctttggtaggtcgtcatagcttcataaaattctggccatcttattttccaatctgatgggaaatacacattattttctacaagtgccgaattagaaagaatacgtgattgtttatttgccgattgatgaaacggctcgtaataagcaccacgatatcctcgttctttaacaattctttctgaattacgagaaaaaccacgcccaccagagttagactcaatgcggacatggtttacttggttatttttaatttgttcagcgtgtgctgtttccgttttttccattggttcttttgtaaatagaacatccaatacttctgctttatgatcttctgtctcaccaaaaacaattgaacaaagattatcagcaccagtgtctgctgtatcggtataattccatattttaatgtaattagagcgtgtttcatatgttgaaaatttttggtacaaacgaccttttaaatcaatcggttcttgttgatagttagcagaagcaatatctgcacccatcgttttctttttacggaaatattcttctttagaaaggacagactcacaaagcatggtgtctgtttctcgttatatgctttcatgctaatatgttttactttata

SEQ ID NO: 277 - DNA, 1663 bp; double-stranded, linear
acattgntgaaagaattgttgacggaagaggatgatcaatttaactttttctcatttgatatggaggaaacacctttaagtgcagcgattgctgaagcggaaacaattccgttttttggtgattatcgccttgtctttgtggaaaatccttactttttaactgccgaaagaaaaacaaacggtgtggaacatgatgtcaatcttttattgaattatttggaaagtccatcaccaacaactgttcttgtttttatggcctcatatgaaaaattagatgaacgcaaaaaaattaccaaagcattgaaaaaaaatgccacagtagttgacgtcaatccaatggatgaaaaggctattcgtcagtacatttctcaaacgattgagagcgaagggtacactattcgctccgatgcttttgatttattacttcaattgacagacttgaacttatcaaaaattatgggagaattacagaagctgtatttatatgcccttgaaacgaagacaattacacgaggtgcggttcaagaattagtccctaagtctctggaacataatgtttttgacttaaccaacgaagtactttctggaaacagtgaaaaagctgttcaattgtatgaagatttacttttacaaggagaagaaaccattaagttaaatgcaatcttattgaatcagattcgcctttttctgcaaacaaaaattttggctaagatgggctatcaacaagcgaatattgctgatacattaaaggttcatccttatcgagtcaagttagcgttacaacaagtccgacgatttgaattgtctcgattagaaagactttatgatgaattagttgaaaatgattaccgcatgaaaacgggccaaatggataaagaattactattccaattatttattttaaaattgactgcacaagcaaaataagaaaatgccagaggcaatcgtcatacaacgattgtctctggcactttcttattatttagctcctaatagttcttcttttccgtgaacaagctgtgtcaacatggcacagaaaggtgttgctacgttgtatttttgtcctttgcgccaaacggcaccattaatgtaatcaatttctgtgagacgatgatttttaattaaatcttgatacatagacggatagtgcaagccaatgccatttggatcataagtttgaacaatatgtgtatagacttctgcttgatctaaataaatggcttctttttctgcgactgctgcaaattcactgattaatgttttaacaagggattcactaacaggtagtgcgccaaattcggcaatattacaatcaaggattgtacacaaaccgtttagcgtgccattgacacaggctttccgccaaatagagtagcgaacattgctactatagcttggatttaaaccagctttttggaagacatcaacgacttctaaagcaaattttttaccagaaggatcaatattttctaattcaatttcgccatcacctaaaagtttaacacgtcccggtccttctaaaccagctgtccacakggtaatgccaaccaagatgttttcttttggtacawattttcctagtacatcttcatgacctaagccatttaataaacatagtacatacgttttttcagtaatcattggttgaatcgctttaaacatt

SEQ ID NO: 278 - DNA, 1587 bp; double-stranded, linear
aaaaaacanggaatcccttcccaaaatcttctttcattttcaagaagcctttaaataactgtaagtcatcttgtgtggtwaacttaatgtttttatctgagcctaaagcaaaatgcagtgtttcgcctaaatccaccatcatagtattcgtgtatgacgattcagaaataccaatattctcacggaatgctttttcgtaagcccaagttaatttttcaaatttataggcttgtggggttgacacgcgacgtaatgtttcacgattaatatattgtcgtgttgtttcctcagtttcttttacaaaaatttgttcattatatggcaacgaagtcactgcatttccgtattcttgacacttaacaattacatcagataaaactaattcatcaactaatggacgaatcccgtcatggataacaatagtatcttctgggtttgaatgttcttttaagaaattaaccccattgttaattgattcttgaccagaatttcctcctggaataatccattgtaatttgtcaatatggtactcttttgcataggcatctagtgtttgttcccaaccttttttacacacaactaagattcgatcaatgagtggatgcttttgaaaagattccaatgtgtagataattatcggtttttcctctaccataataaattgtttaggaatctcctgccccattcgtttaccgaccccaccggcaataattaaagctgtaatcatttgatacaaaatcctttctctaactagtcaaccactagttttatttcaattttgtttwacttatatattcatcaacacagccaaaactgcattcaatcttttacattttctcataactatcagtaagtttcamtaatttatcgtagaccttaatcgaactgtaaatgagagtgtaaaatattttgtgtaaatgaaaaaatccatacaaaaaaggaagtcgcttctgtagaataaagttaacgacaaccaattcacagaaaagaggacttccctatgaatgattttactacagaaattgtgcaaactctagtcactaaaggcgatttaaatgaattattccgttcgcacttagaaaaagcgataaacacactcctacggactgaattaacggcttttttagattacgaaaaatatgatcgcactggttttaattcaggtaattcgagaaacggttcttactttcgatcaatcaaaaccgaatatggtgaattaacattggaaatacctagagatcgtaatggtgagtttaaacaacaaactttaccagcctacaaaagaacaaacgatacattggaaaccactattatccatttattcgaaaaaggtgttacgatgtctgaaattgctgatttgatcgaaaaaatgtacggtcatcactatactccacaaaccatgtccaacatgactaaagttctgactgaagaagtaaatgcctttaaatccagagccttaaatgataagtatgtcgctatttttatggacgctacttacattccactaaaacgtcaaaccgtatccanagaagcgatttantnttgccattggtatacgagtagacggcactaaaggagtactgagtt

SEQ ID NO: 279 - DNA, 15363 bp; double-stranded, linear
cattaaaaagacgttcatcaaaaacgagcccaagacttacttgacctaacgcttgtgcgcctcctaaaagaaaaaataacaccgtctgcacaaagacatacaaggaatccatccctaaaatgtttggcgttaggaaatgattttgcgtgactgtttgaaaactaatagttgaaaaagccgcagcgattccaacaaaaataaaagccaataactttttgcctcgtaacgccaaagcaaaggaccaattgccatacgtgttataagttaawtamcaaaggctcacaattactacggcagctaaaagcaaaagtaatgaaagccatttttttaaaggccgtttcattgtttgcgcccccttagtaataataaaatgaacaaaatgctccctaatgttccgacaaccacgctgacaggaatttcatagggggcaatcaatactcgtgctaaaatatcacagattaacaagaacaaactcccgcaaatcccagttaaccacaaggtatttttcatatgatcgccataacgtaaagacacgagattgggaatcacaacccctaaaaacggaatattccccaccatcaataaaacgatggcacttgctaaagcaaccagcgtcaaacctaaaaactgaattcgctggtaatggacgccaagactatttgcaaatgcttcacccataccaacgacagtgaaatgataagcaaataaataaataacaaaccacaaaggaatcattaagaataaccattcataattccctttcataactgtggaaaaatttccttgtaaccaagcagacatattttgaaccaattggtattgataggcaaaaaatgtggcaattgagcctagaatgttaccaaacatcacgcccaccaaagggaccatcacttgattcttacttggtaataatcgaatgagcgctaagaataataaggtcccgcttagcgcaaaaataaaagcaattgccgttcgatagagaaacggagctgttgggaaaaataacattgcgactaaaatacccaaccttgcactatcggttgttccagcgacactaggagcgacaaatttattttgtgtgagttgctgcataatcaatccagaaatactcatcgtactaccagcaatgattaaactcaacgtgcggggaacacgggtggtaaataaaacaaattgttgctgcgcatctaattgaaacaactgagaaagtgcaatgtccttcacccctatcactaatgacaataaactgaaaagtaatagtagaacaaacaaaccaatctttttcatgagaaaactccgtttttatttaattgagaatgattctcattcttaattacagtgtatgagaaaaccatcacaaatgcaaccactttttttcctttattaaaaacttcttctcaagccgactgaccaacgacttatctaagatatgctataatggagggaaacgttaggaaaggagtgttactgaatggcgaatgatgacttacaacaacgtctggataaaggaatgtacggtacgcccctcgttaatcctgaagaacaacacaaatacatgggcacatttcgtgaacgctgccgtctctccatgaccgtcgctgaaatgaaagatgcacagaaccaaaaacatttattagaagaattagcgaacatcctgaagttacagtacttttaaatggcgaaatctcttctgacctgcaaagtacctatattaaattattaaatcagcatggcgcaaactttaagattgttaacaattttgtggagaacaaccctgactctctcggcttactgttagctgaaaaacatgcagtcgatgaacctgtgattgacgttacagaaaaatatcctcaagcaacagaaacgccaaaagaagagccaacagctaaaaaaagcttttggcaaaaactatttcactcataaaaagctcaaggaaagttatgagcgcttccattttaaatagaattatgctattatgaaaatgaaaaagagaggtatgcgggtacatacctctccttttataccaacaccagttataagaactggtggcttactgagttaagttttgaatcttaaccgttcggcctacgaagcttgtgaacggttattttttattgtttttcgttgcttcaaggataccgaaaatcagtagtgcaacaaacgctgcaaaactaatcatcaattccaatgccgcttcgattgacaaaaaaatgctcctttcgttaaagtgcatcggatacacataggcatcacctgcctctctaactcagagccaccgtcatacaactttcattggtaatagctttagtataacctattgggtgtaccaagaaaacgtttttataggaattttctataaaatgatataagttatgagcgcttccattttaaatagaattatgctattatgaaaatgaaaagagagatatgctactacatacctctcctttataccaacaccagttataagaactggtggcttactgagttaagtttttgttgttctttaaccgttcagccgtctaagcttatgaacggttattttttatcgtttttcgttgcttcaaggataccgaaaatcagtaacgcaacaagggttgcaaaactaatcatcaattccaatgtcgcttcgattgacaaaaaaaatgctcctttcgttaaagtgcatcggatacacataggcatcacctgcctctctaactcagagccaccgtcatacaactttcattggtaatagttttagtataacctattgggtgcaccaagaaaacgtttttataaagaataccgccaaaaaatctattatgaattttttggcggtattctttttttattgaaccacttctgggtataaaagttttaaaacgtccattgtcaagcgtctaccctgtccagcgtatggatacacatgcatgtgcatggctggattaaagttcgcttcgataatcccgtacgttaagctatcacgtgtgccttttacgtctttgtcaggaatgattaaatcaatgccacaaattttggctcctaaagcagctacggcctcaatggcgatttgtttataactatcatcaatgacatcggtcatatcaatcgaatccccgcccgtgctaacattagaattttctcgcaagtacacgatttgctctttttctggcacagaatagatagttaaaccttgttctttcaacattagtttttctaaatcatttaactggattaactctagtggtgcacggtgattggtcccccgcaatggatcactatttttagcggccaccaattcttctacagtgtgtttgccatctccggtaacattggctggcacgcgcaacatgatggcttttacatcattatctaacacaaagaaccgatattctgttccaggtaaaaattcttcaattaaaaccgctgtgtcctctttaaaagcaatccgtaacgcttccgtaaagtcttccaacgaagctccttctttaaaaatcgtaattcctaaaccgtaattcgttgattttggtttcacgacaaacgctttattggcgtagcgtaaatgtgcttcttgtgcctcaataaaagatgaaaattcttcaccgccaggcacatggaaacctgctgcagacaaaattttctttgtcacggttttgttttccataatcaatggtaccacgtagttatctttgctagtcatgttggcatttttgacgtattcaatgtgctcgccatgttgcagtttcaaaaattgttcttgttcatctaaaatttcgatttccaaacctttttgaatcgcatcaaataagaaaatttgtgtggataattccatctcacggaaaccagctaattgataagggcgttcaaaggccatactttgatattggtttccaaaaatatttcccagttcactgttggagttttcttgaataatcgtccacattttgccagaaacggtgtcttgtggattccgcagttgttgataatacttaccgacaacttctttgcctttgcgaatgcctagagcatctaacatatcaatcatttctgaaaaaatccgatcgccttctgcaattaacttaatcgtttcatgaggatgaccaagagccacttgttcattaaaaatatccccagttttcacccattcatccgcttcttctttttcatctgtccacaataaatacaacatgaaataatgtaagaaatccacagtatcttccacaatgcctaaacgtgaaaaaggatttaagtctaaattacgcaactcgatatagcgaatacctgttttaggcagatcagacatttgtttcccgccacgtaagcgcacaggcgcataaaattctttttcttcagaaagtaaaccattttccaccatgcgatgaatatcttctaaatagcgttccaatgaggcatacgatactttcacattgtcatgatttctgtagccatacgtactattccgaatactgcgaacaggttcttgcggttggtcgtcgtagaccctaaagtagcggtcttcactaactggtgaagccccaaaaagatacgtaattaaccagcgataacgtaaaaagttacgggcaactttcatgtacactttcgttttaaattgtttacaatctgtcacttcggattgttcatcatataattgctgaatcagggcttggtcatattcaaaattaaaatgaattccgctgaccatttgttttcgtttgccatactcttttgccaaataacgacgatataacaccgcatcatattgatctaatttagcaattttaatctcttcatcttttgttggtaattgtggcggcatacttaatggccacagcatttcatcttctggaatcgaacgacgagccacatcgtgaatggcatctaaaaaacgaagcatttctgtgccgctatttgctacaggcgtgattagttctaattgtgtttcactaaaatctgtttgaatatatggatgataagaacggttaccaaaaaccgtgggatgctcagttgtcgctaaaagcccttctcgtgtactacgttggttttctttttctaaaccaaaacgagccatcaatacgtaaggacgaacatttttcttttgcattaattctctataattcatcttgtcgcctttctttctacaaactatctgtttctcttactattatataggaaaacgagtaaatatgctgtttttttgaacgttcgcttggaaattttcgagacacttttagagagcgcctttttccgttatactgaaaacaactagtttatagaaagtggggattgctcatgaaaaatcgtgcattacttttaattgactttcaaaaaggcatcgaaagtccgacgcagcaattgtaccgtctaccagcagtgttggataaagtcaatcagcgtattgctgtctaccgccaacaccatgcgcccattatttttgttcaacatgaagaaaccgaattaccttttggctcagactcttggcaactttttgaaaagctggatacacaacccacagattttttcatccgaaaaacacatgcgaatgccttttaccaaacaaatttaaatgatttattgacggaacaagccgttcaaacgttagaaatcgctggtgtccaaaccgagttttgtgtggacactacaattcggatggctcatggtttaggctatacgtgtttgatgacaccgaaaaccacttccaccttggataatggacatttaaccgcggcacaaattatccaacatcatgaagctatttgggctggccgctttttgacttttttgagcctgtgacaaaaatcactttggatttttgttccgggctcaaaacatgataaacggcgggaacagaaccaactctacgcgttgctccgatctcaacaacttctaagagctaaagctctaagagttgaaggtccttcggaaataagccgaaattgttgagaatcacgaagaacgtagtgattcgatgatgaacaatacctacttggtctccaaaaattaaagaacaccgggtaggtatcatgcaacatcaactcgtacctcgttgtgttttatgacaattttcggaaatttcttcttattgctgagaaacactatttgcaaagcaaatagatgttaatcagtacctacttggttctcggagctaaacggttctgtcccgacctcttttccaaaaaattgtttgttcactatgttttcttgtcgtatttcatgttagtataaggaaaaagtgttcagttgattagttgaagatttagagtgtgggacataagtcgattaggcttgtctctcatgttctgtctttttttatgtcatcattcactaaactaataaataattggaggtattttatgaacaaattttttacagcccaacgtttaaaagacaccgcctatgtaacagtcggtgcattcattttggccatttcaatcaatgcggtcttattgccaaataaacttgtcgcaggcggagcaatggcattagtattgttattaattatgttttcgggattagtcccgccattgttctttacgccatcaatattcctcttttagtgctttgtttcttacttcttgggaaagaggtcggtgtcaaaaccatttatggcagtcttatttatccattttttgtaggaattacttcagggatgcctgttttaacacataatatttttctagcagcattatttggcggtattattacaggtgctggcctaggcttggttttccgtggcaatgcctcaactggtgggacagcaatcatttcacaaattgtcaataaatacttcaaagtttccttaggtattgctattttattcgtcgatggtttagtcattttatcagcaatgtacgcttttaatgcagatattgtgttattctctttaatttgtttatttacaattggtcgtgtcgttgacatgattcaagttggtctggttcgctcgaagaatgtgatgattatttcaccaaaatatgtcgcaattcaagaacgcttattacgtgaactagataaaggtgtgaccttggtgccaatcgaaggcggttatcgaaacgcgaaaggcatgctcttaatgaccgttattcgtgaaaaagattttccccgcttaaaagaagccattcttgagattgatgaagaagcctttttgatttcaatgagtgcgagtgaagtctacggaaaaggatttagcttgaaaaaagtagctgattcttatggcgttgaagcaactaatgccaataatttacaatagttttttgtaggaaaagrgccgcaaaatctgtagagattttgcggctctttttacatcttcatccagacaggttctaagctattgccatctaggtcttgcacttctaagccatacatttgctcttctggtattcccatatcaactcggtagcagttgcctccgttagctttggcggtttcgccaaactgttttacggcttcggcactctctaaactaaaggaaattaatgccccactggttgtttgcgcatcaataatttgcttttcttggataaattttccataaaagtcatggttcaacaacataatccaaaattgatcatcccacatcatcgaactagcttcctctgttgaaaattcctcgttctttttgaatccaagtttttcataaaatgctgtagaacgttggacatccgctactgggaagttaacaaaaaccattgtgcccatgtgattcatccctttcttttaatcatctacgacagctaactgtgcgttgcgacaaaatcaacaagcttgtttgatttatactagcatattcataaaagaaatgttactaaaacgttttcttaaggtaattctcgataagccaagtgctgaatgatttcactatgttgtggataatcgtttaacaattccgcttgagtaaataactcgaagtcttcaaactcaaagcctggtgtaaccacacaactgactaacgcaaatcctgtcgctactgtagagccaaagattgtgccggcaggaactgagaacgaaagctgttgcccttgaactaagtctttccctaactgaacagcttgatacgttccatcaggaaaaatacagtgaacggttaacggctgaccatcgtgaaaaaaccataattcatccgcttttaaacgatgaaaatgtgacggactttctgtatttaatagaaataaaatcgctgtatgcaacgcccgttcgcctcgtttggtcggaatcaattgttcacttttattggtttgtttaaaataaccgccctcaggatgcgcttctaatcctaacttctcaatccacatttgttctgtcatcttctccctcactccttcattttttcagaaacgatttaggaagaacttagaacatccgtcccaatcctaaaataaacggcgggacaggagtagcttcttcattcttgaagctaaatactcctgtcccactttcttcccaaacctgtttattttctacaactaaacatcttttaataagcctttaaataagcccattgcgaaatcgttggcattgaatggttctaaatcgttaatgccttcacctagaccaactaatttcactggcaagtgtaattcattccgaatagcaatgacaataccacctttggctgttccgtctagtttggttaaaactaagccagtgacatcggttgtttctttgaactgtttggcttgtgtcatcgcattttgcccagtagttgcgtccacgactaagagaacttcgtgaggcgcatctggaatttctcgttgaatgactcgtttaattttttctaattccttcattaagttgactttattttgtaaacgacctgctgtatccactagcaaaacatcggcctgttctgctttggcacgttccactgcatcgaaaacgaccgctgctggatcgccgccagcattcccacgtacaacttcaacgccagcccgttcgccccaaacaactaattgatcgatggcgcccgctcggaacgtatcggcagctgccattaaaactttctttccttccaacttgtattgatgggctaatttaccaatgctggttgttttaccgactccattaacaccgacaaataaaatcacggttaagccatttggctgtaagttaatcgcattattttcattaattcctgcttcttcatacaaatcaaccattttttcaatgatggtattttgaacttgagctggttttttcacatttcgcagtttcacttcttgtcgcaaggcttctgtaatttttaaggatgtatcaaagcctacatctgcaccaattaacgtttcttctaattcttcaaagaaatcttcatcgacgcttcggaaattagcaaacaattcgttcaaccgttgaccaaatgttttacgcgttttttccaagcctttttcatatttttcttggacctgctcttcttttgactcttcaatttcttctgaaacctgcgtgtctgttggttctgccaaaggagtcacgacgctactttcttcctcaggcgcttccacaacaacttcttgtgtttcctctgtcaggatttcttctggctcttcttctaacgcttcttctacatcaactaatttttccatttcagcgttatctgttaaatcggctgtttctgtgacttcttccgctgtcgtttctggcgttatttgcgcctcttctgttgcggtttcttttgattcagcaggcgctgattcatcacttggtgtttcgtctactgtttcttcaacaatctcttgtttttcttcttcctttttttcagcggaaaaagcttttttaattttatcaaaaaatcccattcttattggcctccttccaacggcgttaaaatatatttttcgaccgctttggcaacgccatcttggtcattcgtgtctgtgacgacatctgcggcttctttaactaatggaatcgcatttgccatggcgacacctaagccagcgtattcgatcatcggtaaatcgttttcttcgtcccctagggtcatgatttcttctgcacggattcctaaatctttggctaacaaggaaataccataggctttcgtaatcccttttggcataaattctaataagttatttcgcgttttaataatttcaaagcgctcataaaaagaggctggaatttccttgatgcgttcatttaaatacgcttcatcaatcgcaacaacaactttattataaattcgattcggggttaactcttctaatttgtaggactcaaaggttaataatttgtttagagaactataaattgaaggataattaggtgcagaaggcaactgcatcacgacctcatcggataagacatcaaacggcatgttgagtgtggttgctaattggtacagctcatgaatcgcttccaagggcatcaatgttttctcaataatggcccctgtatcatttttttgaaccaacccgccgttaaaagtaatgctataatcgccttcatcttgtaaacctaattcttctaagtaaggaccaatggctgccaaaggtcgacctgtgcagataacaactttcacgcctgcttgtttcgcagccatcagtgcttgtttattccgtaaagaaatctctttttggctatttaataatgttccatctaaatcaatagcaactaattttatcaaacgttcgctcctccttgcttctggctaattgcttttttcaattgcgccaccttctttgacctcttccaagcgaactgaaacgatttttgaaaccccagattcttgcatagtcacgccatataaaacatctgcggcttccattgtccctttacgatgcgtcaccacaataaactgtgtaccatcttcaaattcgcttaaataatggccaaaacgagcaacgttggcttcatctaaagctgcttctacttcatctaaaatacagaacggaactggtcgaacacgaataattgaaaagagtaacgcaatcgccgttaatgcccgttcgcctccagacaacaagcttaaatgttgtaattttttccctggtggttgcgcctcaatctcaatccctgtattcaagagatcctctgggttggttagcaccagttctgcccgtccgccaccaaacatattaggaaataccactttaaactggccacgaattgcttcaaagacttctttaaaccgttctttcacttcttggtccatttcatccatggtttcaaataattgttctttcgcatttaataaatcatctcgttgactgactaaaaattgatggcgctcatcgacttgttcaaattgctcgatggcacttaagttaacaggtcctaaccgctcaatttcttgttttaggcgtttcactgtttgctgcgcttgcgctaaatcatcgattgggaaatacgcttcataggcagcttcaaaggttaagctgtattcttcctgtaagtaacttaacgagctatctaattgcatttctgcacgattttttaggacttcgatttgtgttttatctgctaaatactgttgttggcgtttgttttcttccgctaattttgtatctaactcgtctacttcttcttgcaacgcttgtcgttgactacgtgccgtttgtaaagaggtttgcaacgctgtttgtttctccgctaattgagcgacttgtgccgctaagccttcttcggttaactggtgatcgctagaatggctacttaattgttgtagctgttgacggatggccgtttctcgaatcaacaattcgtccaattgttcttgtttgtcttgcttttgacgagcaaaatgggcacattgttccgccgctactgcttgttctgcttgaactgtcgtcaagcgttcttgcgcttgggctttaaaggtttccatttggctagcttcttgttccacttgtttcatttcagcatctaaacgttctttcgttgccgttaagtttgcttgttgctctgtcaatgtggcttttttcgtttgatattcggttaagaattgatgcaattcccgtgattcatattcaaacaagcgtttttcttttgttaaacgagtaatcgtttctgtttgattggctaatttattgtcaatttcttgttgttttaagcgattttgttcaccagcagagcgcaacatttctgcacgttccgtggctgttttcacttcttgcgagagcgcttggacttcttgttctacacttctcagttgtgtttctaattgagtcatttgttcagtaattgtttgaagttcttgcgcttgtgaaaataggcttccttggttgccacgtttattggctcccccagtcatcgaaccgccaggattcatcacatcgccttccaatgagacaacgcgatattggtaattgactaattttgctaactggttggcactcgttaaatctgccgctaaaatcgtgacgcctaagagattttgaataacggtttgtacttgttctggataacgaactagttcactggcaatccccacgaagcccggtgcaccagccaaacgattctgaaccatcgccgatacagagcgtggcttaatggtagtcaatggtaaaaaggttgctcggccactgtgttgttgttttaagaaggtgatgcctgctcgaccatctttctcattttccacaacaatatgttgcgccgcaccacctagggccgtttcaatcgccaacgtatattctttaggcacttcaattaactcagccactgcgccaacaatcccagttaattggtttttgtgacgcaatacagctttcacgccttgatagaagccagcgtaattttcttgaatttcttgcaaacttttttggcgtgccttcgcttgttgcacttgattcatcgcttggtacatatcgttttgacgctgtgctaatcgttcacgcttagcttcaagcgttgctttcaacgcagtgtattcttccaactgttcttgtaagccttgttttgcaactttttgctctttttctagcgtctctttcattgcgagagcttcaaccatctgttcttctagcgcttcgtgttttgctaacgattgttgatttttagctgtttcttgttgatattgtcgttctaaatattttaagtcattggctgtattggcttgttcttgcatgacttccacatactgactgcgcaattcttccattaattctttagaagacttactatatttttccacatctttcgttgccaaagccaatgcttcttttaacgtctgacgttgtgccgttttttctgcgattgctgtttccagcgtctgcaattcttctcgataacgaacaattttttcggccgtttctgccaatgtctcttcgtattcgcttgccgtttgggaggtgtgtttggaacgttcaattaaaacatttttttgtccttctgcttgtttcaacgcttctgtcacttgtaataattgttgttgttccgtttcaatttgttcatctaaacgattgcgcttgctgcgtaaacgtaccaatttgccttctaagtcatggacttgcttacttgcgccagctaacttttcttcaatggctgttaattcttgcgttttcgtttcccaaatagcttttgcttcttgaatttcggtcacagttaaattgacatcaatttcggtaagttcttctttcaaagctaaatactttttagccgcatctgcttgggcggctagaggaactaattggtcttccaactcgtaaatgatatcttggacacggcttaagttgtcctcggtttcaaaaagcttttgttcagcctttttctttcgttgtttgtattttaaaacgcccgctgcttcttcaaaaatccctcgacggtcttcaggtttactattaaaaatcgcttcaactttcccttgtgaaataattgaaaaagattctttgcctaaccctgaatccataaataaatcttgaatgtcttttaaacggcacgcttgtttattaataaaaaagtcactttcgcccgttcgttttaaacgacgggtgacactaatctcactataatccaatgctaaataatggtcgctgttgtctaacgtcacggtaacttccgcaatatttagcggcttacgaccttccgaaccggcaaagataatgtcgttcattttgccaccgcgaaggtttttcgcagattgttcacctaatacccagcgaacggcttccgtgatattacttttcccacttccattcggaccaaccactgctgtcacatcatcttcaaattcaataatggttttatctgcaaatgatttaaatcctgtaatttcaattcgttttaaatacacgaatattgctccttccagccttactgaggaatacttttcagtgcccgctcagcggcatcctgttcagctaacttcttcgattttccttggcctaacccaatgagttcaccattcatgtaaacttcagtgaaaaaggtgcggtcatgagcagggccttcttctttaattaagcgatattcaattgaaacatcgcctttgcgttgtaaaacttcttgtaattgtgttttgtgatccatctcatgtgaaaaagcaccggcatcaattttcggaaaaataacgtcttcaataaatttcttgctgcgccaactttttggtctaagtagagggcacctaaaaaggcttcaaataagtcacataataatgatgcacgtgttcgtccgcccgatgcttcttctcctttacctaataaaatgtagttgtcgaagtgacattctttcgcaaatttggctaaactatcttcccgaacgatggtgcgcgcatcttcgttaattttccttctggaagttctgggaattttaaatacaaatattgtgaaacaattaattctaaaactgcatctcctaaaaattcaagacgttcattatcggataattttaaatagcgatgctcattcacataggatgaatgagtaaaagcttgctctaatagattgacatcatggaaaacaatgccgtaacgttcttttaactctgttgttaactgattgtccattctccacattcctttacatttatttacaccttgtttcattatactttttttttcactttttttaaatggttctattcagaaaaagcctgttattcactgtgttctcattattttttagaaaaaataaataaatcacctctccagctatcaaatcagccactgctaccccataaaaaaagagaaaacgtagcaacgttttctcggaattttttgaataaacgtaccagcaagagacaataaaaaaagcattcagttattcactttcactaaatattaacatctcatttaaagattgggataattcttctttttgtcgtctttttaattttgttttagtcgcatcatgattctttactgtgcctatatgaacctgcacctctttcttattatttatagcaacaataaaaggtacagaaagcgactcatccccagtatatttttgataaaat

SEQ ID NO: 280 - DNA, 3214 bp; double-stranded, linear
cactattttatttatattaatgcaacgtttctatgtagaaggcgtgacttctggctctgtcaaaggctagaaaaactcgtttggtttatagccaaacgatgttttttattttttggcgttgttttccttacacgtttttcttcgtagcgcttgataattggacaaaattttcatgaccgccaaaaagtgttgattgacctcttgataatcctctaaggaaagaacactaagcgtttcagatagttgctgttttacttgattttctttttgcttaaagagcttctcgccttcttttgtcgtataaacattaaccacgcggcgattttcttgattatggcgacgttgaacaatcgctcgttcttctaaccccgcaatagagcgactcacttgaactttcgacgttcctacttggttggctaactccgtcatactaattccttcatttgttgccacaattaataaaattaacatgtctaacttggttaattttagatcctccaagtctaggtctttaaaaagcaattggctcatatatgaaaaaatttcagtaaagacactaatatctaaatttgatgaatgcttctctttatccatatgttctccctcgtttcccacctagtgtatactaaattcacttgattatcaaatggtaatgattgatttttgttaactattatgttacgttatacactaacttaaggttgtattgttgataaattggaagaaggatgcgaaaaatatgctagaactcaaagagatraaaaaatattatactgtcggcggaacgaccactaaagctttagatggcgtctctgtcgcttttcgaaaacaagaatttgtagccattctgggtcccagcggctctggtaaaacgacgatgttgaatgtgattggcggattggacaattacgattctggtgacttaatcattaacggcaaatcaacaaaaaattttaaagaagccgactgggatgcttatcggaataactcaattggttttatttttcaaagttacaacttaattagtcatcaagggattttggataatgtcgagcttggtatgacactgagtggtatttcaaaagcagaaagacgccaaaaagccgaagatgcactcatccgtgtcggtttgaaggaccatatccataaaaaaccttcccaattatctggcggtcaaatgcaacgggttgccattgctcgcgctttactnaatgatcccgatattttactttgtgatgaaccaactggtgcattggattcagaaaccagtctgcaaattatggcacttatccaagaactttcgaaagaaaaattagttattatggtgacccacaatcctgaattagctcacgaatacgctgatcgaattattgaattttcagatggccaaattcgtcatgactcgcgtcctcatattgaacatgaaaaaaaagaacctttcgaattgaaacgcaccaaaatgaaattcacgactgcgctgcgtttatcttttaataatatccgcactaaaaaagggcgaacttttttaaccgcctttgcttcaagtatcggaattatcagtattgcgattgtcctttctctttcaacaggattccagaaacaaattgataaaactcagtcggaaacgttagcgcaatttccgattaccatttctaaaatagcgaccgatcaagatccagaaagtttcaataatcaggacaaaaaaggcaccttcccgaaagaaaaagaagtgactgctaaaattagcgatgcggaccgtgcgcaacacacgaatttaattgatcaaaagtttattgactatgtcaatcacattgatcctgaattaagtaataatatcggctatactcgtctagtcaatatgracttattaagagaaatcaacgggaaagcacaagctgtcaaattttcaaackmyrcacccgacggccaatcaaacgcgatggcttctatgatggctgcccaaactggtgtcggcgtttctgcttttcctaaacaactagaaaatggaaaaaacaatttcttaaaagacaattactcgttgcttgaaggaaattatccagaaaaagaaaccgatgtcgttttaatcgtcgatagtaacaataccaccaatattaatgctttaaaaaatcttggctttgacgtgaaagataatcaaaagattgccttttcagacattgttggcacaaaaatgaaattagccaataataatgcattttacaccaaattaccgacaggcaacttcattcctaaccaagatttgcaagctgtttacgataacccagaaaatactgaattaacaatttcagggattttgcgaattaaagattcttcaacaatgaatctattagcacctggaattgcttatagcgatgcactttcaactaatatgattgccaaaaacaaaacctctgacattgttaaagcgcaagaagccagcaacactaacgttatgactaacgaaacattagatgcttccgcgaaagaaaacctgttgtcttatttaggagcgaacgaaatcccttcaagtattatgatttatccaaacgatttcaaatcaaaagataaaattcttgattatttagatgcttataacaaaggaaaagataaaaaagaccaaatcatctattctgatttagctggaacaatgacccgcttaacaggtggtttaatggatgccatcacctatgtgctgattgcatttgctgggatttcccttgttacaagtatgattatgattgggattatcacctatacttctgtcattgagcggaccaaagaaatcggtatcctgaaagcgttaggagctcgtaaaaaagatattacccgggtgttcgatgccgaaactgctattttaggcgttgcctctggtattcttggtgttgtgattgcctttctcgcaacatttccgatcaatgcagtgctctataacctgactgatttagaaaatgttgccaccttaaatccaattcacgggattattttgattgtaattagcacaatcttaaccatgattggtggccatatccctgcccgaatggcagcgaaaaaagatgcggcagttgctttacgtgcagaataaataacaaaaaataatcctttaatttctcttaaaggattattttttgtttgtaatttttataaaaccaccgtatactaaatgattgtgaatgcttaataaaaagaaacgaggtaatttcatgttaaaaaaaccatt

SEQ ID NO: 281 - DNA, 5830 bp; double-stranded, linear
cgcggcttgatttagaggaagtccaacaagaaattaacgatgcgaacgaattgcaaatgaagcgaaacaatcgtggcaagcaaaaaaagaacaacacaaagaagcaacatcgaaagaagaataaggagcaaagactgttttctgaataaaggaaaacagtcttttaaaatactaagaaatcacggttttttatggtagtttgctaattttttgttattttatcgtaaaatacggtaaactaagaaggaaactttgagaaaatagataaattattatttgctaaaggagcaaacttcttctaaaataaaaaggaagtttaaaagaaagtatggtagcagatggaaatacaatttttaggaacaggcgctggtgtaccagcaaaacatcgcaatgtcacaggaattgcgttgaaattattagatgaacgaaatgcagtttggctcttcgattgtggggaagggactcaattgcaaattttaaaaagtagtattcgcccaagaaaaattgaaaagatttttattacacatttacatggggatcatatttttggtttacctggtttgttaagtagtcgttcttttcagggcgggacagaacctttagaaatctatggaccagttgggattgctgactttgtcaagacttctttacgggtctcgcaatcgcggttgtcctatccactgaaatttattgaataacgaaagaaaatgacgttatttttaaagatawacaattcactgttcgctgtaatatcttggaccatggcatcacgagctttggctatcgaattgaggaagcagcgcatgaaggagawttmcaagtagagaaacttcaagctttagggattccttctgggccgttgtatggcaaactcaaacgtggtgaaacgattgtttttgatggacaggaaattaatggacaagcgtttgtgggagagcgtaaacctggacgaatcgtgacgattttaggagacactcgcaaaaccaaaaatagtgtaactttagcacgacgagcggatgttttagtccatgaaagtacgtttaataaacacgaagcaaaaatggcaaaagcctacttccactcaaccagtcaacaagcagctgaagttgcaaaagaagcgcaagtaaaacaacttattttaacgcatattagtgcccgttatttaaccaaagaggcctatcagcttcaagaagaagcccaagaaattttccccaatacaaaaatcgtaaaagatatggatatcattgagattccatttgccaatgaaggaggagcttagatggatttaacaaataaagtcgttgtcgtaactggaggttcagctggtttaggtgaacaaatttgttatgaagcagctaaacaaggggcggtcgtcgttgtctgcgcccgcagaattaatttgattggtaaagttcgcgagcagtgtgctgttttaagcggacgagaagcattttcttatcaattagatattgccgatccagaaagtgttgaacgtgtggttgaagctatttcagcagaagttggtcctatagatgttttagtcaacaatgctggttttggcttgtttgaaaattttgttgaaattgacttggctgttgcacgccaaatgtttgatgtcaacgttctaggaatgatgacgtttactcaaaaagtagctattaaaatgattgaagctgggcaaggacatattatcaacgttgcttcaatggctgggaagatggctacagctaaatcaaccgtttattctgcaacgaaatttgctgtgttaggtttttcaaatgctttacgtttagaattgaaaccgttgggtgtagcagtaacgactgtcaatccaggaccaatccaaacagaattctttgataaagcggacccgacaggcacatatctagctgcggtggataaaattgttttggaccctacgaaattagcgaaagaagtggttgggagtatggggacttctcgacgtgagattaatcgtccatttgtcatggaagcggcagcccgcttttatacattgtttccacatttaggagatttcatagcgggaaatattttaaataaaaaataaaggagtcgatcaagtcatgaaaaatcaatggcgtgttattttgggccttgtgttggtcttaattgttgttatttttgctgttttaaataatcaagctgttccagtaaactttggttttactaaaattagtggaccgttaatcttaattattttaggttctgcaattattggcgcactagttggattactaacctccacaaccaccatttggaaccaacgtaaggaattaaaagctgtacaaaaagagttggatatttataaaaatgatatggataaattagtcaaagaagaaacggaaaaagttcaacgttcttttgataatcaattggctgatttgcaagccaaacaagcggcagcaccacaagtctcagaaccagtggtcaacgaacaaacgtcaaacacagaagtagacgtaacgcctgtgtcaggtagtcgtattgatcgttatgtgaaacctcgtgtgaatgaagaggaacaaaaataaggaagagactttatcactaagtttcttttaaaataaaactgtgatatctgctatttatctaacagatatcacagtttttttctcagatttaaaaaaatgctttctttagtttttggaaaaattttgctataattacttggttaggagtgacgtcgtgaaaaaatcaaactatcaatggcagttacagacaaagacagaattacctgtagaatttatagaacaattaaaaaaagaagaaattaatccattaattggccaacttttatggcaccgcaatatccggacagaagaagcattacgtaagtttctacatccgactatcgaagatatttatgatccgttcttaatgcatgatatggagaaagcggtagcccgcatccagcaagccgtcgaagcgggtgaacaaatccttgtctatggggattatgatgcagatggcatcactagtaccacggttatgaaagaagcaatcgaattagtcggtggcatggttcagtactttctaccgaatcgttttgttcatggctatgggcctaataaagacgtatttgctgaacaaattgaacaaggagtccaattaattgtaaccgttgataatggtgtagcsggacatgaagcaattaactacgctatggcacaaggagtagatgtaatcgttactgaccatcatgaattgcctgaacaattaccagaagcctatgcgattgtccaccctagacatccacaaggtgactatccttttggagatttagctggtgttggcgtggctttcaaagtcgctactgcgttacttggtgaattgccaattgagttattagatttggtagcaattgggacgattgctgacttggtttcattaaccgatgaaaatagaacgtttgtcaaaatgggccttcaaatgattcaaactggtgatcgaattggtttagacgttttattacaagaagcgggtgtgaaaaaggaagctgtttcagaagaatcaattggctttaccattggacctcgtttaaacgcattaggtcgattaggggaagccgcaccaggtgttgaattgatgactacatttgatgaagaacaagcgctggaaatcgctaaatatattgatcaacaaaacaatgaacgaaaagacattgtaacgacgattgccaaagaagccctggatttaatcgacccgaatgcgccggtccatattttagcgaaacaaggctggcatgaaggcgtcttagggattgtcgcgggccgcattatgcaagaaacggggaaaccaaccattattttagcaatagatgaatctggtacgactgctaaaggctctggacgcagcattagcgcattgaatctctatgaggcgttgaacgaagtgcgtgagcaattcactcattttggtgggcatcatatggcagcgggaatgactttacctgttgaaaatattccttttgttcaagaacatttggcacactttattgaaaaaaatcaaattgatatggctaatggacaagagttgctcattagtgagagcttagcggtttcgcaggccacgactacttttattgatcaattgcgtattttggcgccttttgggaccgataatactgttccaacttttgtatttaaggaaatcacgcctacgcaaattcggcaaattggtgcagataatgcacatctgaaatttcaaatgaatcaagaaggggcacaattggatgcaattgcttttcaaatggggcctcaagcggatgaactagcacaaggaaccgccgatgtggcaggccaactttccatcaatgaatggaatggtcgtaagaaaccacaattaatggtgactgattttgctgtattgggaagacaattatttgattttcgtggcaaaaataatcaaacgaaaccaattccttcagaagcaacagcttatcttttgtttgatgaaaaaaatcaaaaattcatttcagatccaaccgctaatattattgtttggtcaaaccaagaagaattggtggaagctgtttctcaaaatcaaatcgaacaactggtttttgtcgactgtcctgtggaagcaatcacggttaaagaaattgttgaagcgactgagatacaacgtatatacatgatgtttatttcaccagaagaagcttatttaaacggtatggcttcacgtgaacaatttgcaacattgtataaatttattttgcagcaaaaagaagtaaatctacgttcccagctatcgaaggtggcaaattacttaaatatccaagaaaaattattaattttcatgatacaggtgttttttgacttaggatttgttacaatagaaagcggtgttttaaacagtattgagaaacccgacaatcgaccattgactgaaagtcaagtgtaccaacaacgattgaaaaaaataaaaacagaagaatttctactttacagtgattgtcaaacaatacaacaatggctgtggaatgaggaggacaaataaaaatggatttaagagattacattgcaagcattccagattatcctgagaaagggatcgtgttccgtgacatytctccattaatggctaatggggatgcctatcgtgaagcaacgaaacaaatcgtggattacgcgaaagaaaaaagaattgatatggttgtaggaccggaagctcgtggctttattgtcggctgtccagtggcttatgaactaggggttggctttgctccggttcgtaaaaaaggaaaacttcctcgtgaaaccatcgaagtgacttatgacttagaatatggttcagatacattaacgttgcacaaagatgccatcacaccaggccaacgtgttttgatttgtgatgacttgttagcaactggtggtacaattaaagcaaccatcgaattagtcgaacaattaggtggtattgtggttggttgtgcgttcctaattgaattaatggatttacatggccgcgataaaattgatggctacgatattgttaccttaatggaatactaatctaatttaattagaaagagcgaaggatttaatccttcgctctttctttgacatatttataaaaacggagcgtagcttggggggaacacaccgttttattatttattaagggaacttacgataaacgtatcttgcttgctgttgtttacgtgtacgtgtataacgcttctcatcccatgacataaaccaaagaataaataacggcgtcacgatcataaaagcaagacgtaatcctaatgttccnaagaaaatacctataaccaatacaaaaaataaaaatgccaacacgacgaatt

SEQ ID NO: 282 - DNA, 1959 bp; double-stranded, linear
tatttgactgcttaaacgtataatgaaacgccgagtcatttgttggtatccctaaaccattttgtaaaaattcaatcgcttcctgtttagtataagattctgcttctaattgcgttcctaaatgcggatttttttgatcaacaaattgtcttgctttgtcattattagcagacttttctataacgacttcctgttgcgaattcctacttcctgaacagccagttaatacaaataaaatcaccaacaacccgaaacacttactcaaagttttctcctcctctcccttttcattagtgatacctgatgatttcttttatattttagcatgcttgatataacgaatggtgctcaaaaaagacagaatcaacaagtaaaattgtcgactcacctttctcaactaatattaaaaaccatctgtctcaatattttcgaatttcctgkaaattactgataaataaaaacagctccttttgcgtatacytatattatcagcacctaaaggaggaamtttcttgaagcaaaaaaatctactcacttatcaatcacttgtagccttgttgctagtattcagtctctttagttttgacccatcggtttcttttgccacccgttctggaaaaacgcctgtttcagttgaactagaaattggagggctgcctggtgatgaatcggttgacgatgccattgatcctgatttagaaaatcctaacactagttttgacttgctctttattccgaaagaatttacttttgaaacccaagcgatttctggtgatttaacggcagttcctatacgaccttctgaaggcaatactcatacaatgagacacttcgggatgggggatgttcgcggagccttaactggttggcatgtcactgctgaaatcccacacatgcgaaacgaagctcattctttactaggcatcattacgtttcaattaacaggcagctatgctcgctatgacaaaacgttaaggcgtttctttatgacaaatacaatgtatggactggatttttcagaagatcctgctgcacccgacttcccgaccaacccaattattatcggtaacggtgcgactttaatgagtaacgctggtgatagaaaaggacaaggaatgtggagcggccgcatgaccgatatttctcttgcaatccaaacccctgtttcacaattatttcctggcgcatatacaggttcgattatctggaatttaatctctggacctgtataaaataaaaaaacgcttagaaaactagcggaatcactactcttctaagcgtttttttatatcataaggactatttgctccttctatttgtctaagcatgctttaccacttttcgtttaacgaatcacttggccccaacggtaatcaaactgatactcttgattaccattattcaggttaattttgtataaataacgcgggactttaatgaataacgcatcctctacttgaaaagcttcaataggtacattttctttagttaaaagcaacggtgtttgccactcgtatgtttttttctgccaattgtataagccaactatcgctkgattacttkgtcttttcttgtatgacagaacataataatttgcttcatctttcttgcctaataaaactggtgctattagttgctcttctagttttccttgcactgttgtacgctcttccgatgacagctcttgaccaatttgactctcatttgaatctaccgtccatttaggcgcttcttgtgtttgaaagacttctttgaaagttgggtcttgttttaactgccaatttttcaaatctaattgataatatcgattgtttaatccataaatatagagatagcgattatccataaaacgataatcaacgaaatcagagcttaaatagtcttttaattcagggaatttcytcactaaatctgcttcagaaaactgktttttcctgtttgnacnagnaagaaatggcc

SEQ ID NO: 283 - DNA, 3485 bp; double-stranded, linear
gataacctgacgagccataagattgattataaaaaccctcataaagttacttctgcacaagttggttcatatagtaaaacagaaacagataacctattcatcaataaatcagatgctgaaaacggcttattggtaagaaaaagtattgaaataacagacttaaataatgctaaagaacctggcatatactcgattccagctacaggagttgaaaacaagccgctaccaaactctggaagtttgttcgttagtaaagacccaggaggagtcagacaactatttcaaacggaaaggactatcgttattcgtcaatttggtggtattccttcaaagtggacggattggaaagaagtagcatttaaaccgaatgttgtgaatttaactgaacctcaacgtataggsggaactaaagaatttgcggatattccattagtaaatggtacagaatagctttgaaagaagatatatttttttatcaaaagactgggcttgatgaagtccaagcagactacaaagcttcttttagggaagaaacaaatatgtttcttacacgagaaggaaacagagttgatgcttatttacgagttaatgtggtggatgtcaccaaactaaaaactgcttttgttccgatttttcaaattcctgatggatttaaaattgatcttagcatgagggagagtttctggaatgttccattgacagtaactcaatacacctacccacaaggtaactatggtgcattatatgagatgaacgtgaaaggaatccgattcggaagtgaccgtcttggtaatcattatctatacggaagttggcatactaatgatccaaaaccagatgctaaatttaagtatatgctttatgtgaacttatataatttgtctgagggaagagattttgtttcaggttcatacaaaggagaaatttattatgtagctgttgaaattgatggacagttaggrgaaaaattaaaagtatctgatggtttttataagtatacggtaggaactaaaataaataaggcttctcaaaatgcatgggtgattggttatgatcagtcaggaacagaagtaactagaagcaaaatcaaaatattatagagagtaaggagaaaacaaaaaatgaaaaaaatttggaaatatggacgtactggagggcaagagctacaggtatctgatgatttcccaatgcaagttccttttacagatgtagttcctttaccaaccgtcaatttagaagaccaattttttattccatctgagaatagatggaaagaaatttctaaccaattagataaggaaaatttggataatttaagtatattatataaaaaccttgaaaaggataatgaattattaaaagctaaagcagataatcttgctcttctaaattctaagctaatgctcaatgaccttaatatccaaaaagaaaataccctcttgaaagctaaagcaaatgacctagctgagattggtgcgaaatcaatgttgtccattgtacaaattactggggaaatagggaaaattaatgagcaacttaaaggaggtgctaaataatgtttacttttgatgatgttaaattgatgtatgattggggtctttatactgatgatgaagtaaagctatttgtacctacatgcattacagaagaggagtttaacgagattgtagggaaagaaggttagtcagttggagttagagcaaaaagtaaaagaacatgaaaaacgtcttggtgatcacgatagagaaataggtcgtttagatagacgaacgatgactttacaagagcaacttaatgcaaatttagttagattagatgagtcaaataaattcttacgtgaacaaaatatgaagcaaatggagcaaaatagtgaaattctaaatgctattttgaatagaaacagtgaagcggatgaaagaaaagacgaactaaaaaaacttaacactgaaaatatatggaaagtaatactagctatatytgtttctagcggagcaataactattttatttaactggttaagcacatttttaggaggcgctaaatgaaaattaattggaaacataaattcacaagcagaaagttttgggctgcagtgacrggrgtatcattgctttgktagcagttttcaatgtagatgatttamcatctgaaaaagtggtcactttagtagcagctattggcttattagctgcatatattgttggcgaaggatttgttgattcaaatagagataattaagaagtcattctaaaatggcttctttttttatataaaaaattaagaaagaggttttaaaatgaaaaagtttagtaagtttttattatcattagttgtagttacaggattattgttaccaactgccgcagatgcttatcaagtggaacaagatcctatcgattttggcggatattttccaggttatgcgactaacgaattaattgtcttgcacgagtcaggaaatgggaacaacgttggcctaaacagtctagacaatgaaacggcatatatgaaacgcaactggacgagcgcttatgtttcatattttgtcggttctggtggtcgcgtgaagcagttagcgccagttggccagattcaatggggagcgggagcgacagccaatgcaaaagcatatgcacagatcgaacttgctcgaacgaataataaagaaacattcaagaaagactatgctgcctatgtcaatttgattcgtgatttagcaacacaaattggtgcaacatttgacttggatgatggaacaggatatggaattgtgacgcatgattggatcacaaaaaattggtggggggatcatacagatccatacggatatttagcacagtggggaattagcaaagcmcaactagcacaagatttacaaactggacttccagaagatggtagcgaagttattgtaaatcctggcaagcctaataaaccaaaatataaagtcggtcagcacgttcgcttcacaacaatctacaaaaatccagatgcgccaatttctcagcatatcaatgcaaacacattgtggactcaagttggaaccattacacaaaaaataaatggccgtaaaaatctatatcgcatcgaaaacagcggcaaacttttaggttatgcaaacgatggtgatattgcggagtttgggaaaacagcaaaccaacaccagctaaaacattcactattggtgtaaatgaaggaattgtgttgcgtactggatcacctagtttgtatgcgccatttacggcgtgtggccaaaaggtgcacaatttagatatgattcggttcgtgtggccgatggctatgtttggttagggggttctgattcaaacggaactcggatttgtatcccagttggcccaaatgatgggcaacccagacaatactggggtactggatattaagaacagcttganttttctgttaacccntangtttaggaataaacttacacttatttaaatttctcctgagtcgccttnccccaa

SEQ ID NO: 284 - DNA, 914 bp; double-stranded, linear
agaaggaaaaaagaactgaaaaagcttaaaaaaagctgggaaaaaagtggaggaagaggtaaaccaccaacttctctatctacgttacgatgtggtcgaatactccaagaatatattgagttttgcttatttgatatggaagaaaatactcgtttagctatgtatcagccaaaagaaggcatttatacacaaaatgaaacacaaataaaacgagtgattgggtggcttgaaccgaaacacaatgctagagcggtaaatgatgttatttttcacatttggaaagaagctaaaataaagcctaaaacggtctcaagatatcttataccagtgaaaaacggggtatttaaccttaaaacgaaacaactagaaccgtttacgcccaattatgtattcacatcaaaaattgcaaccgcatatgtagaaaatccgtcgttacctaaatttaatgattgggatgtagagagctggttgaacgaaattgcttgcggagatgcacaaataactactctgttatggcaggtaataagtgatgcgattaacgggaactattcaaggaaaaaatcaatctggcttatgggtgatggatcaaacggaaaaggaacgtaccaacagttattatataacctaattggtccacagaatatcgcaacgttaaaaataaatcagtttagtgagcgttttaaacttgctttattagtagaaaaagtggcagttattggggatgatgtaggagcrggaatttatattgatgatagttcggaatttaatagtgtagtgactaakgrgactatactaattgaagttaaaaatagaatgccctatagcgctcgaatgtatgtgactgttattcagtctaccaatgagatgcctaaaattcgtaataaatctaatggaacgtatcgccgtttgcttat

SEQ ID NO: 285 - DNA, 1053 bp; double-stranded, linear
ggcatagccttgaagaagcctatcaagcgattttgtcggcgccaagttttgatgcttggattaaaaccacacgccctttgaaattagacaacaatcaattgtggctagaagtcccttctgcagttcatcgtgattactgggaaaaaaatctttcggcaaaaattgtcgaaactggatttaaattgaccggtgcagaagtgatgccccattttgttgttgccgatgaaaaagacgcagcactggcacaagaactcgaagaacctgccgaagaagaagttgtttttagtgaacaaagtaaaaaagcgatgcttaatcctaagtacactttcgacaccttcgttattggtaaaggaaaccaaatggctcatgctgcagcgcttgttgttgccgaggatccaggttcgatttacaatccccttttcttctatggtggtgtagggttagggaaaacccatttgatgcatgctattggtcatcaaatgttagtgaatcaaccagatgccaaagtcaaatatgttagtagcgaaacgtttacgaatgaatttatcaactcaattcaaacaaagacatccgaacaatttcggaaagaatatcgcaatgttgacttattattagtcgatgatattcaatttttggcggaaaaagaagcaacattggaagaatttttccataccttcaacgatctttacaatgaaaataaacaaattgttttaacaagtgatcgcccgccgaatgatattccmaaattacctgnaacgattagtttctcgctttgcttggggtttgtctgtcgatatcaccccgcctgatttagaaacacggattgcaattttgcgcaaaaaagcagatgccgagcgtttagaaattccggatgatacactaagttatatcgctggtcaaattgattccaacatccgtgaattagagggtgctttggtccgtggttcaagccctttgccacctattatggagaaggatattaccactagttaaccggcggagccttggaaatccctaaaancagttggagtaaaaaancaatngccnatttac

SEQ ID NO: 286 - DNA, 2883 bp; double-stranded, linear
cgattagtgcctaaagacaagctcacgcaattaacgaaacaattcctttacttttcggagtccttgggattttatttatggtcggccaataagaagcaagaacgaatagaattactttgtcatattgaagagagtcaatgtcaacaattttatagaagaaaacaatcatgggatttttacgawaaacrattactagaratcttccgrctaccgaccgctaatttaaatttactgccagatagacggcacactggccaattgatgcatgattattatcaaaaattgacgcaacaacttggttacagaaatgctcagttgcttagaacacaaagctttttatacacgaaaggttgtcaccttctccagttacctccttggttttactatcctggattgaagctaataccttcttctgaagaagatattcatttaaaaatgcttgtttgggaagcactaaaaaccgaagaagagcgtttagtgaccaaacaggaactatggcgtatcttggaagctatttttttggaagaagggaactttgtttggcagccactgccgaatattggcttaaaaaagctttttaaaattgtgggaaataacttattgagatggttacaagaatgttatgtgttaattaaagtaaacaataagtacctaataactagtattttcctaagagaagatcctgaaaagctcattcattggctaaaaaaagtgaaaaaacaacatttttttagtcacacgtgttaaattatgatagtataatgagtaaaacgtttcttaaaggagagtaaactatgagcgaaattaaacaattaccaacacgtgatgaagktccaactccattgacttgggatttaaccaaaatttttaaagatgatgctgcttttgatgttgcgtataatcagttgatagaagagctaaatcaagcagaatcatttaaaggtaccttaggggatggtgcagaagcttttctagctgcgttagaatacgttttagatgtctatcgaaaagtggaaacattatatgtctattctcatttaaaaaatgatcaagacactacaaatacagcttaccaagctttatatgccagagctagttctttatatgcacaagttagtgaagctgtttcttggtttgacccagaggttttaacattaagtgatgaacaaatctggggatattttgaagagcagccgaaattagctgtttatcgtcactatattcaaaatattttagatgaacgtccccatgttttatcgatggaacaagaagctttactggcgggggctagtgaaatttttggtgcctcaagtaatacattttcaattttaaataatgcagacttagaatttccaactgtgcaaaatgctgaaggcgaaacgattcaactttctcatggcgtttatggtcagttaatggaaagtgtcgatccatctgttcgtgaagcagcatttaaaggtttgtacaaagtatacaaacaatttagaaatacattagcctcaactttaggtgcacatgttaaaacacataattataaagcaaaaattagaaattatgattctgctcgagcagcctctttagcaagtaatcatatccctgaaagtgttcacgaaacattagtagctgtagtaaataaacatttacctttgctacatcgttatgtaaaattaagaaaaaaattattaaacgtagaagaattacacatgtacgacttgtatgcgcctttgctaggtgaagcaccaattcgttacagctatgaagaagcaaaagaaaaagcaattgaggctttaaaaccactaggtgaagactatttatctattgttaaagaagctttttcaagtcgctggattgatgtgattgaaaatcaaggaaaacgaagcggcgcatattcttcaggagcttatgatacagccccatacattttaatgaattggcatgatagtttggatcaactatttacattagtccatgagatgggccatagtgttcatagttactatacaagaaataatcagccgtatgtttatggcgactattcaattttcttagctgagattgcttcaaccacaaatgaaaatattttaacagaatatttattacaaacagaaacagatcctaaagtacgtgcgtatgtcttaaatcactatttagacggctttaagggaaccattttccgtcaaacgcaatttgcggaatttgaacattttattcacacggaagatgctaaaggcacgccattaacaagtgaatatttgagtgagtattatggcgagctcaatgctaaatattatggaccagaagtagttagagacgaagaaatcagttacgaatgggcgagaattccacatttttattacaattactatgtttatcaatatgcaactggcttctcagccgcttcggcattgtctaaacatattttagctggagaagagggagctttagagaattatcttaactacttgaaagcaggaagtagtgacttcccaattgaagtgatgaaaaaagcgggcgtggatatgacacaagccgcgtatatcgaagatgcaatgaaagtttttgaagaacgtttaacggaattagaagctttggttgaaaaattatagacaaaaaagtgggatataagtccagatgacttatatcccactttttaactcttaagataattggttaacagctttcgtcgcagcatcttttttataataaatgtaaatgtccatttggaaaatgataattggagcgacgtttaaattcaaaggttgcgtcacctkggttcagcaacggttcgttatgtggatgaacacgacaaagttgtttaatttcatccatgttttcaaaattttcgactaaaatgccgaaatcgttctcgcaagtatagttgta

SEQ ID NO: 287 - DNA, 3765 bp; double-stranded, linear
cgttaaccnagggtctagctgtctgntaaagctagaaccgaaggacttagagncggattaccccacaaagtcttcccacaawtttkgatactttacgagtkgaaacgcctgatacataccattyccaaacattgaagcccatgagggctttttcgtttccgttgataacgttccaaacactgtgggtgaaaaatggccatcacgtgttctgggtacttttaattctagcgtgcctacacgtgtcgtaaartgcgctcataatagccatttcgttgactttgtcggttttctgttcgttcatattcttttgcttgaatatattctgttcgttgattttccattagttgattaaataccgttgttaaaatatttttagaaacgtcatcctttacagaatattcaataatgctttgaatctcttcgcttttcagtgtaaaatgtacttgggtcatgtaaaagtcctcctgggtatgtttttgtcgttaaaaacattgtaccgtaaaaggactgttatatggcctttttacttttacacaattatacggactttatctatttcagcctgtatcatagctaaacaaatcgagttgtgtgtccgtttttgggcgttctgctagcttgtttaaagtctcttgaatgaatgtatgttctaagtcaaaaaactctgacagcgcctttatatagctttctttttcttctttttttactttaatgatcgatagcaacaatgatttaacactagcaagttgaatgccaccatttcttcctggtttaatcttaaagaaaatttcctgattcgccttcagtaccttcagcaatttatctaatgtccgctcaggaatgcctagcgcttctctaatctcttttttagtcgtcaccaaataaggcttgtatacatcacttttttcgctaatataagccattaaatcttctttccattctgacaaatgaacacgttgacgttcacttctttttttcttgaatttaaaccacccttgacggacaaataaatctttactggttaaatcacttgatacccaagctttgcaaagaatggtaatgtattccctattagccccttgatagttttctgaataggcacttctaacaagtttaatcacttctttttcttctaagggttgatctaatcgattattaaactcaaacatattatattcgcacgtttcgattgaatagcctgaactaaagtaggctaaagagagggtaaacatgacgttattacgccctattaaacccttttctcctgaaaatttcgtttcgtgcaataagagattaaaccagggttcatctacttgttttttgccttctgtaccgcttaaaaccgttagacttgaacgagtaaagcccttattatctgtttgtttgaaagaccaatcttgccattctttgaaagaataacggtaattgggatcaaaaaattctacattgtccgttcttggtatacgagcawtcccaaaatgattgcacgttagatcaactggcaaagacttyccaaaatattctcggatattttgcgagattatttggctgctttgacagatttaaattctgattttgaagtcacataactggcgtttctaaaacaaaatatgcttgataacctttatcagatttgataattaacgtaggcataaaacctaaatcaatagctgttgttaaaatatcgcttgctgaaatagtttcttttgccgtgtgaatatcaaaatcaataaagaaggtattgatttgtcttaaattgttttcagaatgtcctttcgtgtatgaacggttttcgtctgcatacgtaccataacgataaacgtttggtgtccaatgcgtaaatgtatcttgattttcgtgaatcgcttcttcggaagtcagaacaacgccacgtccgccaatcatgcttttttttgagcgatacgcaaaaatagcccctttgcttttacctggcttggtagtgattgagcgaattttactatttttaaatttgtactttaacaagccgtcatgaagcacagtttctacaacaaaagggatattcattcagctgttctcctttcttacgaaaattaattagttagaagctacgatcaaagttgaatcacaacaaaaaaggcaatcaactaagtttttcttaattgattgcctggtatcttcttaaagacttgaaattccctcaaaaacccgatataatgggtttacagatatttaagtatctgattaataaagtaattaaatactttaccaaatttcgggtctcgacttctttaattgattggtggtaatcaattaaggctcgcaacttattttcttggcggaaaataagttggtcgtggctctttttttgtattctttattcagttcgttgtttcgttatatctagtataccgcttttaaaaaaaataagcaacaatttcgttaaatatattaacgacaatcattgcttctcttcttctatttgcaactctacttgttctaattcattaggaattaagtcaataactaaggttgagtttgtcaattctgcaattcgttccaatgtttttaatgtcggatctgattttcctgattcaatcaatgaataatttggttctgttgcaaagttttaaatctactatcaaataaggtagaataatagaaaaagatagcaggaggaatgacgatgaatcattttaaaggaaagcaatttcagcaggatgtgattattgtagccgtgggctactatcttcgttataaccttagctatcgtgaagttcaagaaatcttatatgatcgtggcattaacgtttctcatacgacgatttatcgttgggtgcaagaatatggcaaactactctatcaaatttggaaaaagaaaaataaaaaatccttttattcatggaaaatggatgaaacgtacatcaaaattaaaggaaaatggcattatttgtatcgagccatcgatgcagatggtttaaccttggatatttggttacgtaaaaaacgggacacacaagcagcctatgcttttcttaagcggttagtgaagcagtttgatgaaccgaagttgttagtcacagataaagccccctctattacaagtgcctttaagaaactaaaagaatacggcttttatcaagggacagaacatcgtaccattaaatacctgaataatttgattgaacaagaccatcgtccagtaaagagacgcaataaattctatcgaagtttacgcactgcctctaccacgattaaaggcatggaagccattcgaggattatataagaraacccgaaaagaaggcactctcttcgggttttcggtctgtactgaaatcaaggtattattgggaatcccagcttaaatcatagataccgtaagggattttattctttatttaaaactttgcaacagaaccattgtgtaaaagtaaaaaggccatataacagtccttttacggtacaatgtttttaacgacaaaaacatacccaggaggacttttacatgacccaagtacattttacactgaaaagcgaagagattcaaagcattattgaatattctgtaaaggatgacgtttctaaaaatattttaacaacggtatttaatcaactaatggaaaatcaacgaacagaatatattcaagcaaaagaatatgaacgaacagaaaaccgacaaagtcaacgaaatggctattatgagcgcagctttacgacacgtgtaggcacgctagaattaaaagtacccagaacacgtgatggccatttttcacccacagtgttt

SEQ ID NO: 288 - DNA, 7043 bp; double-stranded, linear
nnataaatgttgaataaagtttgatantgttttattatgttttcgagaaggggatttgagtttaaagaaagggacagaattttaatagtagatacacgaggtaaggaggaaaacaaaatgcgtgtcatacttggttcagatttagatggaataaaattaaaagcagaaatgaaacaatacttattgcaagaaaaagttgaggtaatcgataaaagtgaaagtgcttcggaagactttatagaagcaacgcttgctgttgctcatgaagttttaaaggatactgaaagtttaggaatcgtttttgatggttatggggcaggtagttttatgactgctgctaaaattaaaggaatgattgtcgctgagttgtcagatgagcgttctgcatatatggcgcgagaacacaacaatgctcggatgatcacggtgggcgcaaaaattgttggaacggaactagccaaaaacataataaaagaattcttaacaggtcattatgcaggcgggcgtcatcaaatacgtgtagatatgttaaataaaatggcttaataaataatagaaaggaagcgtttttatgaaaattgccattggttgtgatcatattgtgacggataccaaaatagcagtttctgattttttgaaagcaaagggatatgaaattttagatgtaggcacgtatgattttactcgaactcactatcctattttcggaaaaaaagtgggagaagccgtaatgagcaatcaggctgatttgggtatatgtatttgcggaacaggcgttggaattaccaatgcggttaacaaagtgccgggtatccgttctgctttagttcgcgatatgactacagcgttgtatgcgaaagaggaattgracgcaaatgttattggtttcggtgggaaaataacaggagaattcttgatctgtgatatcgctgctgcctttattgaagcacactatcatccaacagaagacaacgaacaactaattgaaaaaattaatcaagttgaaaaacaacatccagaacaacaagatgcgcactttttcgatgaatttttagataaatggcaacgaggagtctatcacgattagtatttaatcaatgaaggttacttaagaaagtggtcttaaataataatcattggtatttgagttaaattccccttcattaatttttattgctgttttaatgtggcactgtaaagagcattattaagaaaaagaagtaacaaaggaacaaattgaaggctatacaggtaascataaaaagtacacgagttcttttctcgtgtactttttatggtttcgctgcttgttttattttagtaattatttttctataaaaatagtcccagaattattaaaataatcccgataactaaactgccgatgccagaagccgtaccatattttttacctaaatttatatcagtagtatttttaggaatcaagtttgagaaaaaataaaatttttttaccaagattagatatgcaacaagtaaaagtaataatcctaagagaagataactaagattttcagctaataaatctrgatgagctaataacaatatccccaaaaagaggcctaccaatccatatttcatcgttttttcttttgctgacatataaacatccctactttactttttaatttattaagagcataaaaccatagattcgatataagttcattttgttgtatccaaaagagcatgacctggaatgacctatataattagaaaattggagtgatatatagttattttaccatagcttaaatgagttgattaactccgaataatgtacaactatgtacacctattgtgggtggaatgtgtgttgggactttgctaacctaatagttgaaaaaatgaatcaataaatttagaaaagggactattcaaaagaaacttttttgggaattgctatattatttatttttttaagcgtaatcaactaaatgtttttatggataaagaaagtcattgttccttgtcatcaagctacaacagccaaattcattagaatttttttagtgaatgactttaattttagaaaggtactgttgttaaacattcatgctatcaaaggagtgtgaggcgaacgaagcaagtattttcattttataaaagttgtattatggactcttaaaaagaggtgatttaaaaaattttgaagtggaaatgttaagaaaggagagaggaaatgacttatttagttctggtcagtcatggcgattttgctagagggttaaaaaattcattagggatgtttgctggcgatgagatagagaaagtcagagtgtttggcttacaacctggtgaatctaccgataattttggtaagcggtttctttgtgaagttgaaaaattaccgcaggaaacgaggctaatcgttttggctgatattgtaggtgggagtccacttgctactatttgtaaagtattagataagcaaaaaatgctagaaaattctctgattgttggaggagtgaattttccaatggctttaaatgcgcttctattgaaagaaactagtgaattatctgatttgaaaaaaatgatagtagcagatgcttgtcatggcattagagagttaactataactgaaggcgatgtaactgaagaggatatctaaaggagaagatgaacatgtcaatttcttttgttcgaatcgatgatcgaatgattcatggcttaattactttacgttggactaaagaaatgccatgtgatggcattatagctgtgaatgacaaagcagcaagtaaccccattttaaaggaagcatataaagcagctgcacaagataaaaaaacctttatttggacaatggcgcatttttttgatgtaaaggataaagtattagcgtctaagtcaaaatactttttgattacaaagagccctttggatatgaaaaaaattttggtagattggcattttgttccaagtgaagtaaaaatgattaatgttggaccggggaatgatcgcgaagggacaattaaattaggggataaccaatcctttacagcagaagaagcagcggcttttgaagaaattgaaaaggctggttacaaagtggattttgccttgttacctgatcaacgaattggttcttgggcgcattttaaagctaaatttggttactgattctagaagttttgaaaagaggagagtagtattatgacaatcaactggatacaagcggctattttaggcctatttgcttgtctgtgttcaaattcttgtatggctggacaagcggtgggaaattatacgattgggcgtcctttagtcggcggattagtttgtggcattattttaggagatttaaaattaggaatcgcttgtggcgtacaatgcaattagtttacattgctttggtcacacctggaggcacagtgtctgctgatgtgcgggcaatttcatatatcgggattcctttggcgatggtggcgatttcgaccaaagggttagatccacttggcggctctgcagccgacctggctaaatcggtcggcacattagttggaacgatcggaacggtattattttattctgttgccgcgttaaatttagtttggcaatcgtttggttggaaagatataaaaaaaggcaagcttgatcatttatatgccattaattttggttggccgtggatttctcatctacttttttcctttttgccaaccgtgattttaacctattttggggctacggctgttacagcaatgagagatgcattacctatggatggtcttgcaatgaaaacgctttttactgtaggtggcatgcttccgtgtgtgggaattgcaattttgttacgtcaaattgttaataagaacattgattttgtacctttttttgtagggttcacattagctgcttcattaaaactcaatttagtctcaataacgattattgcgcttctttttgctgtaattttttawaaaattgctttgattaaaaacaatactaaactggttgattcaacaggaagtctaacgaatgatgacgaagaggaggacatatgagatggaagagttgaaagcaaataaattagaccaaaaaacgttaaagcattcttttcatttatggttttggggagcattaacttgtttttcacaacagcatatgcaaaccttcggctatctttcttcaatgcttcctattatcaaaaaactttatccaaaacatgaagaccaagtgaaagccattcaagcatatacagctttttttaacacaaatccaatgcttggaacggtcattgttggtgtgactgctagtatggaagaggctagagcaagtaagaatgaaattgatggagaaaccattaatgatatgagggcaggattaatgggaccgattgcagggattggcgattcattagttgatggtaccttgattcctatcttgttaggaatttccttaggaatgtccacgggcggttcgccaattggtgccatattttatattattgtttggacgttaatttcctattttggccaacgctttttgtattttagaggctatcattttggtgataaagcagtaagtttcttagttgggaaagaaggagccgctgttagagttgctatcggagttattggtagtatggttgtcggtggggtccttgcatcttgggtaaatgtaactacttctcttaaattaataggtgctgacggaaaagttttccttaaactgcaagataaaattgacagtatttatccaggattattaacgatacttgttaccttgttttgttggtggttaatgtccaaaaaacatgtttccgctatttggacgatgcttattttagttgttatttctctcgttggcgttttattaggtgttttcaatccaggattaacttactgaacaatcaccaaaaaggactctagctgttagagcaaactgacttttgcataaaaccgataacgaaaaagctaataaattaaattcttactctctaagacacagaaaaaatcttgtgattaaaataaaaatatataaaatagaagaaatttagagactagcttctattttatatatttttttgttttagaaatttagttggtttattagaattttaggaaaaattttacgaaaagtgtcgcaaaaatggctcctaaaaacggtgcagttccgggaacaatcaacccatattgccaatcattattggttttatttttgattggtaaaagttgataggcgatacgaggacctaaatcacgtgcttgattcattgcgaatcctgtagtaccacctagccccatgccgattgcccaaacaagcaagccaacagcaatgggtagttgtgtttcgtaggaatgtgcaatcgctaaaatagatgttaaaaaaatgaatgttgcaaaagtttcaacaaaatagtttcttggtaaatttcgttggttcggatttgtagaaaaaatattacgaatggcgatcggatcgacactatcggcggatagcttgaaatgatcagcatacataatataaacaatgacggcgccacaaatgccgcctaacatttcagcgatgacatagggaatgaagtaagaccatggaatcattcctaaaatagcttgagcgagggccattgctggattaatacagactccgccaaagacgaacagaacaacagagattccaaaagcccaagtagtgattgcaaacatgtgaccagaaccagcgtattttgttcgttttaggacatcgtcgcagtgaacacctaccccaaatacgatcattaatgcagttcccataaattctgataagatatgatgaaacataagataaagctcctttaatcaatagttttgttatttaatgtttggacgaggcgatagacttcctcgattgtaaaattatattgtttagcaattcgttcacaatcttggtattcaatagactctttcaataggccatgataatgattttttttaatatggaccttaccaaaaggtgtttccaagattttgaaagaacggtccatcacactacgttccattgtttgaaaacgcataccaattgtagaagtatgtttaaagagtagttctgtaaaatattctttttcctctgttgttgttaaaaccgttaatagaatggcacttcggttttttttcatatgaatgggcgtgaaaaaaacatctagagcaccatgctctaataatagatccattacgtaacctaactgttcaggtgtttgattgtctatatttgtttcaatttttaagacttggtcatggtgttctgtcctcttttttttactatgtgtttcagtaaagattgatcctctgagggcattgaacttgcctgtttcccgtttgccaaatccgtaacctattttttcaattaatcgttgttctggtgcgacaaatagaggactaagttctttaaaaatagctaagccagtcggtgtgacaagttcagtttttatctcaaagtcttgttgaatgattaaattcgtttctttacgtaattccatcacagcgggaactggtattggcatgactccatgggcaattgtgatagtgccacttccatctgtaattggcgttgaatagacttgttcaatctctaactgttcccataggataaaaaagccaacgatgtcaacaattgaatcaattgctccaacttcatgaaaatgaatagtgtcaattgtttgttgatgaacagcagcttcagcttttgcaatgtcatagaaaacatttttactatgtttttttacaaaattggacaagtcgcttttttcaattaaggaacaaacaaaacgatcattcacgaaaagaaaaataatctgagttttgcaccaaacacaaggtttgatctgcctattttactgaaagattcgtttaaacctggagactatacctataccattaagttgaaaaaccatgaggggagctggacgttctcaaaagatttcacgataaacaaaaagcaagctgatcagtataataagcgttctgttgatcataaagtcaaaaaccttcactggcttaagtacctcatggnctttttaattctagttattttaggtaccg

SEQ ID NO: 289 - DNA, 817 bp; double-stranded, linear
taattattatctcatttgtagattagtaaaaggataccgaaanacatttagnaaagcaaccacttattttcagaaagttaggaaatcatgaaaatatttgktcytcattttccttaaaattttgttaaactgtaaagatatgagtcstaacgaaggagttaaatagtatgacagaatccaaaactgccattatttttgatatggacggtgtcctagtagatagcgaagcttattattatgagcgacgtaaagcatttttagcggaatttgatttgaccattgagggcctaaccttgccggaattagtcggtgcggatatgcgttcattatggcaaaagattgaacaagtcaacaaaaaagagctagatattgcttttttaaatgaacaatacatagcctataaaaaagcgcatccgatagattatttagctgtgcttgatgaaaatgcgaaacgtgttttacaatttttaaaaagacaaggctataaaatcggattagcttcttcttccacaaaagacgcaattgaagaggttttgacagtggggcaattaagtagttattttgatgcggtcgtgagtggggaagatttcgaagaaagtaaaccggcgccggatatttatctgcacacgttacaagaattagctgttgcgccacaggaatgtatagccattgaagattcagaaaaaggcattgcctctgccaaagaagctgggctagaagtttgggctatgcgcgatgaacactttgggatggatcaaagtcaagcggatgccttcttaacacmactaagtgatatktgtaaaaaaattagtgaaaa

SEQ ID NO: 290 - DNA, 10397 bp; double-stranded, linear
atgaagaaatatatcttcacagaaagaaacggtatctacatcattgacttacaaaaaacagtgaaattagtagatgcagcttacgattacatgaaaaacgttgcagaagaaggcggcgttgctttattcgtaggaactaaaaaacaagcacaagaagcaatcaaagatgaagcaatccgcgctggtcaatactatgtaaaccatcgttggttaggtggtacgttaactaactgggatacaatccaaaaacgtattgctcgcttgaaaaaaatcaatgcaatggaagaagacggcactttcgaagttttacctaagaaagaagttgctggcttaaacaaagaacgtgaacgtttagaaaaattcttaggtggtatcgctgatatgccaagaattccagatgtaatgtacatcgttgacccgcgtaaagaacgcattgctgttcaagaagcacacaaattaaacattcctatcgttgcaatggttgatacaaactgtgatcctgatgagatcgatgttgtaatcccttcaaatgatgatgcaatccgcgctgtgaaattaatcactgctaaaatggctgacgctttcatcgaaggtaaccaaggggaagaccaagcaactgaagagttattcgttgaagaaacaccagaagcaacttcaatcgaagaaatcgttgatgttgttgaaggaaacaacgaatcagctgaataataatgattacggagctgtctcaaaggctaggcgacaaaaagcctgattctcctttgagatagcttttttaaaaagaattgataatatccgaggaggacacaaataatggcagacgttacagctaaaatggtaaaagaattacgcgatatgactggcgttggaatgatggacgctaaaaaagcattagtaaaagtagaaggcgacatggaaaaagccgtagactttttacgtgaaaatggtatggctaaagcagcgaagaaaaatgaccgcattgcggctgaaggtttagcaaacgtagcaactgtgggtaacgttgcagcaatcgttgaagtaaactcagaaactgacttcgtttctaaaaacgaaatgttccaagatttagttaaagacattgcgactaaagttgctgaaaacaaaccagctacgatggaagaagcaatggctattaaaactgaaaaaggcacaattgaatctgatttaatcgaagcaacaactgttatcggtgaaaaaatcagcttccgtcgttttgaagttgtcgaaaaagctgacaatgctgcatttggcgcttacttacacatgggtggccgtattgctgtattaacagttatcgatggcacaactgacgaagaagtagcgaaagatgttgctatgcacatcgcggcaatcaaccctcgctatgtcaacgaatctcaaattcctcaagaagaattagaacacgaaaaagctgtgttaactgaacaagcattaaacgaaggtaaaccagcaaatatcgttgaaaaaatggttgttggtcgtctacaaaaattcaaagcagaaatcgctttggttgaccaaccatttgttaaagatccagatatgactgtcgaaaaatttgttgcttctaaaggcggcgaagtgaaatcattcgtacgttttgaagttggcgaaggtatcgaaaaacgtgaagataactttgcggatgaagtaatgagccaaatgaaaaactaagagcatcaaacgctcggttgaaaagccgtgaatcataagtatctaaacagacagcgatccccaaaggaagctgcataaattgattactgcttgattcaaggcagtctttcagccatttgggaacgcataactttgatatgcgctccctttttttaggcaaaaccagtggatcgcactgcttggtctaaaaaatcattttggtgaaaagtcatctaaatgaggaattgaatgatttttagagaatcttggagggaattatgatggttaaacctaagtatcaacgtgtcgtattaaagttaagtggagaagcgctagccggagaagacggttttggcattaaaccaccagtcattaaagaaatcgtccaagaaattaaagaggtccatgaattaggtatcgaaatggccatcgtggttggcggcggaaacatttggcgtggacaaattggtgctcaaatgggcatggaacgtgcacaagctgattatatgggcatgttagctactgtgatgaatgccttagcattgcaagatacattagaaaatcttggtgtgcctacacgtgttcaaacatcaattgaaatgcgtcaaattgcagaaccatacattcgtcgtcgtgcagaacgtcatttagaaaaaggccgcgttgttatttttgccggaggaacaggaaatccttacttttcgacagatacaacggctgcgttacgagctgcagaagtagatgcggacgtcatcttaatggcgaagaacaatgttgatggtgtttattctgcggatccacgtgtggatgaaacagcgacaaaatttgaagaactaacacatttagatgttatttctaaagggctgcaagtaatggattcaacagcaagctcattaagtatggataacgatattcctttagttgtctttaacctaaatgaagcaggaaatatccgtcgtgccatccttggtgaaaatatcggaacaactgtaagggggaaataaagaatgtctaaagaagttttagcaacagccaaagaaaaaatgacaaaagcggaagaaagcttacgccgtgaattaggtcaaattcgtgctggtcgtgcgaacgcaagtctattagaccgtattcaagtagaatattatggtgcaccaacaccagttaaccaattagcaagtatcaatatcccagaagcacgtgtattaatgattacaccgtttgacaaaaattctatcgctgacattgaaaaagctattcaaatgagtgatatcggcattagcccaaccaatgatggaaatgtcatccgtttagtgattccacaattaacggaagaacgtcggaaagaattagccaaagacgtgaaaaaagaagcggagaactcaaaagttgctgtccgtaacgttcgtcgtgatgcaatggatgagttgaaaaaagctcaaaaaaatggcgacatcactgaagatgaattacgttcatttgaaaaagatgttcaaaaattaacagacgatagcatcaaaaatatcgatgcgattactgctgaaaaagaacaagaacttttagaagtataaaaccaatcactaataaaaattattgaatccagagaagcaaatgctctggatttttttgtatagatgagaaaggcgtatctcaacgctctctttgcaaaagtcattctaaagtaattatttaagaaaacgctttctttaataaatttttttattctaccagaatttttttctttgtgtagggaggatcacttaaaaatatagagaaactttgaaatatcagccttttaaaatttttcttcacaaattgaatcctaaaatttgatgataagagttgttatttttagcaattgtaatttgcgattcattctcaattaggctaaaatgagtgagaacggaaaaacgattaaaacaagttggagggaattgtacatgtctgtgttagaaatcaaaaatttacacgtatcaattgaagataaaaagattctaaaaggagtcgatttaacaattaatactggagaaatccatgcaattatgggacctaatggaactggtaaatctactttatcagcagcaattatgggaaatcctaactacgaagtcacagaaggagaaattctatttgacggcgtcaacgttttagatttagaggtagacgagcgtgctcgcttaggtttattcttagcaatgcaatacccaagtgaaattccaggaattaccaatgctgaattcatgcgtgcagcaatcaatgcaaaacgtgacgaagacaacaaaatgtcagttatgcagttcttaaaaaaattagatagcaaaatggaattattaaatatgcctgaagaaatggctgagcgttacttaaacgaaggtttttctggcggcgagaaaaaacgaaatgaaattttacaattattgatgttagagccaacgtttgccattttagatgaaattgattcaggcttagatatcgatgcgttaaaagtagtttctaaaggggttaatgaaatgcgcggcgagaactttggtgcgttaattattacccattatcaacgcttattgaactatatcacgccagatgttgttcatatcatgatggaaggccgcgttgtgaaaaccggtggggctgatttggcaaaacgtttagaaacagaaggctatgctggtatcagccaagaattaggtattgattacaaagaagaagcgtaaggaggacaagataaatgaaaaaagtaaatctaatggattatcttgacgaagtcaccgctttttcactagaacatgaagaaccagcttggatgactgaattgcgaacaacggctttaagaaacgctgacgaaagtgagttaccacatattgatcgtgtgaaatttcatcgttggcctttattaaatgttcacatggaaagttatgtgccttctgaaggaaatgtcgcaagttttgatcaaatgaaagacaatcctttaattgttcaacaaggatcttttcatgcttttgagcaattgccagcctcattagcggaacaaggggtaatttttacagacatttttactgctttacaagagcacccagaattagttaaagaatactatatgactaaagctgtattaccagaagaagataagctgacagcagctcatgcagctttcatgaatagtggcgttttcttatacgttcctaaaaacgtagtgattgaagagccaattgaatctttgtttattcaggattcagatagcaaccaacctttctttaaacatgttttaatcgttgcagataatcatagtgaattcagttatttagaacgttttcaatcaactggtcatcacgcagagaaagcttctggaaatatcgttgtggaagtgattgcgaaagatggcgcaaaagttaaatactcagccgtggatcaattagggcaaactgtaacgacttatatgaatcgtcgtggctatattatgcgggatgcctctgttgattgggctctaggcgtcatgaatgatggcgatgttgtggctgattttgattctgatttagttggcgaaggcgctcattcagaagttaaagttgttgcaattagtgcaggtaaacaaacacaaggcatcgacacacgagtgacaaacaaagcgccacattcaattggtcatattttacaacatggagttattcgtgaacgtggtactttaacgtttaacggaattggccacattttaaaaggagcaaaaggagccgacgcacagcaagaaagtcgtgttttaatgctgtctgataaagctcgtggtgatgccaatccaattcttttaattgatgaaaatgaagtgactgccggacacgcagccagcgttggtcgagtagatccagaagaaatgtattatttaatgagccgcggcttgcgtaaagaagaagcggaacgtttggtgattcgtggcttcctaggttctgtcattacagcaattccagttaaagaagtacaaaatgaatttgtagaagtaattgaagggaagttaaacgcatgatggatgcagcaaccattcgtcaatcgtttcctattttatttcaagaagttaatgatgaaccgctagtttatttagacaatgctgcgacaacccaaaaaccaacggcagtgttagatgttttacgacattattatgaaaccgataatgccaatgttcatcgtggggtgcacacgttagccgaacgagcaacgaaggactatgaagcctcccgcgaaaaggttcgccaatttatccatgccaaagaaacagcagaagttttatttacacgaggaacaacaaccagtttgaattggattgccaaaagttatggtgacttggcagttacagccggggatgaaatcgtcatatcttacatggaacatcattcaaacattattccctggcaacaattagctcaacgtacaggggccattttgaagtatatagacgtcactgaagacggctttttagatatggcaagtgcacgtcaacaaattacagaaaaaacgaaaattgtttcgattgctcatgtttcaaatgtgttaggggtcattaatccaatcgaagaattaacacaattagctcatcaaaatggcgctgtgatggtggtagacggcgcgcaagcagttcctcatatgcctgtggacgttcaagccatcgatgctgatttttatgcatttagtggtcacaaaatgtgtggaccaactggaattggtgtcctttatggcaaacgtcatttattggaacaaatggaacctgtggaatttggtggcgaaatgattgactttgttcatcttcaagaaagtacttggaaagagcttccttggaaatttgaagctggcacacctaatattgccggggcaattgccttaggtgccgccattgattatttaacagaaattggtttagaggccattcatcaacatgaagcagcccttgttcactatgttttgccgaagttgcaagctatcgagggcttgacgatttatggtccacaggatccaaaagaccacacaggtgtgattgcttttaatattgaaggtttacatccacatgatgtggctacggcgttagatatggaaggggtcgctgtcagagcgggtcaccattgcgcgcaaccgttattaaactatttgagcgtgccagcaaccgcacgggcaagtttttatttatacaataccaaagaagacgcagatcgcttagttgaagcgattaaagcgacaaaggagtttttccagcatggcactttctaaattagataacttatatcgccaagtcattttggaccattctagccacccacatcaccacggaacgctagatgcgtctagccaaacaattgaactgaataatcctacttgtggagatgtgattgaactggatgtggccattgaagacggtgtgattaaagatatcgcctttcaaggaagtggctgttccatcagtacagccagtgctagtatgatgactgatgcggtcttaggaaaaacaatcgccgaagcaacggccttagcagaggatttctctcaacttgttcaaggaaatgaagtggccgaagatgaaaaattaggcgatgcagcaatgttaagcggcgtagctaaatttccagctcggattaaatgtgcaaccctggcttggaaagccttagagcaggctgttgctaataacggccaaggcgaagccggtcatttacattgtgaaaaataaagaaagggtgacgacgaattgagtacagtacctgaattagaagaatataaatttggctttcacgacgatgtggaaccagtctttagtaccggagacggcctaaccgaagacgtcgttcgcgaaatttctcgcgtgaaaggcgaaccagaatggatgcttgacttccgtttaaaatcgttagaacaattcaataaaatgcccatgcaagaatggggtccagacctgtcagatattgactttagtaaaattaaatattaccaaaaaccgagtgacaaacccgcacgcgattgggatgatgtacctgataaaatcaaagaaacctttgaaaaaattgggattcccgaagctgagcgtgcttatctagctggggcttctgctcaatatgaatcagaagttgtttaccacaacatgaaagaagaatttgaaaaattaggcatcatttttacagatactgactctgctttaaaagaatatcctgacttattcaaagagtatttttcaaaacttgtgccaccaacagataataaactggccgctttaaactcagctgtttggtcaggtggaacctttatttatgtaccaaaaggtgttcgagttgatgtaccattacaaacatatttccgaatcaacgctgaaaataccggccaatttgaacggaccttgattattgtcgatgaaggggccagcgttcactatgttgaaggctgtacggcacccacgtattcaagtaacagcttgcatgcggccatcgtagaaattttcactagaaaagatgcctattgtcgttataccactattcaaaactggtcagataacgtctacaacttagtaaccaaacgtgctaaagcttacgaaggtgccactgtcgaatggattgatgggaacctaggagctaaaacaaccatgaaatacccaagcgtttacttagatggcaaaggtgcccgtggcacgatgttatcgattgcctttgctggcgctaaccaaatccaagatactggggccaaaatgattcacaatgcgccgaatacctctagctcaattgtttcaaaatcaattgctaaagacggcggcgaagttaactaccgtggccaagtgacttttggcaaagacagcgcaggttcgatttcccacatcgaatgtgacacgattatcatggacgaaaaatcaaaatcagatacgattccgtttaacgaaattcataacagccaagtgtccttagaacacgaagccaaagtttcaaaaatttctgaagaacaattatattatctaatgagtcgcggcttgtctgaagccgaagcgacagaaatgattgttatgggctttgttgaaccatttacgaaagaattaccgatggaatatgcggttgagttgaatcggttgattagttatgagatggaaggcagtgtaggttaaacctgttataggagctagaacccttgatatataaggattctagcttttttattttgccttgatagtagaaatgaccagctttttactgatgagccatcatatcagcaaactcttgaccagttttcttaggggcgctgtttgcaatatccgtatagatagattacgttacttttctatttatgttgatgagtctattccaaatgataagcaagctatatcagaagcaattgaacgtctgaaagaattaatctatctattcagaagaaggtgggagaagggattacagcaagcttaaaagagccactggaaacggagtacactcttactctaattgatggacamccaactcaagctaatcatatcytcggtagaatgatacaagtaattgaatgaataggatagagaaccccaccccgttgttatttgaccgtactaaggatacgctttaaatgagctacatggctcacatggggtattcttttttgacttttgcaaaaggttaataaattttgatacatgaaacgaaatgaaacactgctttataaacattgatataatagggtttctgtgtttcgtatgtaaatgaaacgaaaaatagtttttagttgaaaatacttaaaaagtagtgcatagttgtgggagttattgcagatgaaacagacctacaaatatttcatgtgcagcaagttaaagaatacttttttatggtataattgtagatgtctaaattcatgtggggaggaattgtaatgagtaaaaatggtaaagtgatttcaattatcaatatgaagggtggagttggtaaaacagcgttgagcgtaggaatatcatcttttttgtcagaaaaaaaagatgaaaaagtacttttgattgatagtgaccctcaattcaatgcaactcaagcgttcatagatccagaagattatctgaaaagtgaaaaaaccatttttaagttatttaagccccagacagaattacatcagtcttttgtaatgccaaaaagagaagagctggttactaaaataaacaaaaacttagatatattaatgggtgatttgaatctagtattagttaataaaagtagcgattcaggtttaattaaacgtttaaaacgatttattacaaaamataacttaaggaattattatgattatattataattgattgtccaccaactttaacgttatacacagatagtgcactagttagttctgattattatttaattcctaaccgtatagacagatactcaaatataggaattagctcactgaatagagctattggggatttgatagatcaagaagacttagaattaaagtgtttaggactaatttatacgatggttcaaaatcatctatcagataaacaaaaagaagtaaaagccgaattggaatctaacaaagcgatggaaaatatatatgtgtttaaatctagtactagcttagtgaatgatatgcaagtgggaaaacagggacctattgctacaaggtatgctaaatcaaataaagatataagcgatgtggtagatgaactgcaagcattacttagcaaaaattcttcaaaagaaggggtgactgtagatggataatagatttttatacagaagtagtttga

SEQ ID NO: 291 - DNA, 4956 bp; double-stranded, linear
cagtaaatattttagttaagagatgaaacttgcatgtggatttgaaacatgtaagttttttattctgttttaatagttgattattttttgttttatacgataatgaatctcgtatgattgaaatttttttaaaaaaggtatgttttatatagtgacagagaagaggattataatgggaaatcaagagaacaaattataccattttgtcggaattaaaggttctggcatgagctcattagcgttggtcttacaccaaaaaggctacaacgttcaaggatcagacgtagaagagtatttctttacacaacgggatcttgaaaaatcaggtgtccctattttaccatttaatgcagataatattgataaagacatgattgttattgctggaaatgcttttccagatacccatgaggaaatcgcccgcgccatcgaattaggcgcagaagtaattcgttaccacgatttcattgctcgttttatcgaaccgtacacaagcattgctgtaacagggtcacatgggaaaacaagtacgactggtttgctagcacatgtattaagtggtatcaatccaactagttatttaataggggatggcactggccacggcgaaccanatgctgatttctttgcatttgaagcgtgtgagtatcgccgtcatttcttggcttattcaccagattatgcgattatgacgaatatcgattttgatcatccagattactacaagagcattgaggacgttttttcagcgttccaaacaatggctcatcnagtcnaaaaaggaatttttgcttatggtgatgataagtatcttcgccagttagaatcagaagtgccagtttattattatggcgtcagcgaagaggakgatatccargcccgatkgctkgataattcakgccctcttccaaaatgaaatcagtcatcatttggagtgctggaccaacaccaaaaataatccctccagctaaactaaataaaacaaacagtaaatttagtttgattactgtccaggaaaggtaaaacaaccgttgaatccctgtactttccatcttcctcttcctttctattatgtaaaaggctaagccaaaagcgctcagctaatgcctcagcctcctgtgattatttttgagattggatatattcgtctaattgtgtttgcatttctttttgaactttatcccagccagctgtttttaggtcatccattaattttggaagtgtttcttctggatcaacagttcctgtatttaagcttgctgcgtaacggttcataactgtagcaacgttagtgatttcagttttcactttatcatttacaaaagtaaaaccaagaattggtgaatcttttgcttcttcgatgctcttatcacgttctttaaccatttcttcagtgacagattcttctggccaaatgattaagttgtttcctgtgttccaagcactcaaatgagttgttggtgtgtaatctttcaacaatttcacacgatcatcgccaactttttcatattgtttgccttcttcaccataaacaagtccgtttaacaattctggattgctgtttaataaacctaacaattcaacagatttttctttgtttttagacgtgtttgcaacaacatagttagccatttgcgcttgagctgttgtttttaatggttctgttagtggacgagaaacaagtggtttgccagcagcttgtgttaagattgtatcaccataatccataggtccttgtgtttcttgacgcataaaccaagtattggtatttaagtcatatggtgttgtacttgtagcagcatctgttggaatcaagccatctttataccattgatgcaagacttttaagttattaatcatgtctttgtcggcatattggttaataatttttggtgagccagtatcagttgtttttactgcaaatggatattggttaccaatagggaagtcataattacctgttgcaaagaatgtttggccgatagcaaaagcagcaatatttggktcytttttawggaattcttttagaacttccgttgcactttcataactaccatcgactttactaatatctaaattgtatttatcgacatattctttattaaaagttaaaacttgttgaccgtaagagttacctaaaattgggaacgcatacagttttccattaatcgtatttcctttaatatagttatctggcaattgatcataggcttctttggcatatttaggtgctaaatcagttaaatcagcataggcgcctttttgtgcattcgttgcataattttgtgctaatgaaatatcatagctttcaccagaagcaacgattgttgacattttttggtcccaatcgccccaaccaacaaattccatttttaattttgccccaatttttttctcgataattttattcgcattatcgattaattggtcataattatctggtttgtccccaacacgatacattaataacgttggtgtactatcatcaccttttgacgctgcatcttttgaagatttaccgcacgcgcttagtcctacagctaaagctgtgcgccagctacggctaatcctttttgccattttttcattccttatttcctcctgtacaattttattctttcacgccgccgattgttaaaccacccacgaaatatttttggaagaatgggtaagttaacgcaattggtaacgtagataagacaacaatcgccattcgagccgattcacttggtagaacgcctaagccttcttgtgctgctgcacccatatccgtacttcttgataagaactctaagttgttttgaattttcatcaataaatactgtaatggtaccaaggtatctttttgaatgtaaagtaacgcattgaaccaatcgttccaataacccaaagccgcaaacaaactaattgtggcaatccctggaacggctagtggtaacacaatgctgacaaaaatgcgcatttcacttgcgccatcaatacgtgccgattcaataatactgtcaggcacggttttcttgaaaaacgttcgcatcactaaaatattaaatggtcctaaagctaaaggcaaaattaacgcccaaattgtatctttcaattgcaataagtttgtcattactaaatagttcgcaaccatccctggtgaaaataacattgtaattaacgcaaacaatgtaaagaattttttaaatggaaagttggaacgagaaatgacataggcatataatgacgtcattgttgcattgacaatcgtccctgtcaccgtaatgaagaccgttacccctaaggcatgaataatgcgttgactcattgccccttggaaaatgtaacgataggcctccaatgaaaattcttttggccaaaaccggtagccgtttgctgctaatgatccttcacttgtcaatgaaatcataataacaargaaaaacggaaccacacaggaaatagcaaaaatagcaatgacaatattgaaaatcaaattcgctgtcgggttgaaggatcgaacgttaacgctagtgacttttttctttttcataatccttcctcctaaaatagtgctgaatctggttcaattcgacgaacaactaaattcgcaattaataacaaacatgccccaacgacagattgatataacgctgcagctgccgtcatgcctacatcaccagtagccgttaagccattgtaaatataggtatctaacacacttgtcacgttgtaaagcgcacctgagtttcttggtacgatgtagaacaaaccaaagtctgctctgaagataccgccgatgtttaaaattaataaaacagacatcattggtaaaatttgtggaatcgtaacattttttatttgttgccatttgttggcaccatccaccatcgctgcttcatagtatgtcggatcaatccccatcacagaagcatagtagataatactgttgtagcctagactcttccaaacatttaggaagacaaaaattactggccaccaacgtggatctgcataccagttaatcattgtgccgccattaccagtaatccattgattcaaaatccctttatctggacttaaaaaggcataaacaaaatagttaataaccatccaagataagaaatatggtagcaatgacatcgtgtgataaactttaaccaagcgacgatttcttaattcactcataataatagcaaaagcaatcgcgaagaataagttaaaggctaaaaagacgacattgtacaaaatggtgtttctagtaattaaccaagcatcttttgacgcaaataaaaatttaaagttttcaaaaccaacccaaggactttctcttagactagctaagaaaccatctggtgaaatatgaaaatctttaaatgcgaccacattggctaagactggtatatagaagaaaaatataaaccagataaatcctggtaacgccataaggattaaggccttataacgccatacattttgaaaaaacccgtttttcttcttcattcgtttcgctcctttcataaatataatagcgttttcataatatctttttaaggaacaaattataggatttgagaaacaaattatagattttgtgtcattttaaggtaaaaatttaccgaaatgactgttctttgtgaaaacgtttatctgatattttttttacaactgtttaagaaccttaaaaacaattggctaaacctcactcataaagcgattttgctagcgtgtatttgttttataaaatctgagaacttgatagtttcacaaaggatatcctctaattatttttgaggaggactatttttgaattttatccgtaaaaaacactagagcaattcgtttaattatagtttatttttttgcagttttaatgcaagctggttctttattattactagctatttcactactatttttctatttgcctttatgcacacacaatatgttggatttcttgttataaatcaaaaa

SEQ ID NO: 292 - DNA, 20561 bp; double-stranded, linear
tgaagtagaagaagaaaattatccagaaaatagctcagcacttgttgctcgcttagaatttcgaattgtctttgacgaatttgttttatcaggggcgattagccaaattaatcacattattgatcgtaaaattgaaaaacaagaagatatttcgcaagaagaagtcgatgaacttgtgcgtcctttatttagcatcgtcgaacgtttatcttatgaagtaactgaaattgctctggatcgtccaggtgttcaattgaattttcaacaatcagaagaagcttaaactttaaaaacagcgtttataacggattccgttataaacgctgtttttattcttgtgaagatttagcaaccaaagcttttttaaactgttcataattttttgtagcgatatccacataagcaatcggctgaccaactttggtgattttttcgggaagatagggagcgagcatttcattgtacaaaatgaacgcagcttctggtacttcctctgaaagaacatcataactgataaagtcmatttcataggttggttgaaaaaaggctttgatgttttgctgctctttatttgaaaagagccaaggacctccatttgcagggctccccacaaacaacgtcgctccatcacggttgacagaaaggatccaacaaattttttgcatacgcttacacctcctagaactaagtataccacgtcagcttaaaagaaagaggacaaaaaacaaattatttttacagtgactagtaaaacaacgcttggtgatagttttaaactatcacaacggttattttctatcaaaaagtaagcaaattatcccactatttgctataaaataaggtacaatagaactatcactggaaacagtttgctgttttcagggtatttactggagagtgagtaccgggaacctttacttcctttgatgtacttgtcattaaaaacatagggaggaactaaaatgacaacattcatcactgtattagtgatccttgcatttattgctgtgttattcggtttctaccaaatgcaaaagaaacatttaaaattctcaacacgtgtcttttcagcattgggcgtggggattgttttaggtgcaattattcaatttgcttttggtacagacagtaaaattactacgcaatcaatggaatggatcgggattgtaggtaatggttatgtagcgtttctacaaatgctcgtaattccgttagtatttgtatctattgtaggtgcatttacaaaaatgaaagaatccaataaattaggaaaaattagctttaatgtgttagccaccttactaggaacaacagcagtagctgccttggtggggattggaacaaccttagcgtttggtcttcaaggggcaaaattcacgcaaggtgctgcagaaacgtcaagaattgccgagttagcgacgcgtcaagatgcgattcaagatttgacgattccccaacaaatcgtttcattcattcctaaaaatgtctttgctgactttgcgggaacacgaccaatgagtaccattggggtggtaatctttgctgcgtttgttggtgtcgcttatttaggcgttcgtcgtaaagcgccaaaagaagctgaattttttgcaaatttaattgatagtttatataaaattaccatgcgaattgttaccttagttttacgcttgaccccttatggcgtgttagcgttaatgattaatgttgtagcaacaagtgattttgttgcgattattaacttaggtaaatttgtgttggcatcatatgtggccttaatcattgtttttgccattcacatgctgattttaattactttaaaagtcaatccagttacgtatctaaaaaaagtttttccagtcttgagctttgcttttacttctcgttcaagtgcaggagctttaccattaaatattgaaacacaaaccaaagcattaggtgtcgatgatgccacagcaaactttgctggtagtttcggtttatctattggacaaaatggttgtgccggcgtttatccagctatgttagcaaccatcgttgcaccaactgttggaattgatgtctttagtttacaatttattttaatgttagtagcagttgtcacaatcagttcatttggcgtagcggtgtcggcggcggagcaacctttgcttctctaatcgttttaggcgcaatgaacttaccagttgcaattgttggtttagtaatttcagttgaaccacttattgacatggcgcggacagctgttaacgttaacgatagtatggttgcaggcgtgttaacaagtgctcgtattcatgaattagatcgtgatgtcttaaatgatcgcgacgttgtcttagatgcaaatatctaaatcaataaaacgaaaagtgtttgagcaatgtcttgctcaaacactttttttgaattttaagcgaaagtgcagtaattatttaaaagaacgtatataataagttgttaactaaattcaaaaggacgtgaaggaatgttttcaaaccaagtaaagattatgttatatgtgaataatgttgaggaatctagtcaattttggcaaacgtttggctttgttgaaaaggaaagagaggaagttgacggcacattggtggtagaaattgcaccaagtgaatcagcagaagcgattattgttttatatgatttggcctttattcaaaaacattcaccagaagtggcggggaataccccttctttaatgtttgctagcgatgatatcattggtctctataaaaaaatgcaagaggctggcgttactgttggtgaaatggttcaattgccaacaggcttagtttttaattttgcagataacgatgataattactttgctgtgatggggcaagaaagtaaataaaaaacagcttggcaccagaatcaatctagattccggtgccaagctgttttttataaaagttgaaagttttataaattttactaaaatctgtaattttcatgaaaatatagcgtatgataatgctgttaatagaataggcggaggtaagcggtatgcgtaaacgacatgcaaagaaaagacatggaggagtgaattggctttttatagtatgtttgttggtggtgattggtggtagtggttatttaataaaaacgttctttttcactagagattcacaagttagtcaagaatcgaaagtggtcttggaagaagatcgccgaagtgataattatgcgaatttaacgaaagaaatagttgcaccagatagtggcgaacttgatcaaaaaattcaagaaacaaattatattggttcggctttgatcattaaagatgatcaggttttagtaaataaaggatatggctttgccaattttgaaaagcaacaagccaacacgccaaacacaaggtttcagattggctcaattcaaaaatcttttaccacaaccttgatcttaaaagcaattgaagaaggtaaacttacattagatacaaaactcgctacgttttatccgcaaattcaaggtgctgaggatattacgattagcgatatgttgaatatgacaagtggtttaaagttatcagcaatgcctaataatatcgttaccgatgaagaaattattcaatttgttaaacaaaataccattcaagtcaataaaggaaaatacaattattccccagtaaattttgtccttttagcaggaatgttagagaaaatgtatcaacgtacctatcaagaattatttaataatctttatcacaaaacggctggtttaaagaattttggcttctatgaaaccttattggaacagcccaataattcaacaagttataaatggacagaagataattcatataaccaagtgctctcaattcctgcagctagttttgcccatgaatttgggactggtaatgtggatatgacgacaggtgatttgtattggtacttacatcaattaacgagtggacatttagtttccaccgcacttttgcaaaaattatggacgtcttctcagcaaagctcttatcatggcggcatctatgttcatgataattatttacgtttacacggcgttgaagcgggtcaacaagccctggttttattttcaaaagatatgaagacaggggtcatattgctaactaactgtgtgaatccagcgaaatacaaagaattaattggttcgttgttccatgatgtaaccaatttaactgttaaattttaaagcagaagtaacaacgatcactcccaaagcctttttaggtttcttctgagagactttatattaaaataaagggaagaacgatcaaagggagtgacgaagatgaaacaatcaaaaaataaacaagttgttattggtgaaccaacgaaaaaaaacatttatcttcaagatatagaacaggaaacgcaagcttttattctccaaaacaatccacaattgacagctgaatcgatgattacattggcggagttacttaattatcgtttggattacatgaaacaattggtcgcaaatgattctgaaaaaatccaacaactgaatgaattggtggttcaacatatcaaagaagataagctgatttccaataatatgaatgaaaagatggaaaagaaattaacctttggccaacgagcagcggataccattgctaaatttggcggtagctgggtgtttattggcttcttttgcttcgtgttgattgcttggatcgtgattaactctaccactttattgggacaaccatttgacaaatatccttatattttgctaaatctcgccttatcttgtttagcagctatccaagcaccgattattatgatgagtcaaaacagacaagaagcccgtgacagagaacaagcgaataatgattataaaattaacttaaaagcagaagtagaaattaatttattacatgagaaaatggattatattatcaataatcaactagaaaatttggtgaaaatccaaaatattcaaattgaacttttaggtgaattgcaagaacaactcgccgcgacttctgaaaaggagtagtatatagaagaggtcgggacagaaccgtttagctccgagaaccaagtaggtactgattaacatctatttgctttgcaaatagtgtttctcagcaataagaagaaatttccgaaaattgtcataaaacacaacgaggaacgagttgatgttgcatgatacctacccggtgttctttaatttttggagaccaagtaggtattgttcatcatcgaatcactacgttcttcgtgattctcaacaatttcggcttattgttttctcgccaaaggctcgtcacagttttatccttgtaagttccgaaggaccttcaccaagtaggtacgatgatttcatctgttcatgcttcacagtgaaacatcgcaactcttagagctgtagctcttttgaaggctgtactgtgacgagacgcatgtcgagaaaacaccttagaagttgttgagatcggagcaacgcgtagtgttggttctgttcccgccgtttatcaggctttttttattgtgtgtaaatacacaagcaaaataatcgctttcccttttttatttaccgtataatgggatagaatgactttatacaaaaggggaaaacaagatgaaataccaagtattactttattacaaatatacaacaattgaagatccagaagcttttgcgaaagagcatctagctttttgcaaatcattaaacttaaaaggccgtattttagtagcgacagaagggattaacggaacgttatctggtactgtcgaagaaacagaaaagtatatggaagcaatgcaagcagatgagcgctttaaggatacattctttaaaattgatccagcagaagaaatggccttccgcaaaatgtttgttcgcccacgttctgaattagtggcgttgaacttagaagaagacgttgatccattagaaacgacggggaaatatttggaacctgcagaatttaaagaagccttattagacgaagacactgttgtaatcgatgctcgtaacgattatgaatatgatttaggtcatttccgtggtgccgtgcgcccagatatccgtagcttccgtgaattaccacaatggattcgcgagaacaaagaaaaatttatggataaaaaaattgttacctattgtactggcgggattcgctgtgaaaaattttctggctggttattaaaagaaggatttgaagatgttgctcaattgcatggtggtatcgccaactatggaaaaaatccagaaacacgtggcgaactttgggacggcaaaatgtatgtctttgatgaccgaatcagtgtcgaaattaatcatgttgataaaaaagttattgggaaagactggtttgatgggacaccttgcgaacgctacattaactgtgcaaacccagaatgtaatcgtcaaatcttaacttcagaagaaaatgaacataaacatttaggtggctgctcattagaatgtagccagcatcctgccaaccgttatgtaaaaaaacataatttaacagaagcagaagttgctgaacgtttagctttgttagaagcggttgaagtataaaaataataaaaaaataaacaaaaaaacttcgaaaattatttttcgaagtttttttgtttatttttttgtctttaaaagtgttgattttaaagctttcttagctaaaaccattttattttttaaaagcgtctgaaaaaaataaaaaaatctaataaatatttcttttatataatgtttattggctgggccagtcaatgttgaaaatggggaaggaggaattcagatgaaaatcataaaaaggtttagtttggtatgtttagggctattgatcattgggttgcmaacaaaaagcgktatggctgaagaaaataattatgaatcaaatggtcaagcgagcttctatggtacctacgtttatgagaatgaaaaagagtcaaatgacgtagcgtatacccaacaatcagaagaacagggaagaaacaatttagctgcttctggacaagcagttttacctaaaacaggcgagtctgaaaatccgctgtattccttgataggagttagtttgttggggatagtcatttatttaattaataaaatgaaacgagagaaggagtttatttaatgaaaaaaactgttttacttacatcggcaaccatacttttaggcgtagggtttcaagcaataaacgcatcagcagcagaaacttttccgaaagaatacaatacagaaggcacaattacttttgaagcaggtgataatgaaatcacaccgcctgttgatccagaaaatcccgatcctactgatccagtagacccaattgatcctccagggccaggaacgggtggtgccttatcaattgattatgggtcaaaatttaaatttggtacacaaaagatttctacggcagatcaaacgtattatgctgcgccagatgaaatgaaagatggttcaaaaaaaccaacctatgtacaagtaactgataaaagaggaacgttagcaggatggaaactaacgctttcccaacctgaacaatttaaaacagctactggagaagaactagtcggcgctcaattgacgtttacaaaggcagaagctgcctcaatggtggatgaaaaatataaacctactgaagtcagtagtactatttccttaacacctggtgtaaataataatctagcgatgaacgctaaaaaagaaacaggtgttgggacttgggtttatcgctttggttcaaatgaagcaacaaataaagaagctgtccaactattcgttcccggaaaatctgtaaagcttgcacaacaatattcaacgaagttagtttgggcattagaagatactcccgctaataattaaataaaggagaaaagcaatgaaaaaacaattcacaggaatcgttctatgcagtacatttgcagttgctggttggtccttacaagcgaaggcagaggagccaaaagagtatcgttcgaatggtttagtagaatttattccgaacgtagatccgacagagccggttgatccagaaaatcccgatccagaaaagccagtcaaaccaattgatccgacagacccagaaggtcccaatcctggtacccaaggaccgctgtctattgattatgcttcaagttttgactttgggaaaaatcgtatttcgaataaagaccaagtatattttgcaagagcacagcaatatcaagaaaatcaaaaagaaacaccaaattttgtgcaaatttctgataatagaggaaccaatagtggttggtctttaacggttacgcaaaaggagcaatttaaagcaacaaaggcgactttaaatagtcagttgacaggtgcgcaaatttctttagctaacccgaccgttaatagtaatgcgcaaaatgttgtgaaaccagaggcaacaaataagattgcccttgttccaggaaccgcatcgctagtggcagctgcgarcaaggaaccggtgcaggaacctgggctacttattggggcaaagtagaagttgttgcagaacgcgatgaaaccaatacggtacacaatgttaatgttacaaaagatgttgcgctatcagtaccagggtcaacccctaaagatgccgtgaaatatcaaacaaaattattgtggacgttgacggatgtaccaggaatttaaaaagtagaggtgaagagagatgcgaaacaaacaaagcctagtctttttggcaagtagtttattcttactaatccttgcgcctattactagcgaagcgattagtaatccttcgacaaatatcaacgaagtcaatcgggaaatagtggaggaatcggccaatgatcaggcaactagcgctccttctcactcggaaacattagagcaagaaccttccctagaaacgacaacaacaaccgataatcatccagcagaaacagaccaatcaacggctactttagaacctagcgaacaacaaaaggatgacggtaccagtgcaacggaatcggtgatagttgaaccacagccgcgcatgttggctgcgccatacgctacttcattgccggatgatcctaacatcattccaatcgacaaggtgtttcaagagccaattggaaatgcaacaagtattttagaaggtgggaagttattacaactaaacccagctgttaaatcacaaaaaggcgctatttggtcaaaaaaaccaatcagtttattgtcggattttacctttaaaagttatttgtatttaggaaacgagtatgcaaatgctggtgatggtatgacctttaccttaacgaatgatcctagaatgtccacaacgcctcaagaagtcattggttcacctgggatgggaatcggtgcatactccacgaaagctggtcaaccttatgttagaaatgccttatcgattgagtttgatacctataaaaatactggtagttccaaccgaatggaccgagaaatttcacaagataagggaaatggacatttagcttttgtcactccgaaagctaataacaacaactatacaggggagcattcaggcgtcactgttgcgccaacctatctatctaatggaacctggcgcatgttgactgttcattggaatgccgcaaccaaagcattaacatatgatttagaaggtgtgggcacgaatacgtatgtagtttcagatttaaatgcacaatttggcgcaacaacggtttattggggctttacatcatccacaggtggcaaataccaagagaatgctttagcaatgacacaaattcctaccaacgttacgtcacaagcagcccttagcgtgaatggtcaggaatttagctcagctgttgaagcagtgaaaaatgatcaggtgagactacggaatacattgaatattgacaatgactttatcgaagatcgtcaaccgcaagtaagcattgacttacctgatgaattagcatatgaagaaaattcattaacgattgatggtaaaaaggtagcagccaaagatctgacacaaacagggaatcacttaacaattgctttaaatgactacctagttttaaagaaggacatgatgattgaattaaaaacaacccttcaagataatacgcccgaaaaagttttaactatgaactttgactattatgaagaaggaaccttactgcaaaagtcaaataatgtaacgattactattcctaaaccaacagaaaaaacagtaaccgttttttataaagacgcagaaggtaaagatattgctccacctaaaagtgtaacagggaaaattggtgcaccctatcaagaaaaacccctagatatttctggctatgtttttacaaaagactcgggcaatgcggaaggaacaatgacagaggaaacaaaagatatttatttttactatcgtttaggggaactatattttaaagaggcaccaaaacagattacttttggtacggaaaagatacgtaatcaaccactaattaaacttgggcatcccaccgaaggactcaaagtcgtggatgaacgtaacgcaaataattggcgcctgcaactaaagcaaacgcaaccgttaacaaatgattcaattgtaatgccagatgttttttctttcgtttcaactgctggaagctctcagattacaaatgaggcaattacgcttttagaaagtaatcagaaaggtgaaacagatttaacagcattacttgatgaatcaaaacaacaaggaattcaaatcaatgttcctgtagcttatcaaagagttggaacatttaaagctcgtttatcttgggcgttagaagatgtgccaggaaattaaagaaaagaatggagaaaagaaaatgaaaaaagtaacaacagtatgtttatccacatttattttagggagcttaggcatgacttctcaagcctttgcagaagatggcggtagttatacatctaatggtatcgtagaatttacaccaagtgaagagccaactaatccggttgacccaacggatccaactaatccagttgatcctattgatccaacagatcctgaaggtcctaatccaggaacaaacggtccgttgtcaattgattatgcgtcaagtctagacttcggtgttcaaaaaatcacgtcgaaggatcagacttattttgctgctacccaaaaatacaagacggtaggcgcaaccgatgaagtcaaagaagggcctaactatgtccaagtaacagataaccgtggaaccgaagctggctggtcattaaaagtgaaacaagaaggacaatttaaatcaacttctggtaaagaattgactggggcagctatcacgtttaaaaacggaaatgtagtgactgcttcagattcaggcaaaccaacaggcccagccacaatcacgctaaattcagatggtagtcaatcagatgtaatgagtgcagcgaaaggaaacggtgcaggaacttatttatttgattggggaacagatgcaactacagccgctaaaagtattgagttaactgttccaggttctacaaccaaatacgctgaaaaatacgccacaaaattaacatggacgttgacagacgctccaggaaattaaacgagttttaaaaagaagaatagcggggaacatagttacctgctattcactacatatagaaaaggagtaaataatttgaacagaaaaaaacaacgatttcttttttttccgatactactaattcttttagcgttagtacctagcaatggttttgccagtgaatttaattttgcggttacgcctattccatcagaaaaacaagtagataaagaaaaaacttactttgatttattactagcaccaaatgaagaaactgagttgaaagtgaacttgcgcaatgatacagataaagaagtaaaggtaggtatttccatcaatagtgccattaccaattcaaatgtaatcgtggagtatggtgaaaataaggggaaaaaagatcaaagtttagcgtttgatataaaagactacgttcaataccctagctcagttcgtttaaaaccgaaaagtgaacaaacggtttctattaacgtcaaaatgcctaatacaccctttgatggagtgttagctagtggtatcacttttaaagaagaaacgtcggatgaaggcaaacgccaagacgataagagtcaggggttatccattaaaaatgaatattcgtatgtcgttgcattattgatgcagcaaaataaaaaaaaggttgagccgaatttacttttgaaaaaagtctcaccaggacagattaatgctagaaatgtgattttagtcaatctacaaaatgatcaaaaaacatatattaaccaagttgcattttcggcagagattaccaaaaagggacatgaagaagttttatataaagaggaaaaagcaaacatgcaaattgcaccaaataccaatttttctgttcccattgcgctaaaagggcaaccgcttaagccaggagattaccatttgtctatgaccgttgttgggaataaagatgctgcaggctcatttaaaaaatcaataaacaatgaatcgatatcttttagaaatcaatggcaatttgaaaaagactttacaattaatggtgaagttgccaaagaattaaatgaaaaagatgtcaccttaaaagaaaatcattcgaatttatatttgatgattggcttactactattattgatagtgattttaatcattgcctggttgatttggcgaaaaaagaaacaggaaaaaaacgaaagagaaatataaagagtagttaatttttgatttgatcatcggcaacgtttttgtttgtttttgcttatcaaacatgcagtttattcaacaaacctaactcaaaaaaagaaataataagaaggagtattgttaaatatcgtctgataccactttactagttatattttttgttttgttatgtagctaaagtatttggcaatatatgtgagaaaaatggataaatacaaacatttactattatggagtacattgttactctcgttttttcaagtaaccaatgtgcaagcagcagaagaacggaatccaatttataatccgaccaatccaacagaagaaatttatccgattgagaatactggcacaccagaaaaaatggaagaaacaaatgaaagtactatgactagcgaaacgcaagcggaagaaagtagcgaagacgttagtaaaaaagaagtgacaaccaataatccaaaaacaaatgaagaaaggccttcttccaagaaaagtcagcatcaagtatttttcacggatgaattatttgatgctagccatatcaccattgtaccaaatagcacaggcggtgctggaacggaggggcaaaacactttttacttgaatttcatacgggaattagtaggaacggctatttatgggagaaagaactgataaatgatgaattatgaaatttttttaaataaagaagatcaacgaagttattccttgctaaggcatttagaagaaagtcccacgctatcaggtacttttattgcacttcgcgaagaattatcaatgtcgaattttttagtcaaaaaaacattagaaaaattaaaagcagatattgacaatctaaagttaagcgacagcttaactttagtcgtttctgatgtagatgttacacttgaaattgatggaaactattcaagtaaacttttgctcacgaaatacttaacagaatcgctctcttttaaattagtgttgtcttactttagaggaaattatagtttgacaaagtttgctgaatgtaatcatgtcagcacctctgtggcgtatagtacctacagcggctaaaaaaagcccttaaaggagtatccagatctattttagtaaacgggaaattgtcggcaatcaaaaagcaatttcattttttttgtataaattgttcacgctttccaatcaaccaatttccgaattatattcggtaaaagtctataatgaagcgaaacgtgtattacagtctgttgagttaaactatactttcaccacctatgagcgacgcaattttttccattatttagctattatgattaacaacgaaggacgtgcggtggaagggatcgatacgcgtgcactgaatacattttcagaggaactaataaaaaaatcgcaagtggcatgggcattggcttcaaaatcattaacgtatacgattgtttttttcttgtatttgcatggcaaactagagaaaaaatatgtcattcatgaagatcctacgattgaaagcctaactcgtgttttcattggaagttttgaaaaagcatttaattgtttagaggagtcaacaaggaatactctagaagaagggttagcaattattcatttcaatgttatttactttccgattaatatgtttgacgattttgaaatggatttacagttttttaagcaaacatatccggaattttatttttatttaattgaatatattcgttggttaacagcaaaacataaaaaaattgcgaaagccaatcactgtttgttttttaactatctattgttgctaattaatcatgttccggttcatttaattgcagagccagccaaggtcctaattgatttttcttatggaaaagagtataaccaattcatcaaaaaaaatttatccgtctatgtgaatttaaatgtagaaattattgacccgttatcagataccttaccagatgtggtgattaccaatttaaataacttgtatcaagaagaacagagtaaagttatggtttggctggatccacctcgttcgattgattgggtcaatttaacgcaatcattattgactattcaagaagaaaaatatcaacaacaaaaagaatcgacaaagacaagcggtgatcctatcgaatagnatcatcgcttgtctttgtgtttaagtctttacaaaaccacccaagtgttttataatatgaatatatattcatatgaatagaaaaacattaatgaggaggcgcataacaatgtcaaaacaaacaggtgcacacacacatgaagaaaaaggtaaaaacgttccagttattctcttttttacaggattggctcttttctttatcggtttatttttagggaacatgctcttagtgaaaaatattcttttctcattagctgctattttagctggttatcatattattggggaaggctttggagatacgtatcgggatacgaaaaacaatcgaaagttttcgcctaatattcatttgttaatgaccttagctgcagttggttcagcattaatgggaagttttgaagaatcagcattgttgattttgatttttgcggcggcgcatttccttgaagattatgcccaaggcaaaagtcaacgtgaaattacaaaactattaaatttaaatccaacagaagctcgcctgataacagacgacggctcaattcaaactgtgtcagttgaacaattgaagattggtgaccgcgtgcaagtcctcaatggtgcgcaaattccgacagatggcgtcgtgattgaaggaagtaccgctgtggatgaatcatctattaatggggaaagtattcccaaagaaaaaaatagtggggacccagtttttggtagtaccatgaacggttcaggcacaattgttgttgaagtaacgaaagatagttcagaaacagtttttgcaaaaatcgtacagctcgtgaaccaatcacaagaaaatcaatcagaaattgcaagcaaaattaaacgatttgaaccgaaatatgtcacactagttttagcagtttttccactaattgttttaggtggcgcattgcttttccaattgacttgggctgaaagtttttacagaggcttggtcttcttaattgctgcctccccttgtgcattagcagcgagtgccgttccggcaactttatcaggaatttccaatttagcaaaacaaggcgttttgtttaaaggtggctcattcttatcaaatttagctgaagtgaaagcactcgcttttgataaaacaggcacgctaacaaaaggcaaacctgaggtcacagattatctttttgttgatggcttagaagatcgccaagaagaattagtagctgttttaacaaatatggagaaaaaatccaatcatccattggcgacggcgattgttaatcgctttgaagcagaaacaacggctttaaatttagaagtagaaaatattgtcggggtgggtttagtaacgaccattgcagaaacaacttttagaattggtaaaccatctagtttcgaacaagtgccaacaatcattgagaaacaaacaacgaaattagcaagtgaaggcaaaacggtagtgtactttgccgaaaatgaacaagtgattggtttggtggcattgatggatgttcctaatgaagaagcaatgaacgccattcactatttcaagtcacaaaatattgaaacaacaatgattacaggagatgcaaaacttacgggtgaagcagttggtcgcttagtaggcgtggaccaagtttttgctaatgttttacctgaggaaaaatcagcgattgttgatcaattaaaacgcgaagtaggaatgacagggatggttggtgatggcattaatgatgcaccggctttagtgaatgctgatatcggagtggcgatgggggatggtacagacattgctatcgatgttgcagacgtggtagtgatgaaaaatgatctttctaaattaggctatgctcaccgtgtctcaaaacgcttgaataaaattgtgcagcaaaatattattttttcaatgttagtggtagcaacgttaattatcttgaactttttaggtattgcgaatatcgcatttagcgtacttattcatgaaggaagtaccttagtggtcatttttaatggcttgcgtttattagttaatacaaaataagtcaaatagtcacttgcaagaaaggagagaaagcgatgaattctttaaaaatgattgaactttctctcaccgacgttgtcattcggatggctctagccgtggtttttggagctttgattgggttagaaagaagtattaaaagaaaaggcttcggtatcagtagtaatgccattttatgtttggcctcctgtacgatttccattttacagattcaatcggtggatattttagtcgatgtggtgaaacaaaatagcgccttggcgtccattatttctatggatattacacgatatggcgcccaagtgattagtggtgtaggttttctcggtgcggggattatcgtttttagagaaaggaaagtctctgggttaacgacagcagtaatgatgtggaatgttactattattggtttagtcattgggatgggctttttaaccattgcgtttatcaatctcgtggcaactttgctagtattagctctggcccattttaaacgaaagactcctttaaaacgattgcagcttatcgtaaaaatgaaggaacctatgattaaagaaagccgactgcatgaacaacttcaagcttctttagaaaaaggggagcgcttagtagaattgactttggaatccgaacaagaggcagtgacagcaaagatttcttatgtaggcaaagaagatttctggcattccaacttgcaccatctcttaaaagaaaaagggcacgttcaatctgtctctgtcacggaaacaatttaaccataaaataaagcacttgggcgctagcgcgcgccaagtgcttttgtttaaatatttaatactttatctaagaaatcttttgttcgagggttttgaggattttcaaagacttgctctggcgaaccatcttctaggaagttaccgccatcaatgaacattactcgattagccacttcttttgcaaagcccatttcgtgagtaacgatgaccattgtcattccttgttttgctaaatctttcattacaccaagaacatcgccaaccatttctggatcaagggctgatgttggctcatcgaaaagcataatatcaggattcatcgctaacgcacgtgcaattgcgacacgttgtttttgaccaccagataaagaatctggataggcatcttttttatctgccaacccaacacgttctaaaagttctaacgcttttttctccgcttcgtctttkgataagcgacctaaatcggttggtgctaaaacaatatttyctaaaatgataaatgtggaaacaaattgaaatgttggaaaaccatgccgatatgttgacggacttggttgatgtccgtatttttatctgtcaagttcgcaccatcaataataatgtctccgctagaagcttcttctaattgattcaagcaacgtaaaaaagtacttttaccagaaccagaaggaccgatgacgcagactacgtcgccttcgttaatagaaacattaatgtcgtttaagaccgtgttgtcaccatatttttttactaaatgttcaactaagattttttcagtcatattagttcaccttcttttcaaggtttttcgctaatttagttaagctagtaattaaaattaagtagattaacgcaataacgaataaaccattgtactttgtaatgtccgagcaacaataatttttcctgtttgtagtagttcgattaagccaattgctgaaaggatagttgtatctttcaatgaaataacaaattggttaatgaatgaaggaatcataatgcgaatcgcttgtggtaaaataattttttgcattgtccgattataggaaagacctaaacttcttgaagcttccatttggccaactggaacagctttgattccgccgcgcacaatttcagaaatataggcactggcatttaaagttaatgtgataatcccagcaatgaagaccgggatattaaagccaagcacaccaggtaatccgaaatagatgaagaacgctaagaccattaaaggaattccacgaattaaatcaacataaatggttgaaagtacacgtaatgctttgattggtgaaacgctgaatagcccaaaaataacgccgacaattaaagcaagtacgaaggaaatcaacgttaatagaatcgtcatccataaaccgtgtaacaattgtttccagttgttttgcatgaagccaacaaacgtagattcgtcagctgtttcttctttggcttcgttgccatctttcacgtaagtgccgataattttatcgtattcacctgtacgtttcatttcttttaagccttcgttaaacatttcaagtagttcaggattttgcccttttttgacagcaaaaccgtaagaaccacctttttcacgaggaattggtgtcgctagtggttgattttgcgcaaccccgtagccaatgacaggataatcatccatcatggcatcaacttcgccaatttctaatgcactgtataatgcatcagttgtgtctaaatacttaattgagtaatcatatttctttttatttttttctaagaaatcagcactttcagtaccaatttttacgccgacttttttgccttttaaatcatcatacgatttaattttgtcattgccttttttgaccgcaatttgaataccgctatcaaagtaaggaacagagaagtcgaaggcttttttacgatcatccgtaatcgtcatgcctgcaaccatcccatctgcttgaccagattcaacagcttggacagcagaactaaaaccaataaatttaaattcaacagtaaaaccttgcaattcagctgcacgtttgactaaatctacatcaattccgacataatcgccttgggcattttgaaactcaaacggagcaaatgtagaatcactagcaatcacatatttctcttttttaggagtgatttttttcatctgttcgccagcgtcttgtgtgtttgtttcatcgcctgtcgctaagtagttgtttaaaattttatcataagtaccattgtctttaagatttttcaaaccagcgttgaactttttgattaattcagggttttgaccttttttcactgcgaaaccataagaactgcctgtttctttatcgccaactaattgtaatttttggccatttttcactgcgtanccaatacaggataatcatcaacgattgcatccgcttcgccgttttctaaggctttataaagacccgttgcatcgtcaaaatttttgatggtgtagtcatatttctctttatttttttcaaggaaattggcactttcagttccaactttagccgcaaccgttttgccttttaaatcatcatatgatttaattttgtcgtttccttttttaaccgctaattgtaaaccgctatcgaagtatggatctgaaaaatcaaaggatttttttcgctcatccgtaatactcattccagcaatcatgccatcaatttgtttagattgaatcgyttggactgcactatcgaagcctaatggttttaaatccacttcaaaatcttgatctttggcaatcgcatctaataaatcaacgtcaataccaatgtattttccttttgagtcttggaattcaaaaggggcgaatgttaaatccgttccaattgtatatttctttccttctggcatgtggctggagtggccactaatggaatgttagcagagttaccatcatcacaangaaagaaagttaaaagtgtttccttttccataaaatacctcctagttttggcatatggaaccatttatatngttaggnnatagggagc

SEQ ID NO: 293 - DNA, 1836 bp; double-stranded, linear
aactctgtatcaccaatttttgtataaagcatggattcagcccctaataattcagaaacaacgacttcagatttaatcaccgcatctttcattgctgttaaagccacttgttcgctatgaatatcttctggacgaataccgaaaattaattctttgccttcataaccatgttcaacaagctctttgtttcttccttcaggaattgctagttttaagccatgttggttagaaataaccccattgtttaaggtaactttgaagaaattcatggcaggtgagccgatgaacccagctacgaacatatttttaggtgtattgtaaacttcttttggtgaaccaatttgttgaataaagccatctttcataattacgattcggtcagccatggtcatcgcttcggttkggkcatgtgtcacataaattgtcgtagtttctaaacgttggtgtagtttagcgatttcagcacgcatggctacacgtaattttgcatccaagtttgataaaggttcatccattaaaaagactttggcatcacggacaattgcccggccaagtgcacacgttggcgttgtccaccagaaagcgccgcagtttacgttgtaagtactctgttaagcccagaatatccgcagcattttccacccgttttttaatttcagctttatcatattttcttagttttaaaccaaaggccatgttatcaaaaacagtcatatgcgggtaaagcgcatagttttggaaaaccatggcaatatcacgatctttcggtgcaacgtcattcatgactttgtccccaattgataattcaccttcagtaatatcttctaagccagcaatcatgcgcaatgttgttgatttaccgcaaccagaaggtccgacaaagacgataaattcacggtctgtaatttctaagttaaaatctgtaacagaataatgttctgcattgtcatattttttatacacatttctaagcgccatttccaccatttgatacgtcactcttttctttttgatttgttactcatagtttaaatgaaaacgctatctttcggcaagggagagttgcacaagaaaaagaagactttttcgtcaaggtgacaaagggcaaacactctcagcggatttatcgataaacttttgttataatataacaaagacaggagttggataacatgaaaatcgctttaatcgctcatgatcgtaaaaaaacattaatgatcaaactagcaaccgcttataaacatattttagaaaaacatgaattgtatgcaacgggaacgacaggcatgaaagtgatggaagcaactggcttacccgtgcattgctttaaatcggggccattaggtggggatmaacagattggcgcaatgatatcagaagacaacattgatttagttatttttttaagagatcctctttccgcgcaaccgcatgaaccagacgtgacggctttgattcgtctaagtgatgtctatgaaattcctttagcgaccaatattggcagtgctgaaattcttttgagaggtgtcgaggcggggtttgcggacttccgtgaggttatccatgaaggggatcgtcgaccgttagctttttagagaaccttaatggttattttgactattttgtggtatattttatgaggacttttgtccaaataaaataacagagtaggagacaaagcgttaagtgctaaaaggatgggatgttgccttttggacgaagaacataaacagtgtgttgctagaaagcaaaggttcttactttgcttatcatcagaacaacacgntcagctttttaatgttcgcggttttgtttntcgcattcgctgcatggttc

SEQ ID NO: 294 - DNA, 4607 bp; double-stranded, linear
tattttattgacaaagaaggggacgagtacaaagaagtgtttgatcgattgcatgttttttcagctgaagaatttgaaagtgaattgaaacgattactagaaaaagataaattcattaattgggagtgagtttcatgagaagaatagagaaagaattcaacaagaagctagccagttacgaaagagagttaaaaaaattaggatgtctggatgatgaaacagggcttattcccataagcaaaagacgatggcatgtcatttggtggcaacctgttacacttgcaaaaacaatcgtgagatcttttcgattaacgctagataatgaaaacttatgtattttaggagatgtagaaatcactatttatcatgatggaacatatggtatttctaaagaagctgtcccaatttttattaatgatttattgtctttaaaaaagttaattactattttctatggaacaccttttaacttaaattttgaaaaaattcgctgcgttaattttaacaggtattgtgtctctattcctgaaatttatgtcgagaaatttgaagtattaataaactacttgataattttaagtagctgcttacatgaagtgaaaaagcacgtagaatatgattaacaagcttttcttctttcagaagaacaccaatagattggttgagttcgcatacgctcacctaagagaggaaaagaacgaagtcaagcttcgttcttttttctacgtcggagaaccgacgtagtgattcagacgcaaaaaccattcgtctgaatcaggcccgtttttaggaagggctagtgtgtttgatttatcagttctcacagccgtgtaatttctaagattccctaatcgtctatcagtcactcggcgagtataacctaaaacataacctgtcggaggtcaagggcaagtggcatcggcaagccgacccttgtcctccgacagaacatgttttctagtcggttatgccgaacgaccgatatacgaaaagggaatctaaccagaatttcccctctgacctttgaaaactgaaaagcgaaatcaaacaaacaggccttcgtctaaaaacgagcctaatcaaaccttaggggttgcacccctaacacccggcgcctcactctctcaaccgaaaaggttggtcggaaaagcgttgacaaaaacatagttatttattggttgtttgaaaataaaaattgaaagaaggaaagcaaaatgctaacaacaaaagaaaaaaacagattaaaaaaaatggtagaaggaaacaaaacgtttcattattcttatgtcgatagacttagacaagatgtaagatattacgttaatcaatgtgaatcagctgttaaagctagagaaagcatggaaatcttagaatttatctacagtctattttctgataaagagataccagcatggtacacaaaagcagaccttgaaaatgataaaaaatcaattgaaaaattggaacgctgggcagcttagctgttcagcagcaatcagaaagggcgattagcatgaaatttatcaaagatgtaacgacattagaagaattgaaacgcgtatataaaaagctagctttaaagtaccacccagacatgggcggtactgataaagaaatggcgcaaataaataacgagtatgaagcgttgttcgataagcttaaaaatacacacaaaaataaagaaggtgagtactaccaaaaagaaacgacagaaacaccgcaagaatggcaagaaatcatacacaagttgttaacactaaaaatggaaaatgtttcaattgaagtgataggcgcattcttatgggtatcagggaatacaaagccttataaagaagagttgaaagctttaaatatgaaatggagcaacaacaaaaagtcctggtatttagcccccgatggatataaaaaacgcagtaagaaaaaatacaatatgagcgatattcgcaatatgtatggttcgcaggtagttaaagaagaacaagccaaacaaaagacattaacagcaacagcctaaggaggaagtacaatggaacaacaacacccgactattcacacattaaaaattgaaaccgagtttttcaaggcagtaaaagaacggcgaaaaacatttgagataagaaagaacgatcgtaattttcaagtaggggatattttaattctcgaagaatatatgaatggcatgtatttagatgatgaatgcgaagcggaagttatttatataacggattatgcacaacgtgaaggttatgtggtgctaggaattgaattacattagtaaaaaattagattatacgtccaaagaggttttacctctttggacyaccaaataaaaagaaagaaggaatcaagaatgattaaaacaagtgcagtaggaagattaacaaaaagttcagaactaagagtaacgtcaacagggaaggccgttgccaattttgcattagcttgcaaaagagaaagacttgataaagaagggaatgcccaaacgacttttattcaatgtgtaatctgggggaaacctgcagaggtgttagcaaaatatacgcaaaaaggttcattaattgcagtaaatggtgaattgcaatcacgttcttatgatgatcaacaaggacaaacgcattatgttacagaattagtcgtagcaggctttgaatttttagaatcaaaagaaactgtacaaaatagagaacaaaaacaacaaatgccagaaatggcgaacgccgaaccgttttatggtatggatgatatggaaccgcctgcttatcattaaaatttatctgaaggagggagaaaatgaaaaagttaatcggtaaaaagtggctgctgcttacagcagtagccacttttttattatcaggatgcgcaagtcttgaacaaaaagcacaggatagtgtaaaagaagttactgaaaatgttactcaaactatttcaaacgatcaacgtataccagctgattttgttaggcacgtggatggcgataccacagtattaaaaattgacggaaaagaacaaaaagttcggtttttattaattgacacacccgagactgtgaaaccgaaaacaaaagttcagccgttcggattggaagctagcaaacgcacaaaagagcttttgtctactgcttcagaaattacgtttgaatatgataagggcgataaaacagatcgttacggacgagcgttgggctacatattcgtagatggaacattactacaaaaaacgcttgtaagtgaaggattagctcgtgttgcctatgtaaaagagcctacaactaagtatttggcagaactagagcaagcccaagaacaggctaaaaatgagtcactcggaatctggagcataccaggttatgtgacacaacgggggtttagtaaataaataagaaatcgctatgaattattgaaagcttttggcgagaaattataacacaatatgttgtcgataacaacatattgtgttataattatatacataaaggaggggtaaaggtggctactacaaaaaagaaacctatacatgtaaatgttgatgaaaatttaaaagaagaagcagaacaattatttgatgatttagggttaaatatgacaagtgcaattacgattttcttaaaacagtctattaatgagcaagcaattccttttatgattaataagggaaacaaagagactctacaagcattaaaagacattaaagaaggaaatgttcatggtggattttcttccgtggaggatttaatggaggatttaaatgcttgaaatattttacacgaaccaattcaaaaaagactttaagaaagcaaagaaacaaggaaagaatttagagaagttaaaagaagtattagtacttttacaagaacagcaaacattgccgccaaagtataaagaccacgcactaacaggaaattatataggtacaagagagtgccatattgaaccagattggttactgatttataaaattgacggtgataaattgatcctaactttagctcgaataggctcacatagtgaattatttcgatgaatcggaaagatattacaaatcaataaaaaacactactaaacgaccagacgaatagtagtgtttttttgattattcgattgtactagtaattttaacacaataaaaaatagtcatgcaagaccagggcgcaacgatcggttctgttgcaaagttttaaataaagaataaaatcccttacggtatctatgatttaagctgggattcccaataataccttgatttcagtacagaccgaaaacccgaagagagtaccttcttttcgggttttcttatataatcctcgaatggcttccatgcctttaatcgtggtagaggcagtgcgtaaacttcgatagaatttattgcgtctctttactggacgatggtcttgttcaatcaaattattcaggtatttaatggtacgatgttctgtcccttgataaaagccgtattcttttagtttcttaaagggcacttgtaatagagggggctttatctgtggactacaaccttcgggtcatcaaactgcttcactaaccgcttaagaaaagcataggctgcctgtgtgtcccgttttttacgtaaccaaatatccaaggtnaaaccat

SEQ ID NO: 295 - DNA, 4738 bp; double-stranded, linear
ttctcgcggatttattcggattgaacacaacaaacccaaaaggtcaaatgatggttacgtatgattttactgcctgtttttcaaaagattcaattatttttacaaacgagcaaagaaaaacaagttgtcgcaaaccacgaagatgaaattaaacagctttaccaaggctttgaaaaagaattcggacgtccactttcaccaattgaattagaaatgattggtcagtggttgaacacggaccattattcccctgaattaatccggttagcgttgcgagaagctgttttaaatcaggcgtatagtttgaaatatattgatcgtattttacttgcgtgggagcgtaaaaatattaccaccaaagaacaagttgctgctgatcagaaaaaacgaaaagattctatgattcaaaatgagattgaacaacaaggtcagacacaagaatcgttgccaaaggttacattacacaattggttaaatccagaagacagtgaataaaaaggaggtgggccatgctatcaaaagagaaaacaatggaagctattgaaattatgtatgagatgtttccaaatgcagaatgtgaattaaaacataagaatccttttgaattattaattgctgtgattttaagtgcgcaagcaaccgatgtatcggtaaataaagcgactcctggtttattcgcagcttttccaacaccagaagctttagcagctgcgccggtggaggagattattgctaaaataaaaaccattggcttatatcgcaataaagcaaaaaatattaaagcgtgcgcacaacaacttttagaacgtttcaatggagaagttccgcaaaccagagatgaactggtcagtttacctggcgtggggagaaaaacagccaatgtagtaatgggagatgctttcggcgaaccggcttttgcagtagatacacatgtggaacgagtgtccaagcgccttagaatttgtaagctaaatgcgaatgttactgaagttgagcaaaccttaatgcgtaaagttccgaaagaactctgggtgaaaacgcaccataccatgattttctttgggcgttatcactgcctagcaagagcgcctaaatgtgaagcctgtccgctactctatatgtgtcaagaaggcaaagaacggatgaaagggaaataacacattttttcctaaaaaagcgagccacaagtccaaccgacttgtggctcgctttctttttttgatttttaagaaacgcaacaaatgattgcggttcttaaaaattgatttagtatagacagtgtggtatatacyagaaaatttatttttttgaagaaagataggcgatgaaatgacagaaaatgcacccaaatttaagcmaatttcygcagaaattgaaaagaagattcgagacggtctgtatgtaagtgcacaaaaattaccttcagaatatgatttagctaaagaatataactgcagtcgcttgaccatccgtaaagcgattgatgatttgatccgcaaaaatattttggtaaaacgacatggtaaaggtagttatgtgatgtcgcaagcgaaaattcaaagtggtcgcgctggcttacaaggttttactgaggcagccaaagcttacgggaaaaaaagccagacagaagtcatttcctttgaagaagtagtacatcccgctgagaaaattcgggaggcgctccaagtaggcaaaaatgaggcaatttatgaactgattcgccgccgaatgttagacggcgaaccaatgacagttgaaaaaatttatttgccacaggcatacgtacaaggccatacgaagcaagacttcgagggctctcttttctgcttaatcgagaagaacgtcgagattgcttattcgcatcaagaaattgaagcaatcttagttgaagcggaaatttcagaattattgaatgttcctgtgggccaaccacttttacaagtccactctatcacctatgcgcttgatgcaactcctattttatatgatgtctctttatatcgagcagatcggtacacgtttaaaaacacactgacccgctatagcccgtctgaaaacaaccaagtggagctaggaggttcttggaacgaatgaagatcaaagaagaaatagccgctcaaaaagatttattttatgaagacttaaacaaaattatcgcgattcgaagtgtgaaagggtcgcctaaaaaagaggcaccttttggcgaaggaccgaaaagagccttggaagaaacgctgaaacttgcagagcgttatggttttcaaactgggattgtcaatgacgcaktggctatgcgcaatggggaacagcggaagaatatctgggaattattggtcatttagatgtagtaccagaaggttctggttggtcagtgccgccctttcaattaacgaaaaaaaatcaacgtttgtatggtagaggaattctagataataaaggtcctatcttggcttgcctgtatggaatgaaattactgaaagaacttggttaccaaccaaagaaaaccattcgcttaatgtttggcacggatgaagaaagtgggagtggagatatccccttatatttagagaaggaaaacgcacccgtttttggatttactccagattgtaaatatccagtagtttatggggagcgagggattgttaattatgagatcacaacgaccatcccagatgattcaagtgaacaaattggtcagattataggtgatcaagcaaaagaccacgtacctgatcaattaagtgtggtgattgcgggaaaaacaacagcaatcacgggaaaacgtgctccttccaatgcgccagaactaggcaagaacgcgattactttattggcacagaaaattagcgaggaacagttagtcaaaggaaatttattacagtatttcgactggttaaccgctagttttcacgaaaagcactatggcgaaggagtagctctggactttaaggatcaggatagtgggcaattgattttaacgccytatgygttggaaaaaagaggacagcaattggtgttatcattggcsgtgcgttatcctgtttctattacagaaaacgaagtaaccacgcagctaacgaaggcactatttccagaaagtgaagtgaccgtcatccgccgcctccctagtacgctgtttccaaaagatgagcgcaatgttcaaaaattaaccaaggtttatgaacaaattactggcttagatgggacgccagtcacaactacaggtgctacgtatgctcgctttatgccgaatatcgttgcttttggtccatcatttcctggtcaaaaaggcattgcgcataaccaagatgaatatatggatgaaaaagatttactgcttaatctggaaatctatatgcaagcgatgattgcattaacagaagcataaaaccaatagaagatacacgtatgagaagaagacaatgtgtttcgtagaggtcgcatacgtgtatcttctatttttctgtataaaatttcattttcagtatatacaaaacagtatatactagtttataatggtggagaaatgtaagcgttaacgaaagggcggatggaaaatgacttggggtgcaattgcgacatggcggatggcacatgatgggttactaaaagctacagaagaattacaacaaggaggtgctgcaggcacggccgtggaacaattaattaaagaagtagaagactatcctttttataagtcagtgggctacggcggtttacctaatgaggaagggattttagaaatggatgctgcctatatggatggagacacatttgcaattggtgctgtggcgggaattacagatgttaaaaatccgatttcagtggctaaagcattaagtaaagagaagtttaatagttttcgtgttggcgcaggtgcaacgaaatattcaatgttgcacggttttgaaagaaagaatatgttgacagaacgcgctaatcaatggtggcaaaagcgtttaaaagaaattcaggaaaatcagttgaacccctatgatgggcatgatactgtcggcgctattacgttagaccaaacaggatcaatggcagctggcacttccagttcgggactcttcatgaaaaaagcaggacgtgttggcgattcaccactgtcaggttctggtttttatgttgatagcgaaattggtggtgctgcggctacaggcttaggtgaagatttaatgaaaggctgtctttcttatgaaatcgttcgtttaatgggggaagggcgctcgccacaacaagcatgtgatcaagccgtctatgcttttcatgaaaaattgacccaacgttatgggaaagcaggagctttttcactagtggccatgaacaaacagggagactggggcgtactacgaatgtggaatttacttttacggttggtactgatatgcagcaaccagaaatctatattgcaaatccaggcaagaatcatactacagagattcagccgatttcacaagaatggttagcggcctatgaaaaaagaatcaaagcactaattgaataaatgaggagagtgaaggaacatgagtaaaaaacaaatttatcttttttgtgatgcagggatgtctacaagtattatggtgaataaaatgatggaagtggtggaaaaacatcaaatgcctttaatgattactgcttttcctattgcaagagcmcaagaagtggttgaagcagagaagcctgttgctattttattaggccacaagtccgtttttttattaggnaaaaacca

SEQ ID NO: 296 - DNA, 3225 bp; double-stranded, linear
gggtgctgccccaatggcgtatgcactttggacaaaacatttaaaggtgaacccaacaacttctagaaactgggttgatcgtgatcgttttgtactttcagcaggccacggctctgcaatgttgtacagcttattacatctatcaggatacaacgtaacaattgacgatttgaaaaatttccgtcaatgggatagtaaaacaccagggcatccagaagtgcaccacacagatggtgttgaagcaacaacaggacctctaggacaagggattgctatggctgttggtatggcaatggctgaagcgcatttagctgcaacttataatcgtgatagtttccctattatggatcattatacgtacgcaatttgtggtgatggtgatttaatggaaggtgtttctcaagaagcaagttcaatggctggtcatatgaaattaggtaaattaattgtcttgtacgattcaaatgacatctcattagatggaccaacttctaaagcctttactgaaaatgttggggctcgttatgaagcatacggatggcaacatattttagttaaagatggcaatgatttagatgaaatagaggctgcgattgaagcggctaaagctgaaacggataaaccaacattgattgaagttaaaacagtcatcggttacggagcaccaaaagaaggaacatcttccgttcacggcgcgccaattggtgaagagggcattacagcggctaaagctgtttatggttgggaataccctgactttactgtgccagaggaagtcgctgctcgttttaaagaaacgatgattggcgaaggccaaaaagctgaagaggcttggaatgagatgtttaagaactatgaacatgcgcatccagaattagccaaacaatttaaagaagcttttgccaaccaattacctgaaggttgggaacaagaattacctaaatatgaactaggaacaagtgccgcaagtcgtgtaacaagtaaagaaacgattcaagctatttcaaaagttgttccaagtttctggggcggttcagctgatttatctgcctcaaataatacaatggttgctgcagaaaaagatttcgaacctggtcaatacgaaggccgtaatatttggtttggtgttcgcgaatttgcaatggctgcagcaatgaacgggattcaattacatggtggtagccatgtttatggcgggacattcttcgtctttactgactacttacgtccagcaatccgtttagccgctttacaaaaagttcctgtaacttacgtcttaacgcatgactctgttgcggtgggtgaagatgggccaacacacgaaccaattgagcaattagcaagtgttcgttgcattccaaatgttcatgtgattcgtccagcagacggcaatgaaactgttgctgcttggagaattgctatgacttctacggaaacaccaactattttagttctaagtcgtcaaaacttacctgttttagaaggaacgttagaacacgcttctgattctgttcaaaaaggtgcttatgtattgtcaccacaaaaaggtgaacaaccagcagggattttaattgcgactggttctgaagtaaatctagcggtggaagcacaagcgaaattagcggaagaaggcatcgatgtatctgtcgtgtcaatgccaagttttgatttatttgaaaaacaatctgctgaatataaagaaagtgtgttacctaaagctgtgacaaaacgtgtggcgattgaagctgcagcaagctttggttgggaacgctatgtagggacggaaggcaaaacaattacaattgatcacttcggcgcttctgncacctggcggtctagttcttgaaaaattcggctttactcctgaaaatgtggttaatacctataaatcactataaataaacgataaaaaacctgaatgcttgtgatagcattcaggtttttttgcttcatttctttttgggagcaaagagcataaagtgaaaaaataatgcgaacaattggaacccaataccagttaaagtaacaccagaccaaccatagttttgccacattaatgtaccaatcaatgaacccagtgaaccgccgatgaaatagaaaaacataaagacggtattgttacgattgctggcttcttctcccaaattttggacgcgtgtttgattggctacttgcccaaattgagtaccgatatctaaaacaataattgctaagattagtaagaccacatgtgttccacctagaaaaagtaagataaaactaccgaactgcatcaacaggccaatcaaaacaatcttccgctctggataataatcggatagacgaccaatgatgggtgctacgaatgctcccgataaaccaaaaattgctaaaataccgacttctttcggtccccaataataagctggactactaacaaagaaaattaatgtagaccaaaagattgaaaaggttgcaaacataaaaaagccattgacagttgcttctcttaacaaaggttgcgatttgattagcttaggaagacttttcaaagaacctaaataagttaatcgatttgaagtttgagtatgtatcactgttttgggcaattttaattgaagtagaacgaccaatgctaacacgaatattacggcgattaggtagactgttcgccaagaagctgcactagcaatgaaacccgagatcgttcgagacaataaaattcctgtcaatagtccgcccagcattcgacctgttactttaccacggttcgctggtcccgccatgaccgcagcataaggaataataatttgggcgacaatagagagcagcccgataaaaaaagaagagagtgcaaacaggagaaaacttggtgcaaaaaatgcagcacttagagacagcgaggagagcgcggctactcgaatgattaatttgcgacgatcaacgacatcgcctaatggaacaagaaaaagtaagcctagcgcatagcctaattgggtcagcatagtaacaaaaccaatagaaccaatactgacttgaaaggcctgagcaatttgggtgccaattggttgaatataatacatattggcgaccacgaccccgcaagttaacgctaataaaaacgtcacttgatttgttaaacccgattgttgtttcttcatctaaccacctacatttctatgtaattcattttgtaatacaacaactactcggcaatagttgttntgattacaaaaacagacttct

SEQ ID NO: 297 - DNA, 682 bp; double-stranded, linear
aagtccttgtttattggaattttacgacagtcgcaccattaccaccttggttttgtggcgcaaattcatagcttttcacactgcggtgattttttaaaaattccgttattccggttcttaatgcacctgttcctttgccgtgaacaatggttacttgtggatagcccgctagaatcgcagcatcaatgtattggtcaacttctgccaatgcttcttcgtagcgtttgccacgtaagtctagttgtgtgccaacatgactgctttctgcagaacgaaccgttgtaactcttggtttcgcttctttttgtggagcgacaggcgtcatatcctcttcagatacgttcatttttaaaatgcccaattggacttgccattgtcctttgccgttgtcttttaataaggtccctcgttggccgtaagtattgacaattacttcatcgccagcttttaattttttctgttctttcgccttcttcagcactttgtttttagcaagcttggtttcytcatggtgtaantgagaaagttgtgktttcgcatcaattaactgatgttctttgacaccaccttgttggccactttccaattgcattttgcgaatatcagaaataatggtttctgcgttttcttccgcttctgcaataattttatttgcttctttccgtgcttnttgtaattctgt

SEQ ID NO: 298 - DNA, 4029 bp; double-stranded, linear
gccagttgagganttggtgttggcgcggaataccntttntcaaaaaataccaaggagagaattaaaaggagttatcccctattatattgtccgatgctttcgcggaggaagtttttaaaggcaatcccgccgctgtttatgttttggaaaaatggttgccaatgctgtatgaagaatttttttatactatttttttgccatattataagggacgggttaaagaaagaacttataataatagacttagtatgataaaaaatacttttgcctatttttttaaaatgaaattgaaaagtatagctcctgttcatatacagaagtggcagaatgagctgttggaacagtatgaaaacacgtatgtaagaaatatttatggactgtttcagatgtctttagatcgagctgttgtgttaggaatgatttcttcaaatccagcaaagatcgttggtaatgtgaaaaaaagtaagaaagaaattgatttttggacaaaagaagaatttgaaaaagttgttaagactttttatgtagaagattattaccaaaatttttcttttatttgtatctggttattatttatgacaggcatgagaataggtgaggctactgctttaacttggaaagatgtgaatttagatagaagatatttaacagtaaaaaaatcactatattataaaaatgcgcaaacttatgaattagtgtctccaaagactagagccagtattaggacgatttatttagatgaagatacagttcactatttaagagattggaaaaaaaggcaagatgatgttggaggaattgaatttattttatcttataattcagttcctactcaaaaacatacagtaagacatattattaaacgtcatgcaaaattggcagaggtacatgatattaggattcatgctttaagacattctcatgcttctttattaataagtatgggtactaatgctttgttgataaaagaacgattgggtcatgaagatgtgcaaacaactttaggtacttatggacacttatatccaagtagctccactgaaatagctaatgaattgaagggaatagttaatgttgagtttactaatcaaaatatggcttcggaggttactaatcaatttactaaaggagtaaaaaaataaagtgtgataaaagtgtgataacgcaaaagaaaaccctctataaatcctattatataggggtttatagagggttgtttattattcccactccacagttgcaggtggttttgaagtaatatcgtacacgatacggtttacatgtgcaacttcgttcacgatgcgcacagagattttttgtaaaacatcccaagggatacgggcaaagtcagcggtcatgccgtcgatagaagtcacagcacggataccgactgtgtaatcgtaggtacggccatcgcccataacgcctactgagcggatgccaggtaagacagtaaagtactgccaaatgtcacgatctaagccagctgctgcgatttcttcacgtaggatagcatctgaatcacgaacgatttgtaacttatcttctgtaatttcaccaagcacacgaatacctaatcctggtcctgggaatggttggcgccaaacgattgcatcaggcatgccaagttcagttcctaaggcacgaacttcgtctttgaataatgtatttaaaggttcaattaattcaaattgcatgtcttcaggaagaccaccaacgttgtgatgtgatttaattgtttgcgcagtttctgtaccagattcgatgacatctgtgtaaagagttccttgtgctaggaatgaaacgccttcttccccagcaagtttagttgcttcgtcatcaaaaacatacacaaattcgttaccgatgattttacgtttttgttcagggtcagaaacgcctgctaatttgcttaagaagcgttctttcgcatctactttaataatgtttaagccaaatttaccgcctaaactttccattacttgttctgcttcacctttacgtaataatccatggtcaacgaagatacaagttaattggtcgccaatggctttttgtaaaagcacgccgacaacacttgagtcaacgccacctgataaaccaagtaagacttttttatcgcctacttgttcacggattttagcgacttccatatcgatgaagttttccatgctccagtcaccagtacagccacacacatcaaaagcaaaatgacgtaataagtcgttaccatattctgaatgacgaacttctgggtgaaattgtacgccgtagaatttgcggttggcatcttcgatagaagcgattggacaatcgttgcttgtcccaactttttcgaatccaggagcgatttctgttactaaatcaccgtggctcatccaaacggtttgtttcgcaggtgttccttggaataatgtcgcatcaccaaggatttctaattctgcttttccgtattcacggtttgcggcaggttctacttttccgcctaagttatgagtcattaattgcataccgtagcagatgccaagaatgggaattcctaactcataaatttctggatcaatgctaaaagcatctttgtcatacacgctgtttggtccacctgagaagatgattcctttaggcgcgattttgcgaatttcttctgccgtagttcggtggcttaataactcagagaatacgccaaattcacgaatacgacgagtaatcaattggttaaactgactaccaaagtctaaaacaataattttttcgacagatgtcaaatcggcaacgttagtcacgtctattaccccttatccatttaaatttatctaaagaaaaggcggttaaaaagtggtcagcaccaagaattaagaaaggattttcaaaaattgttttacgatttttagaaaattttggcttaattccgcaggggctacttttaaacagccgaaaatcaggcggttaaaaagtggttcacttttgttccgtactcttctttgtctagctatacttattaaaacattttactccttgaaagtcatgcattctgctgaaaattttcaaggatatttctacmaaagatacaggatatttcttagctcgtcaacccttaatatttacgtagatagatttggtcaatcaaatgattttccgttttatgcaaaataatgtccgcacgtccgcgcgttggcaagatatattcctccaagttcggtaagttcacggttttccaaacattccgtgccatggcgaaagcatcttctcgtttgccaattgcatattggtaataataattattaggatctaagaaagccgtatctaataaggccccaaaacgttctaggtaccatttttcaattaaggctggatcggcatctacaaaaatagaaaaatcaaaaaaatcactcacataaatttgttgattggcgggtaactgtaatgtgttaatgccttcaacaatcagaatatctggttgttgtatcaactcatattcgccttcgataacatcgtagacactgtgagaatagacgggtgctttaatttcgtctttgccgcttttgattcgtttaagaaattaattagcttctccatgtcataactttcaggaaacccttttcggtccataattccctgttcttctaacactttattgggatacaaaaatccatccgtkgtaatgagttgaacgtttcttcgtttaaacgttcgggccagaattctttgcaaaagacgagcggtggtgcttttaccaacggcgacactgccggcaattccaatgatgaatggtggtacagagacatattcatgtaggaataatcctttgctaagtgttagcgattcaaattctttcatgtacaaatgaataagatgcgttaagggtacataaatttcttgtacatcttttagtgaaatttggtcgttcacacttttaatgttatccaattctgcttcggttaacggtgctttgccgtcatgataaaacccatgccattcttctctggaaattgggtagtaattcattttatcgtccattgttcctccacc

SEQ ID NO: 299 - DNA, 1136 bp; double-stranded, linear
aaccggtgtgattacatcatacaatactgattcagatttgtaaaccgctttctaaaaaaaataaataaacatagtccataaaatggactatgtttacggccttaaaaaaaggtagttatatttgtaaaaatttactcactaataatctcaatctgataaaaatcagaaagtatgaaactttgactatattcaatcggaaccccatcgtttcctctaatcaaacgtttaatattgaataatgaaaagctatcttcttcaccaaaactttttcttattattctcaacggctctagttcatctgaatccttcgttaataaaatcgtgctcacctccatcgtcatcggaagattagccatatttccttgaagacccaattcatcggataaactagctccttcaatcaggcgttttactgaatcatccctaagtttatctgcaaagagatagcgattttgaattttccatggaaaatcattcgttaatgcaatttgggttagcttaagcaacgctttgctgcctgatttgtcgcctaatatctgtgcgatctctttatcagtaaattcttccgaaactaaagtgatcgtttcctcaaccgacttttgtttttcgttattggacatcgataacttctctgagaagaaaacttttctatgcttcaaattttttctgacaaaggttccctcgccctgacgccgaattaaatacccttcatttaccagatcgttcaaagcctttactactgttgtattactgacattatactttctttttaaatcaccttctgaataaactttctcacccgtactaaactctccagattcaatcttctctatgatatcccgctttataatctcatatttaggcaacatatgatcctctcctaacacgttaaccgttaatcttcattgtaaagaacttttatatttatgtaaatagaatgagtaataattatttgctcaaatttcgcacaccaaaatcatagctaaaagcttggcatgaaagggcggaagtttttgggaattgatttcaataaatttgagttcttttttagtataattagcttataaaaatactgaccggattaaatgaatgatgragcgaatgrctatcaaaaaacaancacctacaaaaattta

SEQ ID NO: 300 - DNA, 3914 bp; double-stranded, linear
agatcggtccntaataatttatttttgccctccagcgtcgntaatgtctcctgatgaggatgtttaaaacgattattcagtccagctgraaycaagcytctcgcggattaagctgtttgataaatcttttagtagacgacgttttactaccatgatgaccgactttcaagatgtcgattttcaactggggatagcgagccaacacttgttcttctccttcggcttccaagtcaccagtaaataaaaaatgccgtccgcctaattgtgtggaaaacactatcgagtcattattgcccccaatactgctcttatttggtgataaaatttgaaaagaaacgggcccattaattcgcttgggcgctaaaattggccgacagtctgtcccgcttttttggagttgtttcaagacttggcgaaacgaaaaattggcttcagctgctcctttagggaaataaagaacagaaattggaaccttctgcgcaatggctaataaatcgccaaaatggtcttcatgtgcgtgtgtgatgatcacttcatctaaacgtttgactccttgacttttgagaaaaggaatcactgaatattctgctcctgatcgactatttttccgttgccgccaagcttctttgccaaaagacaaccgcccccctgtatcgatcagtgtattttttctgtgaaaaggcgcttggataaacaaactatccccttggcctacatcgatcattgcaacaatgccaattggcgaaaggtatttactatttatcaaaacaattagtagtccgattgagaaaaaaatttttttagacttgtctgctaaataaatcattgaaaatccgattagtaataacaaactaatttgtatccaagaatttaaatagccgatggtcagcttcggatttaagtgaactagcacccactcaaataagccattcattgttaaaaatagtggttcgagcaaggctgctaaataacgtgctggcataataatcactagaaaaaagctcaacgtcaaaagcggtaacaagaaccgttcaaaaattggtaacaagagaaatgttaagaaacttcctaacaagggccattcataaaatgattgtactaaaataggtaaggaagccacagccaataggaaagagcctaaacaatttttaatgaaaggcgaagaataaccaaccaatgtttgctctaaaaacagcagaacaaaggaaagtaaataactaaattgaccgccgactgaaaaaaagagggttggctgaacaatcaagtgcactaagagagttaaactccaacaatcgagggccggaacctgccaattaaaccgtcgattgaacgtattgaggtttgtttgtaaaagcgcccgcatgacactaactgagaatcctgttaaaccagcatatatcagagaaaaaccgcattgccacaaaaaataactttcttgcgttcggcgagcaattcttagcattagcaagcgaaataaacgaaggaaaaaagaaacatgcatccctgacaaactaaaaagatgcaaaatgcctaatgctgaaaatttatcgcttatttcagcaaattcttcattacgaaaacctaatagcaacgcattcatatacattgcactagtctcagcaaaatttttctgaatatgtaccatcgcccacttccgccagccgctaatgatttctttaaaccgccaagaaaaaaaggaacgcggttgtcctatctcctcaatgaataaaatagcttcgattccttgattctttaaaaatagttgataattgaagccatttttgttggtttgaccttggggcgagtctaaaatacctacagcggttgcctgaatggttgtggttagttgttgccattgctgtttttctttcacactttttaattgataaaatgccatcactttctgccttttgccttttacgatccaattggcaggaaattttacttgatcaccatcgacttgtatttcatctggtaatatcgttagctgtcctgacaagcggacttctttaggcaacaaagagactggctttaaccactggaaaatcaatatgccccctactattaaaaaactgcacaaaaaacctcccaatataacaggaaaactttttgtacagacaatacggataacagtgatagaaaaaagaagagctcctaatagactaggtgcgaaaaaacaccacagcccacaactagtcagcagagctatgaagaaccaattattcctcagctgaggaaggattgtcctcaagtgtggcaaattcttctccccattgtaattcggcaaaatattttggtactaaagtcactttttcaaccgtggctcctacttgttcaattaaatttagggcgtacgcatcattacggtaatcctttaaataataaatctttttaatccctgcttgtaaaatcatctttgtacattgcaggcaagggaaatgtgtcacataaatttctgccccttctgtagggacgccaaacttcgcacattgtaaaattgcattcatttctgcgtggattgttcgaacgcaatgattatcaacaacataacatccttcatcaatacaatgcgttccgccactgactgaaccattgtaacctcctgcaataattcgtttgtcgcgaacaatggttgctccgacagttaaccgtgtgcaagtacttcttaatgataataagacgctttgtcccataaaatattggtcccatggaattcgttccataataaacctcctttatttttaatgactcctgtgttcgatttgccaaatcatttaatcttattacaaatagtatgttatccgcatcccatagtcaagaattctcaggaattttctgttaaaagttagccagtcactgtcaacatgtcttttaaacgttctactgtnttctctccaatacctgggaacatttttcagttcctcgacggttttaaacggtccttgttcgtcacgaamacgaataatctcttgtgcttttytcgcaccgattcctgamatcgtttgtagctctgcttctgttgccgtattaaggttgattttttcctcctgattttgctgagcaggtgctgattcctgcagcgtttctaatgattgtgccactggntctccttttttgggcacgtaaataatcatttgatcttttactttttgrgcgtaattgacctgggtagtatcagcttcctcgtcacgcctccantaaagtaaagcatcccaaatccgctgctgattttttagttgatagattcctggtactttcactgcgcctttaatatcacatagatcattgtttctgccctttcttttgtggcatctgtggcgacctctgtcgtagtggtcaacttgtttctwcmcacattgtggtgtctacttgtagctccttattaaccatcaaataaatgcccactaatagagttatcaaaatgaccatgaacacgccactacctagcaatagccactttttaggtaactgtttcaaccaatccatcgtttgccctcccttcaaaatataattacgcattttttaacaaaaaaatgcgcctggaccaaaaatcactagtaatttttggtccaggcctacttttattttaatttctctagatagttcaaggcatcttgaaccgttyttactgggacaattttcatttttgtcccaatttttttcgcagcttcttgtgcttcttgataattcgatttgatttttggctcaacttttttcatttctgaagttatttcatcatcaggtgcaaagaaaatttctgcgccgttctcactggcagttacaacttttttgtcaatgcctccgattctaccaacgattccttgactgttcatcgtacctgttccagcaatttcatgacctttacgtaaatctttatgacttaattgttcataggtctgcaaagaaacattaaa

SEQ ID NO: 301 - DNA, 17764 bp; double-stranded, linear
tcgtggcaggaaaaatgttggnactttatcattacggattaaaaaaatcnatgntcctgaaaaagctgtcatgacttcaggtggtaattttttaatcgttctggtaacccattgaaaccactccttcttttttatcataccacaacatccatttctctaaaagcgcagcacttactactgaatatctgctaaaatttgcctgataatctgcttttcagacagttgttcagataaccgctgttctcccggaaaccctaaataatcttctggtagccaccaacgtttcatttccacgacaccaaattcttgattcttgtttctctggctatgtcttttcagcgtttcttcaaaagaaatatcaaaataataaacctgaacgtttccttcaaagagatggattatttcctgaaaaaaggaatgataaatggctttttgaaaaatcccttcaacaatcacatactggcattcttgatacccaaaagctaccaactgttttaacaaagcaatacttagattacctgtttcatctttaacacgaagcatttctctgcgcaccacatcttgagaaatcaataacgattgttctttaagacactgatgaagcgcgttagctatcgttgttttaccactaccagaattaccacgtaaaataattaatttcggttgcatctgtttccctccattttcttgattgttgaaaaccagcacaaaagagcaaaaaacttggaaaaaactctccaagttttgctgttattttgatgaatgtttcgttgaatctcgctgaatgaattccgttccgacaataatttttctaggaactggggggggattcaagcataactctttcattgtctcaacggctagctcacccatccattcagtatgaacttaactgtkgttaatgttggtgaaacatatttgcgacactaatatccttaaaaccaatgatagaaatatcttctggcacacgaatggctgcttcttgtaacgcccgcattacaccaatcgccaatgtatcacttgcagcgaaaaaagcggttggacgagtgtccgcttcttcaataaagtctttcatcgcttgatagccttcttcaacagaaaaagctgcttcgacaacccattcttgatgataaaggtccagatcttttaaggtttctttaaaagcgacaaaacgtggatcaaccaatgccacgtgggactctttcgtatattcttgcccagaaagcataccaattttctgatgcccttgcgccaaaaattcttgcacaattgttttaacacttccagcaaaatcaacaacaatggagttttggccaaaagccattgcatcaaagtctacaaatagaagaggtgcgcctaaggcggctaaggccgccacttgcttttcatcaaattttcctagggcaattgtcccatcaaatcttttttgagacaggtttgtcagagattctttgactaaaagaaaacccaattcctctgcccgcttttcaacacctaaacgaatcgataaatagtaaatatcatccagttcttctggatcgctgaaccattggacaaaccgaattttctttttgcctgcttgtttttttctggctcgctttttataatttaacgtttctgctgtttcaaatattttcttcttcgtttcatcactaactgataatgtttcatcatagttcaaaactctcgaaactgtcgccgaagaaacaccgacttgctctgctatatctttaatggttacgatgttcctcacctcaaactaatcattttctatacattgaataaatcgttcaaaagcacgacgaccttcttcgtcacgtttaaagacgccggcatctgttaaaatttgaacaaaaattgtcccaattccttgttggatcacttctttgacattggcttcagtgatggtttgctgactgagttcatccgcccaagctcgatgactttcagcaatttgattgggttgctttaataaatacttttcgacttctcttaattcttgtgccagccttggtggcaaaatagctagtcccattacttcaattaagccaatattttcttgcttaatatgttgtacttctggatgtggatgaaaaatgccatctggaaattcctccgaaacattattatctcgtaaaactaaatccaattcaaataatgaccctttgcgtcgggcaattggcgtaatcgtatgatgcggtgtgccatcttttgaataggcccgaactgagacacgttcatcagaataattgcgccatttggtcaaaattaattcggccgcctcaactagttcctcttgacgatcactttgaagacgaatcacagacatcggccattttaaaataccagcagttatctcaggatattttttcaaagaaaatcttttttccattggtgctaaatccattggaaatgtatgacgtcctgcttggtaatgatcatgagataaaatagaaccaccaacaattggcaaatctgcattagagcccacaaaatattcagggaataactccgtaattttaaggagtcgctggaacgtttttttctcgattttcatttctcgatgttgttggtccaagaaaatcgcatgctcattatagtaagcatatggcgaatattgaaagccccaagcttcgtcctctaaatttagtcggataatccgatggtttgtacgtgctggataatttacacggccataatagccttcattctccatacataacatacacgctggatattttttttgactcattttcttttcagccaaaatttttcgagcatccttttctggcttcgataagttaatggtaatttctagtttaccatagggtgagtccattgggaaaataatatttttggcgattgctttcgttttaatgtagttattcgttttacataactgataaaaataatccgttgcttttcgtggagactcttgataataatccataaacttctgattaatgatggttggggtcggcgtaataaaatccattaactccgcttctagttgttctgcttccgtaattgagtcatcgatttggtgattggcttgtgcaatatttaaaagatgttccaccacacgcaacggttcttgctcacaagcaaccgcttctggttgttcaaaaaaatcacagccaactagtttggcaatccgattcgtcaaataatagcggtctgtttccgtccaatcgccattttctatgattatctctacaaatgcagcaatccatttactactttctttcatcatctgatgttctcctattcattatagccttgaggatgtttcacatgccattgccaagcggtggcgataatatccttgacctcagttacttctggttgccagcctaaaactcgtttggctttttcactagaagcaattaacgtactaggatcccctgctcggcgtggggcgattgtcgcaggaatttcttgacctgtcacttcgcgagcagcatctaacatttctttaacagaatagccgttgttgctacccaggttaaagacgtcactttcgccgccatttttcaagtattctaaagccaaaatatgtgctgcaatcaagtcttcaatgtaaacataatctcgaatgcacgtgccatctggtgtatcataatcatccccaaaaatacttagctctgctcgttggcccaatgccacttgtaaaataattggcacaatatgcgtttctggcgtgtgatcctcaccaattgaggcatctttttttgctcctgcaacattaaaataacgcaaagcaacatatttcatttcataagcgttgtcgcaccatttcatgattttttccatcattaatttactttccccatacggrtttttaggattcgttggggtttcttctgtaataggcattgcttttggttcgccataagtggccgctgtggaagaaaaaacaatgtgtttcaccccgaattcttgcatgacttccaacgcaatttgagtgccgtgaacattgttattgaaatacattaacggtttctccacggattctcctactaaagaattggccgcaaagtgcaacaccccttcaattgattccttttcaaagacgctacgtaaaaaagctttatcacgaatatcgccttcatagaaagtcgcttgttcatgaactgctgaacgatatcccgttaataaattatcaacaacaataacggcatatccttttgaaattaattgatcgacggcatgtgagccaatgtagcctgcgccacctaatactaaaatagacataaatacgctccttttactccctaatttctttttctattgtaccattaaataaggtctacttctgaattatttcattttgtaaacaggatttaatttggccatttctccttattcatttttcctataaaaatacagaaaagacttggtaaattttaacaaatctctaaattagtcgtagagtttatgaaaaatcattgtaactattggatttttttgcttttttccgtcataatagaaacaaatacaatttgaaagaaggaatgaacgatgaaaaaatttgtatcaggtatgttagtcggtactgctatcacagttgctgctttagccggtgtggctacaactattaaaaaaacagtcattgatccaattgaagaaaaagaagatatgattgaagaaaaccgtaaaaaagcgatgcgtaagcgtattgcacgttaaaaaatagctgtgacgttgagataaaaaatctaacgccaagaaatcaacagaagcgcttctggctctgttgattctcttaagmataacaagtggtcatccatcgctttgatggatgaccacttgttatgctttcttttttaccaaaggaactgactatttttcttaactattaaaaatagtggcagcaatccgatccatatcgcgcatattccaaggatccacaccaggacgagctgcagcggctgttaaccaatgaataccttctgttggaataccacaactaaaaaggcctgtcgccacctgtccatcttttgtcatgacttgattcgtggcaggcacaatcaagagtgcacctgttttgactatttgaccatcggctaatgccagttgatggagcgtagctagcttatcggctaacaactgcctcgttaaaggattcaaacttttttcattattgactttgggaatgcgcgcttcaattaaaaagtgactattataccgattttccggaaacaaattagcataagtaataaattgacccgctttcatttcgacacgcatttctggccccagaatcgtgactaatcccagttcaactaacgcctgtagctcttctgttctttcaacagaaggtcccactgacaaaaaggtattcaacggggtaaaccaatgccacaaccacttttgactctcgtcattcgttaataatccttcatccaaaacaaagcgaatctgatctcttaaatcttttaaactgtctaaagcagtggtcaaaggaccgctaagattacctttctctgcttcttgaatatcccattttaaatactctagtaaaaacgaacgaaaactttcatgagtagttttctttgtttcaggatgttctaacgcttgccaatcaaaccaatcttgtttttcaaagtgggctaggctttccggcgctcccttggtttgaataaacagctgttgaaaggcctctttagaaagatgcggatatttttcttcgattaagcaagtgtaatacacatattccacttctttttttaaatacccaaaaaactctgcgcctgtaacctgtccttttttacgacattcagctaaatacgtttcggttaaaaaaacaggctgataggtttccccgtagcctttttgattattccctcgaggatgagaaggaaaaccgcgaccagaaccagcaataataataggctctcttccagaaggttcataacgtaagcggccattttgacgagaaaaaacacccccgcggccaatcgtcaaggcagataaatagtcaaaaaatgccaaacctaagccttttaacacaacgggttgttttgcaggtatattggcaagtgccaataaagcatccgccgcatttttaggagaagaataaaacaaacgatgctccttggcgtagtccgcaagctcttgttcaacagtcgttaattcattttcttggtgacccaaagctaaaattactttgtctgccgtaaactcaatggattgagtatacacataatagttatcctctcctgcccgcacagcagttactggctctttaaaaaacgtcagcgatgtttgttcgttacaccgcgtggctaaatacgtataaaaccatttttggtacatgccataaaaagccctcgagcagtgatcattcggtccaaggcgatgacattctttcaacaactcaagataattatagggttgttgctgttgaatgtactgcgcagcttctgtttgggtccattcatagagagtggggcccttgacaattggtccttcgccactaaaagattcatctgtaaataaagtgacttgactaatcacggtgttcattaataaataattaggttgctctgctcgccaaattttcccacctggaccgtatggatcaaacaacgtgagctgaacatttatttccgttttacgagcccattcaatgactcgttctgcagctgataagcctctgggtccagcacctacaattgcaattttcatccaatcacctactctatttttctaataattcttttaagacaaccgcttgattatgcactgtatctttcgccccatagaccagcgtgactactggctgattttttacaatcgtctgtaactgcttaaacgctgtggcagttggctcatgtttcaattcttcttggtatttttgtttaaactcgggatatttatttgcttcatgattaaaccatttccgtagctctgtacttggggccacttctttgagccattcatctaacttttcagattccttggattttcctcgtggccaaacacggtcaactaaaacacggtagccatcttgctctgtcggtgcttcatatgctcgcttgatttgaatcatctgccttcacctcttctctttattgtagctcaaaaagtgaggactgacaaaaagcaacatctctattaagctttcctatataaaaagagttggtctcaatgaagaccaactctttttgttattaactatttctctttttcactttcccagtccagccatcatagccgccttttaaaatataaatatcagtatagccatttttgcgtaatagattagctgctcggatacttaaagctttcttctgatcataaagataaacaggttgatccttacgaagagaaccaattgttgtttttaacatgctgtatggcatgctgcgcgcccctaaaatatgcccagcatcaaatgtatctttctcacgaacgtcaatcacttgtgctttacgcattgtttctttaaattcttcttccgtcagcatttttgctgaacgtttcaccataattttcaaatataattcattgaataccatcgctagtacaataactagcaaaatgccattgattacccataaaatactcattctaaaaagccctctctatttctcttttgaaaattgtaatgctagtgaggcggcaccaatgacgccggcctcattacctagctctgctaatttgatttttgtactatttcgaacttgcgggaaggtaaattcttggaaatatttttcgacacgactacgtaaaaattctcctgctgcagaaacacctccaccgataaccacgctatctggatttaacgtgttacctaagtttcctgtggctaagcctaaatagaaacaaacacgatccacaaccattaaagcaaaatgatcgcctttttcggcaaattcaaaaacgtctttactcgaaacatcttgtccatcatcaatcgcttgtttcagttcagagtcacctgcaaattcttctgataaatgacgtgcaacacgaacgacaccagtggcactagaaacagtttctaaacagccacgtttcccacaggtacagtcaaagccgttaggatcaaccgtcacatgcccaacttcaccagcacagccagcaacaccgtggagcaattttcccgctgcaacaatgcctccgccgacacctgttcctaaagtaataaaaatcacgtcgggattgttttcccccgcgcccttccaacgctcacctaaagcggcaacattggcatcattatctaaggcaaacggaattcctaaagcagattcgatttgttctttgacaggctgtacagtcgtccagtttaaattataggcacctacaacagttcctttttcaatgtcgacacttcctggtgttcccataccaattcccacaaaatcttcttttttcatattataaagatctatacggtgacgaatactttcaataattgatggcacaatatgcttgccatcttctaaaatattcgtttcaatactccatttttgttgaacaacgccatcggttgttaaaatagcaaatttgatggtcgttccacctaaatcaatcccaataatcttcttatccatttagtcgattcctttctgcttccctctagattcttctattcgatgctctctttgcaaaatatgccgggcctgtaaatacgtatctcggtctaccaattgaccttcatacaatttttttaattcaatcatcattaactcaatatcataaatccgtgcaccgacataaatatacatcccaaactgtttaaaaagttgttgtacatcatataacgtttccatacgaaaacacttccttattatacaggtaaaccgtattttttaaaacccaataacagacaaattacgacmagaaaaataaaaattaacgtggccataattcgctcgtgcttattaaatgcttcttcacgatttggaacagcaaaagccgtcgcgactaatagtccaccaattagaccgccaacatgacccatcatatctacagagctactaaacaagttaaataacaaattaatcacaataaacattgaatagcgttgcaccatatacataatcgctggattgtctctaaaatggcgtcctaaaataacaaatgcgccgaacaaaccaaaaagcgctgtactagcacccgctgagacactgttgggtgtcccaaaggcaaaactggcgatatttccagcaatcccactcaataaataaattcccaaatagcgccaatgcccataaattgcctcaacctgtgcgccgatataataaagagtaaccatattcaaaataatatgcataaatccaatgtgaagaaacattggcgtgataaaccgccagtattcatgattttgagctaccagtggacgaaccattgctccccaattaactaagtttaaaatattttctgatcctccagttaattccaatccaaggaaaacaatgattgaaatacctaaaagggcatacgtaatgaacggctgattttttagccgtttcaatttcatttctgtttgataattcattccattcctcctattgtataaataattgttcgattggctgatcaaacgcttctggttgccattgctcatggagttgttcactaaaaactaaactacatgaatggcccgaaaaatgttccaaataacgatcataaaaaccaccgccgaagcctattcgatagccagcacgattgaaaacaatccctggcacaatcaataaatcaatcgctgtagctgttatttctgccgctgttaacggaggttcttccacgccaaatgcactggtatcataaaccgtctctggaaagacttgataaaagtgcattttgcctcctttaaatgttcgcggcaccgscacttgcttgctctcttgcatggsccgktcgaaaattggctgtgttgataattctagcggtaacgaccgaatcattccgatcgtttgtgcttgttgccattgctgactagcaacaactgttcatagagacttgattctttatgttgtttaatttctggatgttgttttagscattccagggcagttaagcccacttttctcaacttgtttttctccatgtacaccttcaaccccttttctgttaagtttatagaaagtgttcttaaaaaacaagctgattccccttttctctttgaaaaatccctttatttttctaacgtttttgacgcttctttaaaaaagtcaacaaccaaatccattgtttctcctttcactaaatgccgctcaccgatttccgttataaattgcgtatttctcgcatacgttttcccagacactaattgttcaaaatcagccatgtcttcatagggaattttttcatcttccgttccatgccaaaacagcatcggtcgttcttgtagtctttctggcgtttgtgataaatcgtattgatgcacccaacttagcaacagtggcaagtctttaggtacaaaaatagcaaattctttcgcccgttgaatcactcgctgaatatagcgcgccggatagggtgttcccattaagcaagcagcagcttgaatctcaggatgttgggtcataagagcgctggtagtaataccgcccatggatacaccacccacgccaatccaattttctttaatcaaccctaatttatgaaaatgatggataattactggaaattcaattaaattatattgaatgctactccaaaatgtaatcgaaggaatcgtggaaataggttctgnttttctttctccatggttcatggcatctggtaaaatgacccgaaacccctcgtgtgctaattttcttgcttgtgttaaagataattctttagctgattgccaaccatgatagtaaacaattaaaggtaatgcttcgtttttttgctcttctgttgtcacttctaatgctggaatttttgctatgtagcgatgtctaatactgattttcattcatgattcctccattataaaatatcttctcttattttaccgttttttgataaaacctgctctttatatgatttatcaaaaaaatcacaaaatatgcgaattcgcattttcctattttattactttccgttataatcattttattaaatacaaaggggtgtttttatggttaaaattgaggaaaaaggtaaagtaacatttggacaagcttttaaagattattttcgtggatatgttgattttaaaggtcggaccacacgtgctggttattggtggatgacattggtattaagcattttagcacttattttttatattgccattgtcggcaaagctgtgtcagcaattttagcagctgaatattttgaaacctatgattttgggaacttattaccgttgatgcttttgcacttgttttatggttagctttattattaccaacgtgggcatgtgtgtccgtcgttatcgtgatgctgggatgacaggttggggcgtgcttgttttatatctactttctattgcctgtagctatacacaagttttctctgttatgtcaacactgaaatatgatgttcaaacagatactgtgataacaggtggcagtcccgtcttcttatttttcactcttgtgattagtctgtttttcttcttactaacagtcttaccgacagataaactaacaacaactagccaaaatagcgtcttacgcttcttcttccgttacaaagaagtgaagtaaggaaaagttttaagcctttcttttaaaagaagggcttttttcttattttaaaatctttatgataaaataagaactagtctagctaaaaaaatggaaggagaaaatatggctacttttaaacggattctgaatctagaaaattatatttttactttttttattttatttgtcttttacggcgcaattaactctccctattcgctggtaaaaattctttgggaaaagcctaagcacttgcttgttttacttcctctattaattattctattgttgattatttataaaaacaaaaaatttctttacactaagattcaagcgctctggcacttaataaaaacccatgatcgtgtggttattattggtagtttgatcagtttatttttactacaacttttactcctgacgcagattactgtgccgattggctgggatgtttttgacaactttcatagtattaccactgaaaataaggattattcaaaaatcgtactttctttaaaccccaataacgaatttttctttttcatgatgtattaccttaataaatttttgcgtttcattgatgtaacagggagctggagcaatacttggtttagttggcaagtggttaattgcttgtttattaatagcagtttatttctcttttatcatgcctctaagcgtgtctttaatccattaacggccttcgttgcttacagtttattttttctttctttcggattgtctccatggttactcacgccttatacagatacggccgtcttattgttcatcaacctagtcttttttgcatatagcctttttgaccaagtttcccctcccttcgtaaaatattgtttattactgtttattgggattggcctagcttggtgttttttaatgaaaccttcgtctattatcttttttattgcatttagttgtatcaaagtgctgcaacttcttttagtaaatcggaacaaacagtctatcgtaaaattaaccgtggttgctctctttttactgactggtttcgccagcgcatattatagttttcaattttttgtggaaaaacaaacgattacggaaatcgataaagaacaagccaaaccttggacactttttgtaatgatgggtttgactggaactggcggttacaatgatgcagatacacaagcagtaaatcagttgcctacacaagaagccaaaaaagcttatactataaaaatgattcaagaccgtttaaaaaataaaggattcttcggttatctccgttttctggctcaaaaaaatcgtcataatactgccaatggtgattttgactggggttgggatggcggtgatttaatcccagaaacaccttctaaaaatcgttggcaagaacacttgcggtcactgtattatccgcaaaatcaaaaaagtaactatctacgaatttatatgcattttttctatttactcacattactaggtctattgttcagtatccctctaaaagattcaaaaaataactacgcgattttaaaattagctttcattggagctattctgtatttattgctctttgaaggcggccgctctcgctatctaatccagtttatgccgttttggtacttgttatcagcgagtggttggctgggattgagagagattcgaagatacaaaaaaatagtaaaatagaaaagaggattgagttaaaaatgaaaaaaagtttgctggggttgattgtttttttatccttactgacccttacttcttgcagaaataaagtgaccacaaaagagctgatggcaaacgagtgggccgtaaactccaacgttgatgaagtagtaatgattgtatcattcagcgaagataccgctactttcaaaatcaatacagntgaacacacatcaactgcaaaaaatgagttggnaaaagcaggcgaagaattaggtaaacaaattgcaaataaaatagaatacaaagtcaaataccatctaaaaaacaatcaaattcgttgggaaaatgaaggaaaagaagtagcttacaagataaaaaaagaaaagcaagatctacttttcactcctactaagacaaacaattctgataaccaaacaaaactagttttgaaaccttacacaaagaaaagtattgattcttctactcaaaaagataaaacggaagaaaccagctctaattatcaaaacgtctcatctgaaacaaaccaatctacctcttcatctactactaaagaaccgctaccacaagttagcttagctgattttataggcggttggggtattcctcaaagtgataacttattttttataaatgctgacggaacactcactagcataactcaatcgaatgttcctcttcaaaatgtaagtttttctgtggatgagaatggtaatcaaataatgacgtttcttttgaataatacgccccgaacagtaacgaaaaataatgatggtactttaactgttaatggacaaatatacacttatctaggtaatattacgttggaacaattaattgaaagaaataatcaaactcaacaagtttttgaacaatctgaacagcaaccaccacaaaactctgattctcgtgaacaaatacaaaattctaaatcagaccaacctatatacgatacggtacgaagtggtgaaggtgggcgacagttagccgaaagaaatggtttaaccttagaagaattattagcattaaatccaggcattgaaacttctgttttttatcctggtcagtcattacgaattaaatagaaatttaggtatactaatagataatagtctataaaagtagaactggaccatctaccatttacttgggataccagttgatggcaatagttttgacgaagtggaactagaccttgtacctactggctcagcaaaaattgcgacatttgatatagcagttgggcattgattaacagcatgcatataatttgataatatggaatatacacaaaaatgtctaaggagcctaacattctttcaagaaagaatgttaggctccttttattcagacaatttcagccactccttgcgattgcaataggacatagtttttacaaagacaaaatgataaagcaaaccgtaagctagccctaacatatttaacaaaattcttaagtaaagacttgtttctagcccaaatatcatagaagctgccatgatagcaccaacacaattaaaaatcgttttacttttataagatgtgcataagcctaaacaaagtcctcctaaaataccaagtaggttcgttggtatataaaataacaagatagccgatactagagaaccaataacgacccctattattcgttcttttgctcgttcagacaatttaaacgtctcatacccagaaaataatgacgaactagcaaatgttgcccacataaagcggtcaatctgaaggtgcgttcctataaaaagtaataagctaatgcctaaagcgtaataaccaaaccaaatatttctttgattaaaaaaaccattttctgtaaccatctgtataaaagtaatctcttgatccaactttttatgtttcacatgataaacaaaagctaaaagtaaataggcaaacactaatacaaagaaagtttgttctaattgctgaaacgattgatagtgaaccgtgccaactaaatataagtaggagaacgtatacaagcccggattacccattttagggtttttaccagttaagaaaaacaatgccagcaagcagataaaatgaagaccccattgtaaaaatgatacagaaatcagtgaaattagtggactaacacctagaattgttaacacgattcctaaactaagcaaggcctgtttttccctgtagccatatgagacgaaacggatactcaacagcaaacaaaataatacaattgaaaaaggcgctacagcttttccaaagaaaaaagtaatcgtcgacacccataaaatcgcaaacgaaactaataaaatatcccttattaacaaggcgcgccaaaaatatctccgctgttttttagtgtccgcttgatgaattttttgttttaaaataaatggatctaactgcaataattgataaaaagtcacctaaaatcatctcctaaaaatcgactcttctcaattcattattccaacttttccytctatgaaatcataagaaaagaagtkgtgacgaacattttactacaactttttttctgaatcaatacatgctttatttcttattccaatacctttcccgatacgatttgcttacttcataaaaaataagcctagaaaaaatcaaaacgattaattctaggctcaaaattaaataactgttgaacaaaagctagcgcttttttacataaacttttccaacagatccatttctttttctaattctttttcatcatacttgtcatacttaccagcttcgtgtgcaatttttttaatctcatgaatggcttttttttcaacaatccatttcttcatactatgtttttttgtatcctcatctagcgagctcaactcttctaaacttgcatccaatttgttcaaaacgtcgcaatttttgctaatgcttgcgcttctttttcttcatagtttgacataatagacacctcttcttaagtatttttctactttaagtgtacgtctctgtcgttttatttgcaactaataactcaactgcttctcggtacggaggataagggattcgaacccttgcacgatgttactcgcctaacggttttcgagaccgtccccttcagccaaacttgggtaatcctccctctacattccatctacaaatgaacatgtaatgaatctatagataaaaagcctagacccttacacaacaaggattctaggctctatctaactaaattatttagtttcacggtgtaatttttctgcaacaccatatttagacagactagaactcacaagggtttgcgtaatatcattttaattcaaattagcaaaatagactataacaacaagataaaatctacatcaaaaaattaaaaaaggcaagcgaatagatatataaatcataccgaataaacaaaaaaagctctacttcctgtgattgagaagtagagcttttaatttatctattcagcaccgttaacactaaggtgcagatacctaataaagttaaactaaatgataatagttctttcttttgcaagctcatgtttttcttcatctcgttaattccctttaacactattatagcgacgacaataaaaagtatatagtacgttcgcatacctgaagcccaaacagtaggagaaaaacccataattaatcttgaacaaaaacccatcatcattaacactactaaaaaaacagcagattttttatcatcaaaacttatataaattcctataattaaacataataataatcccaaaactataaaagtagctacccaagttccagggtgataaattgatagtttagttccaaatcttgtaaagatattccccagattgttgctattccaaatcattgatcttttatttccattgacataagtaaaactttgtcccattgtgtttccgaaaaaagtaatcaaatttagaaaaagcggcaatgcggttnatatacgtatataatagttctgacatttcttataagatagaaagaataatataaaaaagagtaataaaaataaaatatttgtgtctaaaaaaaacggttttccaaatgatgatagggagcgtcaataattttgtgtaaataaattgtcctcctgcaaaataattagttactcagtaaacattgaaactaatgtatcggttacctgttgaaaacctttatggcttctgtttagaaatttttgattgtatgtatcaaaaatgctgactagaaagcgttctagtgattcttcattttgaaactgctcttttctacggctgtatcttttaatttgcttattgaaagactcgattagattggttgagtaaatggttctacgaatgcyaggtggraaatcataaaaagttaataagtcytggttttctatgagtgactgcgtcactttaggatagtttnncttccatntctcaatcatgccggataagaaggtattcgcttcttcantgagttagcttggataaacagccctaaagtcatcacaga

SEQ ID NO: 302 - DNA, 3327 bp; double-stranded, linear
gggattaacttgcctcntaagtttagtgcagattncgatacaaaattaagtgctgaagaaatagctactcttgaaaaaacggcnctagaaatgaacaagaattttccaacgagcaaagaagatgaaaaaaataaagacgtgatgtgggatattcaacatttaagtgcagatcagaaaaaagaattaagtgtatacacaacagaattattaaatgatgtgcgaaaaaaattgggtctttctcaattaagtgtatcggaccaatcaatcaaatttgcttgggatattgcgaaatattctgataccggagaatacatgcatgatgtgatagccattaataaagcagctaaggaaaatggctttaaagaatatcctggaatgaattactatgaaaacctaggtggggggtattacgaaactgaaaatggtaaagtttctaaatatactctccaagaaagtatccgcaaaatgcttgtcaatatgttgtttgatgatggccgcttaggttatagccatttacattctttattacaagacggaaaaacagcattaggcgtttcactatctggtgaaaaaaattctatttctcctaagattcatattatttcttatggtaaagaaaaactggaggatagtagtcaataccaaaacggcgaagtggcaagcatgaaatctaaagaagaattacaacaagagatagctagcaaccaagaaaaattagctaccgcacaacaagcagaatcagacgcacaacaagcaagaagtgcaagtcagcaagccttaaatacagccaaaacaacacaagcaacagcagaaaaagaactatctgttcataaagcgacattggctaatcttcaagcagttgcgactaaragtacgacaaactatgaagaaaaagtacgacaaactgcrrcggcagaaacaaaccttcaacaaacaaaagatcaattggcaacaatcaatgagttaattcagaatcgagctgttgttttagaaaaagcgaaaacaaaagttgcagacgcacaagcgattgaacaaacgtctgctaaagtgctgaaagaaaaacaagaagcccaaaaagcagaagaaaacacattgaatagcttgaaggaagtattggatttagcaaaagaaaacttaaatcaaaaacaagttgcgcttaaaacaagtacacgttcattggctcgtttagaaaatgctcaaccaacatacgaaaaagcagtgaacgagttaaacaaagcagaagcggcagtggtccaagcaaaagaagcctatgaaaattctctgaaatcattggaggaactcaaagaacaacaagccgttgctacacttgcttatacacaagcacaagaagacctttctaatgcgaagttagagctacagcagtaccaaggcatattaagagacttagaggcacaacaagccgaacagcgccgacaagaagcgttgcaagagcaagtagcaaaagagcaacaacgccttgaacgagaagcaaagcaacaacaaatgttagtagcaagtgctacttcagcagataaaacacctggtctccaacagttatctttttctaaacaaaaagaacagccaaaagcacaaacactaacacattcagaacctcgtaagacgaaacaagtagcaaaagcccaagaatccttaccacatacaggagaacaaaaaagtatctggttgactatttttggattattcatggcagtaggtgcgatcagtttcaagaacaaaagacggaaaaatagttaaaagtataataggtgaggagcgaaattttcgctcctttttattttaaatacatgacatgaaaggagaaaacattggcaaagaagataaaccttgtttccatattttgttctcacgaagcactagaacaaatttatattctatcctacccgtattgtttaattaagcaatatctattcaagagaatcgaagatatttttggttctttttttattggagaaatgacattgctgtggctgaatagaagtcgcttaaaataaagcagtagaatccccttattgttttatttgattatgcaaggtgcgaatccttgccagcaagtagggtttacggtaaatgatcccgactgccggttagcgaaaaccgtatagagattgagcggtagtgtggcaagcaacagctcttataccattcataagcctaccgcaaaaagaatggcaatctcaaaaaaacaggaaactgagaggtcgctccttttaggttggcgtgtagcatctgggatgcaacggacatgaaggaagataagaggtaggttcgactcctaccacgccagtaagtagctttgctacgagagaaaaagaataataggaggaataacaatgaaaaattatgatccaaatatccgatggggcttgcatacaatcaaagtaagtttccaacgaggtgtatacaaaggatttgttacctttgtaaaaagtggaaattgtaaagggttagacgtattaggcatagacgaagaagatttatatgacatgaaatttaaagaaaatccaatcaattttagactgcttggtgaagatgataatggcgatgaatggttcgcaatgactttgaagaatgacaaaaaagatgaattgttagttgaagatgtgtgggaagagttaagtgagtacattgtgaggattgaaattattgattttgaggaggaaaaatagaggagcgagaaaatactcgctcctcttttatatatagagaggctacccagcaatgataactaggtagccacagacataaaattactattaatctgggaataaattatttataccatgaaaagggttacttatcaagaaaaaataccaatgaataggagaatgtggaatgaaataaagtaatacatctataaaaaagagaggaggaaaaagtatgacttgtgtacgtgcgccatgtcggagaaatcgttgtttgtaaagaaaagaataataggaattaaaaaatataatttacgaggagaaggattcatgaagcaacaaacagaagtaaagaaacgttttaaaatgtataaggcaaagaagcattgggtggtagcccctattctttttataggtgtgttaggagttgtaggattagctactgatgatgtacaagctgcggaattagatacgcaaccaggaacaacgacggtgcaacccgataaccccgatccgcaggtaggtagtacaacacctaagacagcagtaactgaagaagcaacagtacmaaaagacactacttctcaaccgaccaaagtagaagaagtagcgtctgaaaaaaatggagctgaacagagttcagctactccaaatgataccacaa

SEQ ID NO: 303 - DNA, 510 bp; double-stranded, linear
ttcgctggtacgttttttcaatacttaataatgcactaacgttatataaaataaaccgagttgcatcatctacactgatgccctcttgtaagcaattggtttcaggttcactttcaaaaatagccgcaatattattgatataggtttttttgaaaatttgatacagcgtacgattgtaatcagggcccatttcttgaaacatatcgttcaacattaagaaaagattggtcggatgttcatctaacaaaactttgattaattgataaagtttttcttctactgatgcatttccagaaacaattgggactaattcttcctgaacacgggacgttaattcttcaatcacagctaaatacagttcttttttatttttaaaatggtgatagagattcggttgggtaatgttcgcttttaaagcaatttcacgagtggaggtattttgaacccctttgtcatgaataattcagaagcgacagataaaataatttgccgtgtacgtctanatcagct

SEQ ID NO: 304 - DNA, 2047 bp; double-stranded, linear
gacataagtcgttttgacttatgtcctattttcgttttttatttccaaacattttacgagaatattttaaaatttagcgtatacttaatataagcaagttaggagggcttatttatgaaaccatatgtttatgtaatcagtgatattcatggacaagcagatttgtttgatgccttactcacagactatgacccagtcgagcatcagctagttttaattggtgatttaaacgaccgtggttcggattctaaagcctgttttctcaaaggaaaagaacttgtcgagcaacacggcgctgtttatttacgaggcaatcatgaagaatattttttgcagtttcttcaaaatccagaggactggtttgcaggatatgttcgcaatggtggcaaggaaacaattgaaagcctcttgcatccaggagctactgcagaatactcaccaacagaaatggccttaatgatccgtagtcgctatccagagttaattgattttttaacaaaacgaccactttattttgaatggcagcattacttatttgtgcatgctggggttgatttaacgatggaagattggcggcaaacagcacctaaggattttttgtggattcgcgaaccctttcatcaagggaaaaataatacaggcaagaccattgtttttggtcataccattactccgatgttacatggtgatatgcagaccacggacctttggcaaagtgatggaaaaattgggatagatggtggtgctatttttggtggctctgtgcatggtgtgatttttaatgaaaaaggcattgtccaagatatcgaatatcaaaaacgcacccctgcgtggcaaccagaattttgattccttaatcgtatgaatcagttacctcacttctatatttagaagcaaaaatatgctaaaatagataagtatgcataagaaaagaggtatctagttaatggcagaagcttataacgaagaagtagtagcgctacttcaaaaagaattgacaacgtatcgttcaaaacaaataacaacggttttaactttattaaatgaaggaaatacagttccttttattgcccgttaccggaaagaaatgactggaagtttagatgaagtccaaatccgtgaaatagaagaacgttatcattatttacaaaacttgaaaaagcggaaagaagaagttctccgtttaattgaagagcaaggaaaactaacaaaagaactcaaaacagatattcaaaaagcagtaaaaatgcaacaagtggaagatttgtatcgaccatataaacaaaaacgtcggaccaaagcgactatcgcgaaagaaaaagggttggaaccattagcagattggttgctctctttacctgaaaacgcggatatcttagccaaagcggctacttttattaatgaagaaaaagaagttgcaaccgccgagatagccttgcaaggtgctcatgaaattttagcagaacgtattagcgatgaaccaaaataccgaatatggttacgtgattatatggttaagcatgcgcaatacgttagcgtagttaaggatgaagaaaaagacgaaaagcggacctatgaaatgtattacgattttgcagaaccagttagcaaaatggtgccgcaccgtgtcttagcaacgaatcgtggtgaaaaagaagacattttaaaggtttcccttgtcgctgatgaaacaaaaattaatgattatttccaacgtcaactaatcggcaagcaagcaacaagtttagctgctccatacattgaggctgcttatttagatagctataaacgattcattggaccagcgattgaacgggagattcgcaatgaattaacagaaaaagctgatgaacaagcgattgcaattttcggtgaaaatttacgtaatttattattacagtcaccacttaaaggaaaagttgttctaggatttgacccggcttatcggacaggctgtaaattagcagttgtcgatgaaactggtaaagttttagcaattccaagtgatttatccacataaaccagcgactgctgcgaaacgtgaagc

SEQ ID NO: 305 - DNA, 5338 bp; double-stranded, linear
cncccgggggaaatcangangaatttcccgaaattgctctttaatttttggagaatttcggcttatttccgaaggagttggttctgttcccgccgtttatcagtttttgagggtggagcaaaaatccaaagtgatttttgtcccacgctcatttttcttaaatgaaagtttttaaaaaatttccatgatttttcaagtaaaatgaggtgggcacttttgttcgattccatttttatgtataatgagaagtgatggaaagagggaagttaaatggcacaaaaaagagcaacaaataagaaaaaaagtacgacaaagaaaaagaccaaaaaacaacagcaacaacaagaacgtttaaattatatgtttcttggcctgatttttattttattcggtgtctttggactctttcgcttagggtttttaggcacgttattagcgaattgtttacgcttagttgtaggtaatacctttccatttgcagcgattttactaatcctgtatggcttattagtcatgatttatgggaaagattttccgttaaaaagagggcgccctatttttggggctgttctgatttatattagtgttttgttatttttccatgcctttatgtttcgaaatgttagtggcagtcaaccagatattttaggtaacacttgggaatttttgcaaagcgatctaaaagctaaccaagtgacgcaaaacgtagggggcggtatgattggcgcactgctttatcaaggaacgtactttttggtggcacaatttggtagctatttaattgccaccttgctactgttagcgggtattttcttgatgagtatgtgggattttcagcmaattgttgatcatttccaaagtattcaagatcgcctaagtcatgtttcggcaaaatcacaggcgcgacaagaagaaaaagaggcgaagcgagcagcgaagaaagaagccaaagctgcagaacgccaagcaaaaattgaagccgctgcccaacaaaaattacaagagcgggaacgcatggaacaagcggcagccgagcgcttaacaaaaacacctgttgaaacccaccaaccaatggtggaagaaccggccgcaccaacgcctgttcaaattgattcgtttcaacagcaaaatcaggcgatgcctgtaccaccaattgcagcaacaaaaccgcaacgagagcaggaagaagaggcggcagatgaagctggtgttctcgaatttgaaatttctgaagaagcggaagatcgtgattatcaactaccaccaactgatttgttagatacaattcaagcaacggatcaaagtggtgaatatgaaaaaatcgaaaaaaatattggcgtcttagaacaaaccttcmagagttttggtgttgatgctaaagtagtcaaagctagtttaggaccatctgtcacaaaatttgaagttcaacccgctgttggggtaaaagttagcaaaattgttaacttgacggatgacattgctttagcgcttgcggccaaagacgttcgtatggaggctccgattcctgggaaatcactaatcgggattgaagttcctaatagtgcaattagtacagtatcctttagagatattgttgaggcacaaccaagtcatccagataaactattagaagtacctttaggtcgagatatttcagggatggttcaaactgcagatctatcaaaaatgccgcatttattaattgcgggatcgacagggagtgggaaatcggttgctatcaatggcatcatcacaggtattttgatgcaagcgaaacctcatgaagtaaaattaatgatgattgacccgaaaatggtagaattgaatgtgtataacgggattcctcatttattaacgccagtggnttactaatccgagaaaagcggcccaagccctgcaaaaagtagttcaagaaatggaatttcgttatgaaaaatttgcagcaacaggcgtccgaaatatcactggttacaatcaactaattcaacagaaaaatgcggaagatggcgaaaatcgtccaattctaccatttattgttgtcattgttgatgagttagctgatttaatgatggtggcaagtaacgaagtagaagatgcgattatccgtttagcccaaatggcacgggcagcaggtattcatatgattttagcgacacaacggccaagtgtggatgtcattacaggaatcatcaaagcaaatgtcccttctcgaatggcttttgcggtctcaagtgggacagactcgcgtaccattattgataccaacggggcggagaaactattaggtcgaggcgatatgctcttcttaccaatgggagaaaataaaccaattcgtatccaaggggcctttatctctgatcaagaagtcgaacgagtggttgcgtttgtaacggatcaacaagaagctgaatatcaagaaagcatgatgccaacagatgaaccgaccacttcaggcggtggcgaagctcctcaagatgagttgtttgaagaagcgaaaaacttggtggttgaaatgcaaacagctagtatttcattgctacaaagacgttttagaattggctataatcgtgcggctcgcttagtagatgaattggaagcacacggagttattggaccatcagaaggtagcaaaccaagaaaagtctttctacaagcggaatcagaagaggcagcaaccgagacgccagaacaataaacaaaaagaacaaaaatagataaatttatctatttttgttctttttttataatttcagcaaagcatcatgttataatcatcattttctggtaaaatagaaaggaatagtgcggttgggagggagcgtatcatgagaagaaaaagcgtgctttatttagaagtagcagatcagattaaagaagatattttgagtggcaagtatccagtaggaacgtttttaccaacagaaacagaattggaagagctgtttaacgttagtaaaattacgattcggcgggcaatcgaaatgttagcaacagaagaatttgttgagaaaaaaagtggtcgaggcacaactgtgttaagcaatcgtccctataataaactatcaaaagcagggacattcactgaatttttgaatgaatcaggtcagaaagtaactaaaaaagttttacaagttgaaaacttgacgttgtcaaaagagatgccggcttatcaatttttaggagaagaagtggttcatctttcacggttatatctaatcgatgaacaaccctatatttattttaattactatttgccagctgccatgaaagacgtatcattgactgaatacaaagaagaatccttgtatcgtttgatggatcgacatgccattgaaatttataaatttgaagaccgttttgaagttgcaactttgacagaagcagagcaaaagatgttgcaaacaactgaaacaacgggcttaaaaagaattcggcgttcgttaagcccaacaggtcgttgcgtagaatattcagaagctatttataatacgaagattcatccttatgtgattgaatatgaagcataacttttaaaagaataacagtgcacttacagtaatgtaagttcattgttattcttttctattgtcgttttttttcgttttcgatacactaaatgagtgagaagaataggagtggaaaatatgttagaagtacaaaatttaaaaaaagtttacggaaacgaaattaaatatgaagccttaaaagggattaatttaactgtccaagatggtgaatttattggtattatgggaccttctggaagtgggaaaagtacacttttaaatttattggcaacaatcgatagtccaacagacggtgaaatacttttaaatggaaaaaatccaaacaatttgaatcaagaacaaattgctaaattccgtcgtacagaattaggatttgtttttcaaagctttaatttaatgccaacattaactgttgaagaaaatattattttgccattgacacttgatggagaaaaagtctctgtaatgaaacgacaattagcagaattaagtgagcgtttaggtatcaatcatctgttgaaaaaacgaattgcagaaatttctggtggacaagcacaacgggtcgccgttgctcgggcaatgattcatcatccacaattattattggctgatgaaccaacaggaaacttagatacgaaatcatctaaggatgtgatgggcttgttacaacaattaaatgaagaagaagcggcgactattttaatggtgacccatgatccgctagccgcaagttattgcaagcgcatcgtctttattaaagatggtgaattaattgatgaaattgtccaaaatggcaatcaaaaagagttctacgatttaatcatggtgaaactggctgagattgaaggtgtcgataatgaattttaatcagtttgttataagaaacacgattcgaaataagcatttatacttggcttatttcctaagtacaatgttttctgtgatgatcttttttacgttcactggttttgtctttcacccagccttagctaatggtttaaatcctaaagcacaaatgggaatgacggctgcggcaattataatctatggtttctctttcttattcgttttatactcgatggatgtctttatccaatctcgaaaaaaagagtttggaaccttgatgattcaagggatgagtccaaaacagttaaagaaaatgatttttattgaaaacttagtgattggtttctttgctacaatttttggtagcattttaggtgttggattttcacagtttattttatggattagcaatttattgatgcatctaggtttaggtttttatttgccagtgatgccgtttatcattactgtcatttcatttgcggtcttgttcttagtaatttctttctttattcaattccgcttgccaaaagcgacacttcaagagctattaaaagcaggagaaatgggtaaaggtgaaatcaaaagctctaaagttaaatctttcttagccgtgttacttttaattgtcggttacggaattgctttagttgctaagggacagttagttttaatggtgatgttcccagtaattttcttagttattttagggacaaaattcttatttgmccaattgagtgtttctgtcattgaacgtttaaamcggaaaccaaaaatcttttggaaaaaamccaatatggtcgttttatcagatttagcattccgcatgaaagataatgcacgttcgttcttcttggtttcggtgatatcaacggttgcttttgctgccattggaacgttatacggcgtgaacgagatgatttttaaaggaataagttctgtaccgtacgaactgacattgtctg

SEQ ID NO: 306 - DNA, 11854 bp; double-stranded, linear
tgaattcgaagaagaactccctgcagaacctatttccaaattaggtgatatttatcaattaggaaggcaccgtttaatgtgcggggacagtacaaattctttagaagtagaaaaattaatgggcaataaaaaagccgatcttttgattactgatcctccatacaatgtagcgtacgaaggtaaaggaaaagaagcactaactattaaaaatgatagtaaagaaacgaatgaatttcattcatttttatatgaagcttttagtgcagccataaataatatgaaattaggaagttcattctatgtgtggtatgcctcatcagaagtagtgaattttcatactgctttagaagaagctgggtttttagtaaaacaagaattgatttggaataaaaatagtatggttttaagtcgtcaagattaccattggaaacatgaaccttgcttatatggttgggcttctgggggcagtcattcttggtattcagatagaaagcagactactattcttaattttgacaggcctacagttaataaggaacaccctactatgaagccagttgcactattcgattatcaaattaaaaatagcagtaagcagggagactgtattttagatttgtttggaggttctggtactacgttaatagcatgtgagcagaatgaaagagaagcctatttaatggagttagatccaagatatgttgacgtcattatagctagatgggaagcattcacaggagaagtggctgtgaagatatcaggtaatgatacggcggtggttgatggtggctagaaatgataatttaaaaccattttcagagcgaagcgtggatgaagctrgagagcttggaagaaaaggcggtaaagcaagcggagaagttagacgaaaaaaagctgacttgaaacgagctatttctattgttttatcatcagaagtaccaagctctaaaatggctaagacgctaaaagaaatgggatatgagaacactaacgagatggccatggtcttatctatgacgcaaaaagcaattaagggagatgtcaaagcagcatcctggatttccaatattattcaacctgcaaaggtagagcatgaagttgaaatgagtgtgggcgttgatgagaagcggaaagtagcagaagaatacattaggggcctgtttaataatgacactggaaatagcacagaagagaacaattaagcttttaaaaagttcaacgcccaaagaaaaactcaataagtttgtaaaaggttatgttccaactcactacaagagattaagtatatcaatggaaaaagcaatagaactagccataattggggcaaccgaaagtctagcatattatggtgatcgattatattttacgcaggctctattaatgggggctgtggtaagtggagagtatgacaacattattgtcgttaccccttcacagtatggtaaaagctggttgagttcgagaatagctgtttggctcgctgatcacaatcggcgttgttacgtggcgggtggtaaaaaagataccactgatattatcatgcaacatgttacagatacactacagactgttgatgaatcaattgcaagaaaattattagagcctgttgataagctagaaagacttcaaacgggtttatccaaaagaaagatttctttcagtggcggaggatcgattgaagggatttcattaggtgaacatttcaaaggaaacaaatctggaaaccaagcgattggtcgtggtggagattatattattgatgaatcagcgttcgtctcaaatgaaacatatgctgagcttggtcgtagaaattttgcaaatgtggatggtaaaaactatctatcttttgaaatatctaacccacataataaaggtcgattttatgacaaactaactcaagaaaatattccaaaaggcatgttggttgtatgggcagatgttaggaccgcttttgaagaagatcgagttaaaagtattgaacaagtaataagttctgaattttttcaaaataaatctacatgccaacgttactttttatgtgagcttccagacgaaaatgaagatggaatgtttgggacacctcaaacagaagaagaacataccgaaaaaaattgggagtatttccttggtgtagacagtgcttataaaggaaaagataaaatcaaagccacgttatcagcattagatgcacaaggacaagtacatgttatagacactatagaaattgaaaaaggtgactggcaagacggtgtgactagtaaaaagataattactcaattgttgatgattatagaacattttgaagttaaaggtgtatgtgtcgacgtaggttacggtgtttatattgttgaaggtttagcacatattaacggagatttcgaattacacggcataaatttcggtgctggtacaactaaagaaagggtggaaaaaaaccactactcggcaaaatatggggcaaataagcgtgctgaaatgcacattgacttacaagaaaacattgataacagaaatatatttttcactgaaaaagtatatgaagaagttatagatgaactagttcttgtaagtagcaagatcaagtctaacggaaaaacagccattgttccaaaggaagaaatcmaagctaagttgggccactcaccagatacacttgattcagttctgctatcgctacatgcgattattctatataaattaaacgaacgattctatatctattcttgatgaaaggagggaaatgaatgtctgaaactgaattagttgggaaagatgaactattaaaagcgatgactatgtgtaatagttgtccagattttaatttaaacgatttaagaggtaagggtgataacaactatcagctttatgattggttaattcataatttgccaacagcacaatatgttcttggtaagttagtagagcttattttttctaataacttaactacaggcgatgaaaaacaagatgaaatattgaataactttttatatggtcaaacgaatccagaaggagttaccaactatcacgtacttgttcaatcaattaaggaatcaattgtatacggtcgatctggtttacgttttttatctaaagatgatggattgattaacgtaaagtgtaatcattttggcgttgctcaaatattgaataaagaacattacggatataaagaattgattggtttcgttattgacaaaaaaggtcgagctattacagatgtcgatctccgtgaaggagaaattgattcagaagaatactttaaaaaaggaatatttgtttttaaaaacaatgacaatattttattgccacccgaaaaattcgttaatttaagggttgatacatctactcccaaaggatcgagtgtctttgattcggatatccaacgagtcctgcttatagcttcggtatataaacgactactatatgatatcgaatatgatggcgcaggaagattaattttctgggcagataatgccaatagtaatgaagaaagctcaaataactttttgaacgacactgaatcggcaaccaaacgacggcaggataaatataaaaaagaagttgaagaaataatgaagctcgtaaaagacagcaattcaacaagcgttttagcagtttcaaatgcttttaaaaagatggaccacttgccacgtgtaactaaagcgacggagtttcttagttatttaaatcaggaaggcgagattatggcgcaagtattcggtgttcctaatgttctgcttggattaggtaaaatcagtgggaatatatcaatggaaaaagtaatagataatgcaatgcttaattcaattattcctttacgtgaaaatattgcgactcaaatttcgagcatattaacaaataatttaaaagttccaaaagtctattttgacaaatatgaactaaaatctcagtcagatataaatgataggcgattgaaagttttaactgttgctgagcgacttaaagcactaggtaaagaggatttagctaataaaattattgaggaggaaattcagttatgagtattttagaagatctaagcaaagcaaaaaagaaagcaaaaccatatgcagtagtcggtggacgtgaggtttatgattatgactctttagagaaaaaagttgaaatcgatcaagccgaagcgaaagttggtggtggccaagtagatttagggaaaatgaaaccgacaaaagatggatgggggtataccgacatgggaaatagtttctcggcaattcctcaagatatcttatttatcaatcgttataaaaaagaaaatgatgcttatttaatcgtaacagactatcgtgccattaaagaacagtctagtggtcaaatttatgcatcaagtgttcaagcgctagttattaaaaataaaggcaaaaaaggtgaagaagagatgtatctcgaaagtattcgaaatgtatctgatactgaatttatcaacgattttactggagaattgtcaaacatttcaatggcaaaagtttttgaagctatcgataaagacaaggtgaaagaagtaagcaaagatgaaatcagtttctaatattgctttagagtacaccacaacaagcaatgaacaaaagcaacgtgaactattattgctattagtttcttacttcctaactctttatgatatggaaaaagaaaactttgctgatgaacttggtatttccagtgagtttgtagaagatgctcaaattaagtttgattacatgaagaaaattgaactgacattgcaaaatatgcgtgagactgtacagagtgaaaaagacaaagacagtgaagctctaactgctctatattttaatcgaattttaaatacagatggaaaaaaagctaaagaattagctcaaatcgaaactgcaaaacatttaactcgacttgatcgttctaagaaaattagaaagagatggaaagcattttcaggatgctgtgatgtgtgtagagcaatggatggagtaacagtagctcttgatgagccattcatgtatcaaggtcaagttgttgaattgagcagtggtgaacgttatatcaacaattacgcagcgatggacacgccaaatgctcatccaaacgataaatgctctattgaatttattatcgaataattgaaggggggtgtaaactatggcgaaaattaagttaccaatcgtaacaattaacgcaaaaggtggcgctcaatatgttgttgaaggcgtcgaagcagtaaatgcgttaactcaattagaaaattatcctgaacgtggtattcgtatcaaagttgatgggaaaatgacagtaattacagaaggttgtttatgttctgcagctgttactggagargttgaagtagatgttcctgaaatcgtttgtgaagaagtagagtgtgaaccaatttccaatattttaccaaatccaaaaaatccaactgatccaggggaaaattcaaaaccagaagaaaaagctggcgaaaaataaaactaggaagtgtcagtatgaaacaatttaaaaacaatttagagatgtttcgttacattgatgccattaataaagagcctagtagagaatttaaaattgagccattacgagaagagattattattgaacctatcgaagaagacgtagaatcaaaagctaataaaaaagctaaaaataagaagggggcgaaggaatgaactactttaaattagttgacggtattcgttcccctcagtctatcgatgtagtacgttcagaaaacggatataaaaaatttggttggatacgtgtccttccagatgaacgatatccgttgggagacgatgaagcatttattcaatcattagaaaatgctagtgttgaaaagctttactccgacaaattagttactgagctcgaaaataacggaattcaatttgaagtctttaacggcggatgttgtggcggaaaaatcaaaaaagtaagttataagatcatcgatattgttagagatgaggtgtaacatgtttgattttatcaagaaacgtgatgctcaaacgcaagcacgaaaacgtatgaaaaaggatttagacgaaattttcgaatttaataatgaagaaaaacagcaacatacattgaaccacattgttcaactagctaataatgatttgaaggaaattggctgggttcgattactggatgaaggaacagtattatacggtgatggaagtattcgaagttatataaaacgtggaactataaaagaattttatgactctttagaagatgattatattggctatatcaatattggacacattaattttgctacgttaccaatatttgttggtcagtggactaaaaatgatttgcgcttagtagatattggagaaaaccgtcaagcattagaagtcaatatgaaaattgatgaaagcttatctgttatccaagatttgcaaaaaatgccatatacaattggtatttcagccgaatttatggcaagttatgacgaagaattntcttacgaatatgaatttccagttattgaacatctttttatcatgggatttggcatcgttggagatgtaggtaatgtgaatagtagcggtataaatttatccgcagaggaggcagacaaaatggctttagcagatttatttggcaagaaaaaagaaaatgatcaagaaacgatcaaagaacctgaaactaaacaaacagaatcaaaagaagagcccaaagaacctgaagtggcaacaaaaaaatcagaggaacagaatgttgaagaaaatgacaaaaaagaatctgaagcggaactttccgaaaaagaagaccatacattcgaacaactttataatttatctatggagcaaaatgaaaaaatggttgttgagcttgaacagttacgtgctgaaaataaatctttaaaagaagaaaaattggaagcaagaacaaacaaatgaaaaagctgttcaacgcttggaaaaattgatgaatcgtattgaagtttcagcgctgccacaagcaactggatctactaaaaataaatggggggaataacagatggtattagaagttaatcaagccatcgttaatgaatcgttacaaacagagcaagttatggaacaactaagctctactgtagatgtcattgtcgataatatcgaaaaatatacaaatgctgctcgttatggtaaaggaaataattatgctttaaataacttgcgaacagcagttcaaaaccaatttcctttagttgattggttattaagcacaagcctatctcaaatgattgagaacgcttggcaaaatggctcattgccaactgtaactgatgaagatggaaatgtttatttaaaagcacctttaaatgtatttacgacaccaccaaaagatactaaaggtgaatgctgttggttaccttttgatattgcagcatgtgggggcaaagcaccaattaatattctatgtttaaaagattgtgtggatatgttaaatcacttattggaccgtaaattaaaagttcaatcgaatgatttaattggtttctttaagcaagcagggcagacttatgaagaagttcgtgatttcatgaatcgtgaaagtatggctttctatactgccaatacaattgttaatggacaactagatgttacaacacctatcttaaaaaaattccatggattaatggaaattttaaaacgcccagaagttttcaaaatgcaaggaacaaatattttagcagcatttgattctattggatatcgcatggacgttctaggtggatcattcatttttgcagctcatccattaactgtagcaagcattaaaaatgccattcgtcctaatcgttacggtattcttccagacggctggaccattaacggagaaagtattttctataaaggagcacaagttttacctgataaaactgtaccagttgatgttgaaaatggcacaggcgttatttggcaattgtctggtgaatccgtagtgtattcttggggacaactttgcgtcctgctgaagactatattattcgcaatcaatttacaacaacaaacgatgtaaataaaggatgcgcaacagaatgtgatatttattacaacttaggaagtgtagttacaaataatgtagctcgattagctgtaattacagatgttcctttggctgctggatcaacgcctactcattagctaatttattagatcgagtatatgtaganacattagctccctagaaagtaagtgcttaccttatggatgaaatcattgagcaactgaaagaattttgcgattgttttccttgtgatgtagaggacaacaagttagagaaaacagttaaagaagcaattcatttaataagtttattaacttgttggactcaacgtccttgcgaaacatttttaatgagtgagagacaagaagtatttgatatggacaattacttaccttgttcgtgtgatgatggaattatggaattagatttattctatgcaccatttgctttagcatcattccgagttttttctgtacatcgagaaggtgtaaaagaaatcattagagaattagatgaaaaagaatttggttatagcgttgtaaaagacaaattacttgttgatattcgaaactatgcaaatagggaaaacggatgttgtgtttgtaaaaaagaacaccagttgctagtcttatatgatgctggatttgaagagttacctcaatgtttattacaacttttctgcgatttaattcatgtaatttacaacaagaataactgtgattgtcatgcttgtgctacttgtcaagataattcagatagcggctttattgcaaatgaagcgatgacaacagatgagttagtagaaagctacctcaataaactagtaatagacagctaccgaaaacaattaggtcttattagcctttgtggtaaaagtctagaacagatttgggggattagagtatgaaagttcgatttttaggcgttcgtgaacacattagcgctacaggttgttcgtcctgtggagcgaaaaggtatgccagtggtttaaagacagaaaagacatttttcttaccaagcggaaaaagattagatgttgagtttaatcatgaatatgaaaccactgatacagacggaatgtttttgcttgaaagtgggcatttcgaggaagtgttttaaatggcactaaaaaagatagttattcaatcaattgaaaaagagatagataattatgcaaaaaaaatggaaaaaattataaaagaagaagctcacgttaaaacaggagcgttgagagattcgataacaatagaaaaggaaagtgacgggagtagattaataggagttgatgtcgcgaaactgaaatccgatcctcgcaatgttggaggcttagattactctattccttattacaaaggtcatagtggctacacgataaggccaagaaaggcaaaggctttgagttgggttggtaaagatggcaaacgtcattttgctaaaagtgtttatataccaccccacgcaggtgatccttttttgaagcgagctgtgttacgtagaccaaaattataggaggtatatcaaatggcgaaacgtgcaatgaatgcattagcagcagatggtgaaacgacttatcagttatcagctaaagactatacaatcggtgattctgaagtcacaggtgtgtatgataatgaaaaagctgtaactattaaattatttgtagacgacgtagcagtggatgagatcacacctgataattcaaaaaatatttatgctatttctacaagtaaaactactattgttaaagatagtaaagtggaagttgcagaatatgatgcagataagaatgaattaacaaaaattctagttactgtaattgacccaaatggaggaggaaatgagatggatgaaaaagaaaagattgataaattcatttcacgaaaattaacagtattaaatgaaaaagacggtattgtctatgaacagctagcaatccgagttattcaagttaatcaaaaataataggaggaattagacatgggaaaatgtaatacagagcaagttctttcaatgattggtgttaacaaattaacgaaggcacaggaactgtttttttcggttctacaggacaatgactcttgtgtaaaaattaaaaccagtgactacttggaaatcattggagacaaatcagcattcaataaatatttacgaccagaggatgcatttaattgcttagcagaaggatgtagaaacacaggtggattattaattacaggcaacgaatttccgttaggggctacctttaaaaaagttactgatgcgactgatttttatgctggtgcaaccactttttatttagatttgccaaaagatggaacatacactatcgaatttaaaattgcagcaattaatgacaatagttttgtaaatgctgatgtatatagaaaaaaattcactggaactaagggctataatcctatttttattgatttttcagtcgttcctgaagaagttttaggcgaaggttggcaagcaaatgaacgtggtgtttatgtgtcaattactgtgacaactgaagaagaaattccattaaaacaaattcatatttcttcgattagtttttacaactcaatcgaagaattacaaaatgatgaagttgtaacgattggatgtattacagaatacggtggagacatgactatggatgttgccgatagtgtatgttttggtgctaagtatgatccatcaagcgctagtattactcgtacattcacaggtggcaaaacaagcggaaactactggttacttaatccatttatgcgtcgaggggatttatcaaaagggtggacagttgttaaagagaaagataaagttcgtgaactcactattgacggccgacgttatgggtatatcttgttaaacggtttatcaaaacaagaatgctctttctctaaagctttagttgcaagtgaatgtaactttactgatgcagaattaactaaagtcaacctcccagatgtagcagtattaaacgaaaaacaataccaaattattaagcatggcgaatatgatggatatttaattgttcatgaacgtttgatcggacagccattgttatatgcataccctaaagaggtttctattgagcaatacgtcggtgaagatgacgcatatgaaggacgccgtgtacgtctattcttcccaactgttcagacagatggtgtgaaagtgaactatattttcaacaatgtattagttacttcattccctacgactttaagtaatacagatgaaactacatttgaatttgaagtatctattcaaaaggataacaatggtcgattctttgaagttcagaaaattattgaataattatttaagaaaaggggatttttgtaatgaaacaaagcgatttaacgaaaatgattacaaaaaatgatgtaattgatatgaaacataaaatggataaaactcaggatacaagtaagccatatgcagtaattgacaacgataatattgctgttgttggtgacgcaaacgagattcaaaaagttgaagaaaactatgtgatcaagtttcgtgttccaaaagaattctttgaagaattccgtatggagcaactactgtagataaatatgttattttcgaagttgaatacagtaatgcaagtgtaacaggtatgaatgatttaaaaattgtagatgcacttttgaacattcaaccatttttgaaggagttttaccaaaagacgaagacggcaaagtaactattgkggaaaagacagatcgagaagtycttaaaatgttatcaacatcagaggacgaagttatttatgggttttataaagtggtggcagctttcttaggtgtagatgaagagttaatcgaatacatgcttccattttcagtgattg

SEQ ID NO: 307 - DNA, 4888 bp; double-stranded, linear
agtgtttttcatcgagaaagttaaaaaagtttttttgttataaataacatactgtttatttaaagtggtgtataccactnaattgagcattttaaataaaaaaataaaaaagggtatacaaatgcaatcgtttgcgctaaaatgtgntcgagtattagaaaatacacgaaaagcgacaattaaaggagaganttaaatgaacactgctgcaatctaccatcgtccagaaagtgactttgcttatcttgtatacagaagaaaccatgcatattcgtttgcgtacggcaaaaggcgacattgcctctgtccaattagtgcaaggagatccttatcttttagggaaagaaaagtggtaccaacagtcgttaaccatggagaagttagtatctacggagttatatgattactggtttattgcattaagtgcaaaatttaaacgcctttcatatgcttttactttagtaggggcggatggtttgagggcgttttatggcgaacacggcatttatcctttagaagaaaagtatttagagatggcgaataattattttcggatgccgtattttcatgaaatcgatcgttttaaagcacctgaatgggtaaaagaaacggtttggtatcaaatatttccagagcgttttgcaaatggtgatctcgccaatgatcctgaagggacgttgccgtggggatctaaaagaccagatcgacaagatttttttggtggggatttgcaaggggtgctagatcatcttgattacattgaagatttaggtgttaacggcttatatttttgcccaatttttgaagcgttttctaatcacaaatatgatacgattgattatttaaaaattgacccagcttttggtgatggtgctacctttaagcgtttagtcgaagagtgtcatcgacggggcatcaagattatgttggacgccgtttttaaccatatgggggacacttcgcctcaatggcaagatgtgttaaaaaatggccaggactcaatttatgccgattggttccacgtaaatgagtttccagctagctatgaagaaagtgctgattttgaagaagcaagcaacattacctatgatacttttgcattcactccgcatatgcctaaattaaatacagcaaatccagaagtgcaagcctatcttttagaaattgctcgttattggattgaggaatatgatattgacgcctggcgtttagatgtggcaaacgaagggnatcatgcgttctggaaaaaattccggcaaacatgtgatgacgcaaaagaagatttttatattttaggagaaatttggcactcgtcgcaaagctggctccaaggagacgaatttcatgcagtgatgaattatgcatacacagatgcgattatgggctactttgtcaagcaagaactgtccttggaaaagatgctttctgaaatgaacaaccagttaatgctctatcgacaacaaacgaatcaaatgcagtttaatgttttagattcccacgatacaccacgcttattgcatgaaacgaaagaggataaagagctgatgcgccaagtattagcgtttacgtatattcaaccaggtgtcccttgtctttactatggtgatgaaattggtatgacaggtgatatggatcctgattgtcgtcgttgtatggtttgggaggaaaatcagcaagatttggatttgaaggaatttgtaaaatcattgattgcccttcgcaaaaagtatgcggctgttttttctggtggaacaatcgattggacaggaacttcttttgaaacggggttgattagactcgcttgtcgtttggaggaacagacgatttatgggatttttaatactggccaagagacacaatttgtcgatagaactgatcgagaagttttgctaagttcttctatcgaaattgcttcagaacagataatggttttaccaaaaggttttcttttatatcaagcataataattaagcaaaggaatgtgaagaagaatggaaaaacattggtggcaagaagtcgtggtttatcagatttatcctcgcagttttaaggatrgcaatggagatggcattggagatttaccaggaattattgaaaaattggattatttggaaacgttaggcattggggctatttggttatcaccagtttatcaatcacccaatgatgacaatggttatgacatttctgattatgaagcgattatgacagagtttgggacgatggcggatatggatcgtctaattgaggaagcgaaaaagcgaaagattgaaattattatggacttagtggttaaccatacgtcagatgaacatcgttggtttattgaagcgaaaaaaagcaaggagaacccctaccgagactattatgtatgggctgatcctgcttcagatggcggtgcgcctaaccgattgaaatctgccttttcgggttcggcgtggacgtttgatgaagcgagtgggcaatactatttgcatttgtttagtaaaaaacaaccagatttaaattggggaaaccaacaaatgcgtcagtcggtttacgagatgatgaatttttggattgataaaggaattggcggtttccgtttagatgtaattgacttagtgggtaaaattccaggagaagagatcaccgcgaatgggcctcatttacatcgttatttacaagaaatgaacgccgcgacatttggcggcaaagagctgttaactgtaggtgaaacatggggggccacacctgagattgcaaaaatgtactctagtccagagcgtcatgaattatctatgatttttcagtttgaacatatgagcttggatcaacaaccaggtaaagaaaaatgggaccttcagccaatggaagttgccaagttgaaacaggtttttgcaaaatggcaaacagaattaggaaatgatggctggaattctttattttggaataaccatgatttaccgagaatgatttcacgttggggaaatgatcaggaatattggttggaaagtagtaagttattcgctattttactgcacatgatgaaaggcacaccttatatttatcaaggggaagaaattggtatgaccaatacgccgattacagatattcgtgaagcgcgggacatcgaaacgattaacatgtaccatgagtatctagaaaaaggatattctaaagaagaaattttgctgaaaattaatactaaaggtcgtgataatgcacgccggcctatgcagtggaccgctgaaaaaaatgcgggctttacgactggtacaccttggattgatgttaatcccaattatcaaacgattaacgtcgctgctgctttggcagataaaaattcactattctatacgtaccaagaaatgattcgtttgagaaaagaacatcctttaatcgtttggggcaactttgaattgctggaaacagtggaggaagtgatcagtttttatcgtacctatggtgaggaacgctggcttgttgtaacgaacttttctgacaaagttcagccattttctgcagacgtttctgtagaacaagtaatgattgaaaatatgccgacagatgtcactgctttagcagactattcgttagcgccttggcaagcatttgttgtgaaagtgagtcaataagatggaccaatggtggaaaaatgctgtcggttatcaaatttatcctcggagttttaaagatagcaacggggatggcattggtgatttgcagggaattattgagaaattaccgtatttaaaagaactaggggtcgattttttatggttaaatccgatttacacttcgccaaacgttgacaatggttatgatattgcggattatcaagggattcagccagagtttggtacgatggaagattttcaagaacttttggaccaacgcatcaattaggtttgaagattattcttgatttagtggtcaatcataccagtgatcaacatccgtggtttgttgaagcgaaaaaaagtttagataatccgtatcgtgagtattatttatgggccgatgcgacaccagatcgtatgccgaatgaatggcaaagcttttttggtggctcgacttggacgtatgacgaaggtacaaagcaagcatattttcatgtgtttgcaaaagagcaacctgatttgaactggaaaaatcctaaagttcgtgaagagatttatgcgatgattcgctggtggttagatttgggaattgatggtttccgattggatgcgattagtcatatccaaaaagaaccttgggattttaaaattaccacgaatccgtgggctccatttatgaatgtaaaaggcattgaagactatatgctggatttgaaagttatttttgctgagtatgacatcatgacagtgggggaagctagtggcgtttcaagtaaaaaagcggtggaatggaccaatgatgcgggctatctgaatatgatttttgaattagagcacaatgttcgagaaggaaagccaggagaagaacggttaaatattttaggctataaaaaagtaatggctcgctggcaaaagcatttagggacagaaggctggaatgcattatatgtagaaaatcatgataatcccagaatcaattcaattttaggcaatgaaacctctcattctgctaaggcgattggaacaatcgccttgctcttgcgaggaacaccgtttatttatcaaggacaggaaatcggcatggttaattatccgtttcaacagattgacgagttagatgctaaagattctcataaccattatcgtttgcttatmgaaagtggctacgatgcgaacaagcattamamgaagtggcgcattggacgcgggacccattcgcgtaygcctatgcagtggacgagtcaagaggcaagttcattcacctcggggcatccgtggttagcaat

SEQ ID NO: 308 - DNA, 2406 bp; double-stranded, linear
agaagtcaaaattcgaacattgtaatcaaatgctgacatatttttgagtatagcccgcccaaattgtaaaaacattgtctacgaaagtataatacatattttcttgtagtaaggtatagcctttttcccactcggcttgtaaaacaatcgattttaaagtagtaccttcttttttaattaataaagatactaataaactatcatgaattatttttgtattgtcacccatataaacgaaatcaatcactccgctggcattgcttgtatcgttatctgcaataataattgaaaacatttcaattgccgtcccattcccctgggtcttctcttgtccaaaaattactttacctccamgctcttgaatatgaacattcggaataataaaggtttttttcatcccaaaatcnttataaatatttkgatatatttctagattgtattgtaaaatattttggattcgtgtgatacgctctacttgttctggatcattagaatatttttcttttttcactaagtctagccctaattgttggatgtatttctcttttaattcttgatagaaacgttctttaaatgcttgatcaacacgattcatatcaaaaataaaccagtttaatgtattaataatttttaaccgatatgcttcaattcgatttggagcatgttgttttaagtactccaacattttgtcatgtaaattgaactcatcacgataattcattccatacgtagacatcaagccatcttgtctaacgattcgtgtcagcaaatatttgtttagtgcaacaattttttcggtacctaataatgctgtataagtgaaataagcatcctcgccaacaaattgttctaagtttaccaagttattttctttgatgtattctaataaaaataatttatcatataaataaggggttacttcatccaatgaaatttcttcaccagacatacgtccgccattagttagtaatggattgtgaacaacgtgcacttctccatttggtaacttttctttcatgccaaataacagaatatctgttgcactatcatatgcacgataataagcgtcttgtaataaattcgcttcaaaatgatcatctgcatccagaaattgcaaataccgtcctcgtgccatcgaaatgcccacatttcttgcgtgtccaggattacttttgccaatagaaatccccgtaattctcggatcttttactgcaaattcgttaataatatccatggtattatctgtagagccattctctactaaaatgatttcaatctcacgtaaagactgctcacaaacagtttctaatgtttgtcttaaatattttgaagcattgtgaatcggcatgacaacactaactttatacagatttttcaagtagtcctcataataagctgctgggatcattgcaatttgataaaattgtttgatgtattccaaaatcgatatcatncagctggtctgtttctaaagcttgtctaaaatctactgccccttttgaatcacttcataaaccgactcatcacgtaaatgggttaatttttcaatcgcccaaaagtatttttcgaacatttgtttataaaaataacctttgtagcgttcaaatttatttkgttcaattaaatttgaacmaattagtttaaattgttgaaacaagaaaggamcctttgttgccacattatttactgtcgaatttgggttgtcttgtctataaaaatacawacatctttaataaaaataacattctgagatgctgaattgattttccaaaatagaccagtgtccccataacttttaatttcctcatcccaagttacgttttctttctcaatcatactttttttataaatggcattccatggataaacttgtacaattaaatccgtcgtttttaagtcaatcaattgattgtatttatcgggatattgccataatatatctcgctcaacctcttcttcagaagaaaattcaacccaattacaacggacaacatctgcatgatgacttttagccgtattgtataaacgctcataggcatgcaatgctacataatcgtcactttcaaattcagcaatatactcaccttttgcttctgaaacacccaagttaaaggcttttccaattcccccatttttaacattgaaaacgcgaaaacgtggatcatcttgtgcaatttcttcaataattttttgactattatcagtagagccatcattaataattaagaattcaatttctttcaatgtttggkttttcaaactcattaatgcctccnccaaatagggttccacgttaataggacnggnacaatngactggacactttcaccatttttcccataaaaccaatttccccccacttaaccattaaaagtgggaaaccccaaaataaccccggatttaaac

SEQ ID NO: 309 - DNA, 9179 bp; double-stranded, linear
ttttgattggtgcctgtttcggttcttttttatgcttagtggcggacgcttaccagtagggcgttctttgtggtggcccccttcccactgtcaaggttgccaccagcctctacaactctatgaattaattccagttgtttcgattttgctgcagcgctttcgttgtcgaaagtgtcaacagccagtagctaagtgttatcttttagcagaacttgtcatgggcgggttaaccgcaagctgtttttttgctggcctgacgattgatgctttgattctctggtggtggctgacgagcgctttcacattatccttgattgattactggtatttagtggttgaaccgaagattctttatcctagtttttttgtgctttgcttgctgaaaattgcgggtcagcattcgttttacttactgactggtcttttttgtttttgttttttccaagccgtcttacattattttccggaagccatgggacgaggggatcttttgttactgggtttgtggggctgttttttacaggtacctcagttgctgatgctactattttttgccagtagttatggcctaatctatggctacagctgtaaatttttggggtatccagttgaacagacacttccctttgtcccctttttaagtttgggcttactcacaatcagttggttatagcaaataaaaaaagccgtaaggagcatgctccttasggntttttagggtttatttattgatgtttttcatcgcatcttcagcagccatttgtgcttcaatatctgaaatactataaacgttttcgctagctacgccaacttcttttggttccatgttacggtaacgagccataccagtaccagctgggatgattttaccaatgataacattttctttcaatccaagtaatggatcttttttgccacggatagcagcatctgttaacacgcgtgttgtttcttggaaggatgcagcagataagaagctgtttgtttccaatgacgctttggtaataccaagtaagactggacgactagtagcagggacgccaccagcaactaatgtgtcgtagttacggtctttaaattctgcgatgtccattaatgttcctggaagatttcagtgtcacctggatccattacgcggattttacgtaacatttgacgaaccattacttcgatatgtttgtcgccgatttctaccccttgcatacggtaaacacgttgtacttcacgtaataggtagttttcaacagataaaacatcacgaacttgtaataattgttttggatcgattgaaccttctgtcaacggtgcaccacggtggatgatgtcgccttcagcaactttcatacgtgcagtgtaagggacagtataggtacgtgtatctgtttttcctttgatggttacttctttttgacgtgtggcaggatcttcagaaatatcgataacttcaccggttacttctgtaatcactgcttgccctttcggattacgtgcttcaaagatttcttggatacgaggtaaaccttgagtgatatcgtcaccggcaaccccgccggtatggaacgtacgcatggttaactgtgtaccaggttccccgattgattgagcggcgattgtaccaactgcttctccgacttcaacgtcagaaccagttgcaaggttacgtccgtaacagtgcttacatacaccatgttttgtgttacatgtaaagacagaacggatggttactttttcaataccagcgtccacgatttctctggcaagatcttcagtgattaattgatccgcaccaatgatgattgcaccagtttctggatgaacaactgatttacgtgtataacgacctaatagacgttcgtctaatggttcgataatttcgttaccttcacgaattgcttcgatttcaagaccacggtcagtgccacagtcgtcttcacgaatgattacgtcttgggcaacgtcaactaaacgacgtgttaagtaacctgaatcggctgtcttcaaggccgtatcggtcatccctttacgagccccgtgagttgagataaacatttctaagacagaaagtccttcacggaagtttgagatgattggtaattccatgattcgtccattcggagcggccatcaaaccacgcataccagctaactgtgtaaagttggagatgttaccacgggctccagagtcagacatcatgaagattgggttacgagcttccatactttcgatcagtttttgttggatttcgtctttggcaccgttccaaacgccgattacacgttcataacgttcgtcatcagtaattaaaccacgacggaattgtttagtaattgtttcaacttgtttgtgggcagcatcaatgattgcttgtttttcatgaagaaccatgatatcggcaatccctactgtcatcccagcataagttgagtgtttgtaacctaagtctttcatgcggtcaagcattttagaggtttccgtaatgtggaatctcttgaagacttcagcaatgatatttccaagatttttcttcttgaatggtaaaactaattcttgctctttaatgtgtgcaggaatgtctgtaccagcttctacgaagtatttatctggtgtttgaacagttaagttatagtctgttggttcgttcaagtaagggaactcaacaggcatgatttcgttaaagatgatcttaccaactgtggtgattaagattcgttctttttgccaatcagtaaatggtttgtcacctaaaagtgttgtttgaaccccaatccgtgagtgtaaatgcacgtagccattttgccatgctaaaacagcttcgttcatgtcgcggaagatcatgccttccccttcacggccttcttcttccattgttaggtagtagttacctaagaccatatcttgagatggtgtaacaactggtttaccatctttcgggttcaagatattttgggcagcaagcattaacatacgagcttctgcttgtgcttcttcatttagaggcacgtgaaccgccatttggtctccatcgaaatcggcattgtaggcttcacatactaatgggtgaagacgaatcgcacgaccttcaacaagaacaggttcgaaagcttggattcctaatctatgcaacgtaggtgcccggttaagtaaaactgggtgttcttggataacttcttctaagatatcccaaacttcatcttcgccacgttcgattttacgtttcgcatttttaatgtttgtcgcaatttcacgttgtactaattcacgcattacaaatggtttgaataattcaatcgccatttcttttggtaaaccacattggtacatttttaagaacggaccaacgacgattacggaacgaccagaatagtcaacacgtttacctagtaagttttgacggaaacgaccttgtttccctttcaacatgtgagaaagagatttcaatggacggttacctggtccagtaactggacggccacgacgaccattatcgattaaagcatcgaccgcttcttgtaacatccgtttttcgttttgaacaatgatgcttggcgcatttaagtctaataaacgttttagacggttgttacggttgataacacggcggtataagtcgtttaagtcacttgttgcaaaacgaccaccttccaattgaaccatcggacgtaaatctggtggaataactgggataacatccattaccatccagcttggttggttaccagaagcacggaaggcttctaagatgtctaaacgacggatggcacgtgtccgtttttgaccagaagctgtttttaattcttcttttaattgcgcaacttcgccatctaaatcgacgttatctaataattgtttcacggcttcggcacccatagcagctttgaaggcttggccatattgttcacgtttttcacgatattcgcgttccgttaacaattgttttttctctaatgttgtgtcacctggttcgatgacaacgtatgaagcaaaataaatgacttcttccaatgcacgagggctcatgtctaaaacaagacccatccgagatggaattcctttaaagtaccagatatgtgaaactggtgcggctaattcaatatgtcccatacgttcacgacgtacttttgaacgagtgacttcaacgccacaacggtcacagacaatacctttataacggatacgtttatatttaccacaagcacattcccagtctttggttggaccaaaaatgcgttcacagaataacccttcacgttcgggttttaatgtacggtagttaattgtttcgggttttttaacttccccataagaccaacttctgatcttttctggtgaagcaagccctatttgcatactttcgaatttatttacatcgatcaaaaggaattccctccatttccttatttagagaagctgagtcagcaacttgttagcaaatggcaagcatcacttgaaagaaggtctgacgacacttggaacaagtaatggcttgcgcagttgcaacaaagtcgcagttgaatcaactcatcagagtggtagcgacaaattagtctctgtcttcggctgtttcaatttcttgaacaacgtcttgtgcttcttctttcacgactgattctgcttctttttccagctgtttcgctgattgttgttccgcaaatttggttagtgcgtcaacggtgattaaatcatcatcgtcatcgtccatatcgcgtaactcaatctcagcttcctcaatgtccaagacacgcatgtctaaaccaagtgattgtaattctttcactaatactcggaatgattcaggcacacctggttttggaattggttcacctttaacgatggcttcgtatgttttcacacgtccgacaacgtcatcagatttgtaagttaagatttcttgtaatgtgtaagcagcaccgtaagcttccagtgcccaaacttccatttccccgaaacgttgtccaccgaattgagctttaccacccaacggttgttgcgtaacaagagagtaaggtccgattgaacgagcatgcaatttgtcatcaaccatgtgggctaatttaatcatatacatgacaccaacggaaatacggttatcaaatggttcacctgtacgtccatcgtaaagaactgttttagcatcgctagccataccagcttcacgaacagtttcccaaacgtcttcatcggttgccccatcgaaaacaggtgttgcgacgtgaatgcctaattggcgagcagccatacctaagtgtaattcaagtacttgtccgatattcatacgagaaggtacccctaatgggttcaacatgatatcaacaggtgttccgtcaggtaagaatggcatatcttcttccggcataatacgggaaacaacccctttatttccgtgacgtcccgccattttatctccttcgtgaattttacgtttttgaacgatatagacacgaactaacatgttgacacctggtgataattcatcgccagcttcacgagtaaagattttcacatcgtgaacgataccgccgccaccgtgaggtacacggagagacgtgtcacgaacttcgcgggctttttccccgaagattgcgtgtaataaacgttcttctgcagataattctgtgacccctttaggtgtgactttaccaactagtaagtcgccatcttgaacttcagcaccaatgcggataatccccatttcgtctaagtctttcaatgcgtcttccccaacgtttggaatttcacgggtaatttcttcaggtcctaattttgtatcacgtgcttctgattcatattcttcaatatgcacagaagtgtaaacatcgtctttaactaaacgacggctcatgataatggcatcctcgtagttgtaaccttcccatgtcatgaaggcaactaagacgttttgccctaaagccatttcgccttcttccatagaaggtccatccgctaaagtatcgcctttttcaactttttcacctaagtgaacaattgggcgttggttgtagcttgttcctgaatttgaacgacggaatttagtaaccatatatttgtctaatgcgccattgtcgcgacgaacgcgaatttcttttgcatcgacgaattctacgacaccgtcatgtttacatagtaaagcagcacctgagtcatgggctgatttatattccatccctgtacctacccacggagagcgtggttgaattaacggcaccgcttgacgctgcatgttggcacccatcaaggcacggttggagtcatcgttttctaagaaaggaatacatgctgttgcgactgcgactacttgttttggtgaaacgtccatgtagtcaactttgtctacggcaacttctaagttttcactttgtagacgcgccataacaacatcattggcaaatgtgccatcttcatttaaaagtgagttcgcttgcgctacgatataatggtcttcgatgtctgctgttaagtaatctacttgatcagtaacacggcctgtcgcacgatcaacacggcgataaggcgtttcgatgaaaccaaatttattcacttttgcgtaactagataaactattgatcaacccgatatttggtccctcaggcgtttcaattggacacatacgaccatagtgagagtagtgaacgtcacgaacttcataaccggcacggtcacgagtcaaaccaccaggccctaaggctgatagacgacgtttatgggttaactcacctaatgggtttgtttggtccatgaactgtgataactgtgaagaaccaaagaattctttgatacttgctaccactggacggatgttgattaattgttgtggtgtcaatgtttctgtgtcttgaatagacattctttcacgaaccacacgttccatacgggctaagccaatacggaattggttttgtaataattcacctactgaacggatacgacgattacctaagtggtcgatgtcatcgacattgccgatatcttccattaagttgaagaagtagctcattgaagcaacgatatctgctggacgaactgtttttacgctgtcgtctggatagccgttaccaatcacatttacgatacgttcaggatcttttggtgaaagaacttgaatcacttggattgtcattggttcagttactacagcatcttcacttggatagtaagttacgctgtttaagccgttgtcaatgtattcgcctaatgtttccatgatttggtgtgttaaaaccgtgcctttttcgacaatgatttcaccagtttctggatcaactagcgtttccgctaaggttaagtttaatagacgtgtttttaagtctaattttttgttaactttgtagcgaccaacgtttgccaaatcataacgttttggatcaaagaaacgtgcagttaacaagctacgtgagctatctgctgtttttggttcgcctgggcgaagacgttcataaatgtctttcaagccttcttctgtacgagaatcacttgcatttttgtgtaaatctttttcaattgtgttgcgtaagctttcgctgtcgccgaaaatttcgaagatggtatcatctgaaccgaaacctaaagcacgaactaacacagttaaaggaattttacgtgtgcggtcaatccgaacataagaaatgtctttcgcatctgtttccatttctaaccatgcaccacggttaggaatgactgttgagccaaaaccttctttgccgtttttgtccacttttccatggaaataaacacctggagaacgaactaattgggaaacgataacacgttctgccccgttgatgatgaaggtacccatttctgtcattaatgggaaatcgccgaagaatacttcttgggatttaatttcacctgtttcacggttggttaaacgtaatgttacatgtaatggcgcagaatagttggcatcatgtgcgcgggcttcttctactgtgtactttggttcttttaattcatagtcaacaaattctaaggataagtttccttggaaatcatcaattggtaaaatgtcttcaaacatttcacgaagtccctcatctaaaaaccattgataagagtctgtttggatttcaattaaatttggtaattccaatacttcactgatacgtgcgaaacttctacgttcgcgatgctttccgtattttactacgtgtccagccaagctcttcacccctctagttataagtctatcaaaacaccgatccgaaaaattacatttacgttacatatattaaatatatgtaacaaaaagcattttttgcagtttttaagcaaaaaaaaaccaaaaatagaacatgcttccgaaaaattttctggcgtttctacttttgttttcctataaaaaaccggaacggacaatatttcgctcctgcttcgtcactttcagatagtttttgctctatagattctactacctttgtctagaaaagtcaagggtttctttaaggttttctttttcataaaaaggagtttttttgtaaagggttttaatgaaaaaatgcgtaataaataattacgcattttcccctatcttcctcttcacacaaaaaaacgaatgcaaagatgcattcgtttttgactaaccgccacctaataaaaagtctaggacattcatgccgccgcttgtttggctgcggtaaagttcggtgtagccgcattgggtacagctaattgtaataaattttttatttkgamcatcaaaaattttcgcaaagttcccacctgttgcttgaaattggtccgacacatagtgcatgttgccacatttctcacaaacatattgttgcttttccattcccctcactccttctcaataaaacaagtatagcaaacgcctgcttcattttcctccatcctaagatggattttttcactagttgaccaagccttttcctttccgctacaataagcataacgaatcggaggaaaaaatatgtcgacaaaaagccaagtcctaactttattgatgaaacaaacgcccgcattcctttcgggctgtctcttgatcagatcttgatcccctgcgccatcagatccttggcggcaagaaagccatccagtttactttgcagggcttcccaaccttcccagagggcgccccagctggcaattccggttcgcttgctggtccataaaacggcccagtctaagnatngccatgtaagccatgcnagtaactgcttccc

SEQ ID NO: 310 - DNA, 4289 bp; double-stranded, linear
cataagtcgaaacgacttatgccccacttccgttttttttattccttcaatgaattttgaaacgtgctgattttttcagccaatctttgataagtcgtaaaagacggatgctgtagctcttgttcttcgttaacggataaagtttgttgtgtcgtaatggcctttgttagtgcatctacaaaatgaataaaagaattgttggtttgtttattgtatcctggtgaataatatttcgattgacgataaaaaggccgcaggctgtttctgtgattttttcctgttcatctgaaaagtattcatcatagctgacatgttttattttctgctcttctgttatcacttgaagtcgagcgattaggccattgcctaaatcttctgcgtaaccgatatacgtttctttcgatggctcttttagccaagtgtccatctctgctgctaaaggcattaatccttcacgcgcagaagttgatgaaccgcgtaccgtataaaaattacctgtaacacgattttcgtcacgcatttgtttttctacataagtaataccattaacaacggtgactaacgtatcgtctgtacgcgtgttgcttgcttgaaattcaggataatccgacaggcgtttgttgacacccgaatagcgtgtatcataataaggatcactagcaaactctgtaaactcaacattcagaatcctttgcgtttcaggttccgtaataatctctacaatgccgtaatttccgccagtaaatacaccttcatttttataatagttacccgtcattaatcccaaaggcggttgattggaccaaaacatttttttctttttttcttccggtgtatattttgctggtggggttgttccaaatgtcgtttgtgtggcccctgtaaccacttcgtacgtgtattcatgagaatcaaaagtcaattgattagcaatcagttcgtcatttttagtcggcgcttgtttttccaccgcagaagtcgtttgattggtgacggtaacttgcttcacttgctttgtctcttgcggaccacttgttgtttgtttcgttggctcttgatctggcgcacaaccaaccaaaataaataatccgataaaaaccaacattcctttaatatgtttcattcacttctctcctttttataaacgcttaatttcctcttatctccagtgtagcaaacatttataaaccaaaactgacggaaaaatgaataaataataaacaaaaacgctaagtctcctgcagcttaagagacttagcgtttttttatttaattgcttggcgcttttggcgcaaccactcttctttaatgtgttcagataggcgaatcattcgtttaccaacttcactatattggttagtagctaaattggctaaagaaattcgaactgaccatttgtcactcccgaaagcatccgcttttaaaagcattaattttyctttttctgctaacgaagttaatacttttgtgatcgtccacgatttcgttaaataacttgaaaattctgggccataacgtttttctgtccaatctctaaagttaatttcacaatagtatgctgtatttaaacttgctaaaggctcttcaatgcctaaggtgcggaacaagagcttttcacgcgtatgacaaatatccatcacttcgtctttatatgcttgaccgtcttttaacaaagcatacaaactaaataaagccatcattgcttgctgaatagaagaaagtcccgctgcatggttcaacgcaatatcgcggctgtctgcgactaagcggctgataaagttaatttggcttgtgtctgcattcaatgtagcataacgtgcctgtaattccatttttcgagccactggcaattcttttaataattgatcaaagatgttctcttgactgaccgcaatagtccccacacgccaaccggtagcgccaaagtatttagaataagaatagatacaggctgtattgtaaggtaactccgtaaatagtgaacggaaagctggcacaaaggttccgtaaacgtcatctgttaaaatcattaacttagggttatccactgcagagatttgtttgatttgttcaatggtaggttttcccatagcattagcagttggattgctgggatttacgacaaaaaccgctttgatggacgggtcttttagtttatcaatttccttgtttgagtattgatacgtcgtttttccatcaatgatcatttgctctgctttgattttaaccacgtcaaagtcataacgtggtagttctggaatttctaaataaggagcaaacgttggtaataacaacgcaatacgatcacctttttctagtaaataattatttgccaacgtatcaaacaagtaacaaatccctgctgtaccaccctcaacggcaaaaatatcaaacggttgtgcttcgctggaaaataattcttgatttaaatatgctttaatcggttgttcacacgccttcaagcaacgaacaggattcggataattatccccaatcacatagtctaacatggcatctaaccacatttccttatccatcccaaaatagttatgctctgctgtccaaatttcttgtaagaaggttgcccctttgcttggattttctgctaaaaagtttaagaagcgttgcgttctaccaaaacttggctgaatcataccagccgtttgttcgctcccctctcttaacgtttcttttgtagcaaattgacctaataaaaaaaaggcttcccttggtgttggcgccgtccaattaggattgcctcgccctgcatttaacaatgtttctaaattatgattttcttcatgtaatttcttctctaaaaatagacttaattcaaacggactaaggttttctgtcaattcatcacttgttatcattttatcctcctgaagcacacacagtcatttagtatttagtatgtagtctatactactcttctacctccagatgtcaaccatttaagcggaatattctgacaattaataaaaaagaaacaatcctttataaaaaataaaggattgtttcttttttgctgattaaccaaagaaccgttgcatctcaatttttgctgattgaacagaatcagaagcatggattaaatttttggtgacagacaacccataatccgctcgtaaggtgccactttcagcatctaacggattcgttgctccaactaatttacgcacttttttaaccacattgtcccctacaacgaccatcacaaccactgggccacttgtcatataggctaataattcagggaaaaatagttcatcttttaaatgctcataatgttccttcactgtttctactgttagtcgttcgaatttaaggtgcaataagtcaatacctttatcttcaaaacgttgaatgattttgccaactaactttcgttcaacgccatctggcttaataattactaaacttgtttccttcattttttccatccctttcaaaacttccttttgccctttcccaaggggtagctacagaataaaatgaaagcggatactttgtcaatgataaattttcttttccttttgattaaataaaaaattaaagattattcacaagatttgtgaattgttctttcagttctgtattgcttgtttcttttaaaaacaaataaggttgctcctctactggctgttctttactcacataaactttagcttcaccattcactaaagtaaataaatagacatgcttctgggcaacttgtgtcgcactgtcagagtatactgccaccagacaataacccccttcgctgcctgtttctgaccaatttaaccaaatgggattgttcccaatagctggttgtattttaggttcataactcaataaatcatcaggcacttgaatcgtgtaaaaagctacagagtgacctggttggtacgcttgatagttctgattgcgttcttgaccccaggtttccatgtattgtcctaactgttttgctttttgctgattccaaatcgtcccttcttctgtaactaattcagttaattcttgtgtttgcgttgtttgctctaattccaacgccgtggtttgactaacttcggttgctgaaattgctcttgtttcttcagtatttacattgtttgtttgtacggtttgtactttctgtgattcctctttcgatttttgccaaccacagctagataaaacgcttccaacaaccgctatcataataatcccgtttagtttcattccttaaactcctgtttttatttttattcnatcgaaataaacctaaaatctcaatccctttctttgaatagtnaaaacca

SEQ ID NO: 311 - DNA, 7925 bp; double-stranded, linear
agctcggtacccccaattattatttaaaagctatattgaatatagcttttaaataataataactgaatgaaaaaaaactgtccaataatatatagaaatttctgaaaaatcatttktaatgtaaattattttaataaaattaataagaaaggaaaaaaatatgcaactagaatatccattaacgaatcatatgaaaagaaacatggttttaactaaagaaaatcaagtgattgcgtattatcgtattcggtcagaaacagttggcttaacagattttgagaaaaaaaggaaaacaaagaaaaaagtagctcgaacgttgaaacgtttacaagagaatgagggttttgaaattgttcttttacctgtgaatgcggatattcgagggaaaatgggaggtatgcgccaattagtggacaaagaaaatcatagtgtagcggtggataagttgatgaaaactgctcagtatcttgaaaatgaaattggcatggtctatgagtatatttggttaattggcgtgcctttagtaaagaaagagcggtcaattgatattaaagaaacattttctacggcgttaaataatctatctgaaaaagtggttaaaggacttggtttagaagtaggagtagcggaggattgggaagaagcttataaagaccaagaacaagaagtatatcagaatttgtcagaattgttagtggaacgattgacagaagacgagttgtattactaccaagcctatcaatttttaaataatattcaacatgagaaaaaagaacttttgactagtcagaacttagataatttactagcgaacaaaatcactccttttcgaggtgggttagaattgtctaatgagtttgggaaaagttatattgctcatttaccattgggggattgtggggtcacgattgatggtaatcacttgctagaactggttcaaaaaatgtcttatcctgtttctgtgaagttacaggctggttttgctgaaacaaaaggccaattagcgttatcaggacgttctgctcgtgcgagaacacgaacaaagaatatcatggaagaagcacatttagcaggttcaaaacaaaaaagaaaaattgttgaggggcaacattcacttgatgatttagatcaaaaaattgatgatgatattccgattattgattggaaagcagtattagtgattagtgggaattcaaaaaaacaattacgtgagcgaaagaaaaatttgatgaatcgactagatagcttaggaattccgttaatccgtgcaacgtttgataatgtctatctttttcaagcaacgttattaggcaactttcaacgtttttcaaccagtaattggcaacatacgtcgacgttagaaacattttcagagttgaatttctttacttcgttacacgcaggtacaaagacagggttttatttgggacgtgtggacgccacgttagaagaaaaagaaagtcggaaacaaattgtttctggctctaaaaatattgtctatatgaatctattgcttgcaaacaaacagaatattgaaggaaagaaaacaaataatccccattggttggtatcgggagatacaggtaacgggaaatcagtattttctaaatggttatttttgtattcttctctattagatgtgaaagtgttatacattgatccaaaaaaagaagttcgccaacagtttatgcgaacgattaatgatccagaatatcaaagaaaatacccacttgatgtggcatttattaagacgtttaattttgtgacacttgatgttcgtaaaaaagaaaaccatggggtacttgatccaattgtattatttgatgaaacagaagcaatcgcaacggcaaaagctatgttaaataatattaacgaggataagtggaaaatgccacataagacggcgattaatgaaacagtagcagaagtggtggctgaacggaaagcaggcaaacaagttggattttggcatgtaattgaacgtttaattagtcattcagagaaagacgttcatgaaatgggtcgttttttattatctacgattaaaggatcgattttagagttagccttttctcatggtgaagtagaaggactttcttttgagaagaaagtgaccattttagaaattgaagatttagatttacccacagatcggcacgatgaattagacgagaatcaacggttatctgtgactttaatgtttgcattaggcacgttttgttcaaaatttgggtcacgcaatcggaaagaagaaacagtcactttctttgatgaagcgtggatttttcaatcgtcaccagaaggacaaaagattctaaaatcgatgaaacggatcggacgttcgtttaataattttatggtattaattacgcaatcggtcaacgatgtgttagataatggcgatggtacaggctttggaacggtggtttgtttcgatgaagtggataatcgagaagggattttacgttatttaaaattaccagtcaatgagattaatttaaaatgggtatcgaatatgattcaaggacaatgtctcatgaaagatatgtttaaccaagtgaatcgaatcgtgatagacgttatttttgaagaatggttagaactctttgaaacagttgatgatacagaagcgtccgttatggaaaacgattatgtggcgaggtggtgagaaagtatgaaatatctcattgatagttatacagcctatatggtgaatggtggtttattagataaaggatcagaagtcgtcaattggttctttattgaattgccttttttctttttgcgtatgggggcaatgattttcttaattatggagaatgtcatgaatcagtcagattattttgttggtaaacaacaagaagcatacgattattctttggatattttaaaaggatttggtggaactgggattgtcaaagggagtttgcttggattggcaattatcctaagtgcctattatctattgtatagctttttttctaatcggcgtaatttcatgaaaagtttgttgcattattttgcggtgtttgccttgtttatttgttggtttggacaagtaaaaacaattgatggtaaaacgcaaaatggggcaatttttttgattagttcggttagtgagatgacaaaacaagtacaaggcaagtttacttctaatgtaaactttggaggggatacaagccaagaagtagacgatggaaagaaaaaagtgtatcaaagcccaatgtttgacgcaacggttttacagacgtttaactatgtcaatagtggctcgattgatggcaaaatggcaaatgggaagaagcttgattatgataaactattagaaaagcctaacctgaatgataaagagaaaaaggattttagagaaaaaagaaatgcttatattgaacagcaggagaaagacaatccttatttttcgcaagataccttaaaaactatggaaaaaagttttgcggtatggacgggtgcaacaaatttatttattctagcaattcctgtgttatatattaatttaatgttgtcgttgatacagctgttagttgtctttttaattcttatatttccagttgttttgttggcttccttttttccacggtgtcaaatgttactattcaagttctttcaaggtttaattggtgcgttattcacgccaattatttatggtatttttttatcggtgctgttttggattaacaaactgattgatggggcatttttaggtgtcgcaaaaaaagtcagtggcagcttgcttgaattgatttcaggtagtacggtttatatgatcgttttatttgtagcagtggtagtgaagattgtagttttacgaaaagtttggaaaaataaatatgccattcttgcttacttttcaaatgggcaagtgtcacagcctgtgtttgaacaaaaagtggaacagttgtctgaacgaacgaaagaagtagcaactggtggagcgcaagttgccctaggtgcttatacaggcaatctgggcatggtcgcaaacggtgcaggtaatattctaccgaatcaagataaagccattgaaatgggccaagaacattttattgatgataatggttcatttactggggtaaaagcgggtttacagtctatttttaggcaaccagtgacagaagaagaacaaggggagctgaacgaggaacagttttcagaagtggaaacggaatcgatagatcatgagttaacagatattgaagaaataggacagacagagttagaatctgatagtttagataactctattattgaattagagcctatgacgagtgaagatttagtagtggatgtcgataatatgagttctgatatagatgtggagctagcatcagtagaagaagttggggaagagccaccaatgaacgcagaggaatattcaggttatgataatgtgattgtgaccaactttgatgaattggctatggcaagagaagaacgtgattattttgacggtggcaaagaacaagagctagtcgagacaaatggagttgaattggttaataatatttatccgtttgttcaaacagaagagtatctagctaatcttgaacagacagaagcccagttttttggaacagatgagtttgagaaagaattagaacagatagaggagtgggcataaccacttctctttttatgttaggtggtgcaaatgaaaaaaatctttttaggaatccttggcttgtttagctttttgtttttattgccttttttgttatttttgggcaccatgtcaacagaaattggaaacaatacacaatttcaagcaacaacgccacaagaaaaagtagcgctagaggtatccaattttgttaccaaaaatggtggatcgttacaatttgcctctgcatggctaggaaatatggaacatgagagcggattaaatcctgctagaatacaaagtgatttaacgtttaattcagcgtgggcgtttaatccttcgaccaatggttatgcgttaggtttagcaatgatggacggtgagcgccgtgtaaacttgttaaattttgccaaagaacaaaagaaagattggcaggctgtcccagtacaactcgagtatatgtggaatcatgacggctcagacagtgccttgctgaaacgtatgtcgaaaagctctgatgtgaatcaattagctgtagatattttggtacattgggaacgtgcaggcactaaaaatgatcccaacgaacaaatcaaacgaaaaacaagtgcgaataattggtataagagactgtctacaggttctatgggggcaggttcagccaatattggtggtggcaaaattgatgtgttagaacaaatgttagggcaaacagtcaatggaggtcagtgttatggggggacttcttattatgttgaaaagatgggctttcaatctttaatgaatacagggcatatgtttgccagtgaaattggcaatgattatgcgtgggaacaatctggctggcaggtaatcaaaaatccaaactattctgatgtcaaagcaggtgatgtgattaatttcgcaatgggcggttatgcgaccagcgtttacggtcatactggaattgtagctagtgttgaaggtaatggaaagcttgttttatatgaacagaacgctgaaaaaggacaaataattgctaaatattttcgacaatggggagcagaatatcctaacgtgacaagtattgtaaggaagaaatagaggagagatttttgatgaaaaaagaagaaatggacgttgtttcattgcggattataaagctttattttttaggcattagggaattaaatttcccagattataataaaaggtttcagcaaaaagatatggaattgtttattcaactagctgatatgatggaaaatttaccaaatcttgatgaacaactaatttatgaattagaagagttgaaagattatttattctatgtcaaaaccgaaaagtattctttaacagttcatgatatgtttttggaaatgaaatccgagcttgaaaaaataatttagaagaaatgtagtgtcaaaaaagagagggtgtagtgtcaaaaatgtttagaaagaaaaatggtttaacaaatcggcaagtattagcgatttgtacaaaatttcagtgtaaaaagaatgagtttgtcgcccatcgattaagtgatgggtatttagtagcagtaaataataaagaataccgagtaaaattttcggaaggctttttttcaaaaattgtatatgcaaaagaagtgcaacggaaaggagctcggaaatcgtgaataagctacctttacttattttattgttaggcggagtgttgcttgttagtggctgtcaaagccataaggaagaaaacaagtctagtaaagtatcgacagaagaaacgacagtgattgaaacagtagcaagggaacaatcgaaggaatcgtttacgagtgaagcaactaaaaaacagacagaaacaacgaaattagaagaaccagatcatgtaaaacttctagaagcttatggaaatgcgtatgcgaactttacaagtattaatgatcgcaatgaaaagctaaagcccctcatgactgaaaaatgtatcaaaaaaaatggaattgatgttaaaactggagtagcgttagtttccgtaggaaaggttacaacgatttataaaaatgatcaacatgaatatgctttacttttggattgtgaacaaaatggaacgcagacacgagtgttacttttggctaaggtgaagaacaataaaatttctgaaatgacctataattcagttaagcaagagtattagaaactcttgatattaatagattccatgctagatttatggtacaattacacataataaataaaggagaaaaccaatgaaaaaaagtattgtaacgtgttatttttgatgttggggatagttgtatttactagttgtgggtctaaaatggataagacagcagaagagtttaagaataagattataagtcatgtcggtgatctttatgatgaaaaatatcaagaaaaagaatttagctttttaatttacaaagataaggatacaaatgaatatttagctaaagctttggttccttatgaaggtgagcctaatagtgtagaatctaagtatttttataatgtaaataaagaattagaaactattgaaccatttagtggaggtagaacgtttgattatgctaagtctcatggtaactatgaggtaatatataaatcaggaaaatttaaatagaatttgaacttaagataaattaaatttatgtttgagagcagtgcttagagcattgctcttttttgttttaggagggaaaacaatgttaattgtaacaaaagaagacctaatgaatttaggatatggaaaatatcaagcggaagatataattaggaaagcaaaggcagtaatggtgtctaagggatacgcatattacctaaataaacgattaggaagagttcctgttggagctgtcgaaagtgtattaggaatagaactagaatctatagcaaaagaggttgaaacggttggttaagtttaaaaaagataagagaggaaagtattattttactgctagtttgggttttgatgaagtaactggtaagagggttcaaaaaatgcgttcagggttttccacgattaaagaagcaagggaagcttatgcggaaataattaataatttcggtaaagaagcatattcttcaaatagcacaatgctgtatgaagaatttttttatactatttttttgccatattataagggacgggttaaagaaagaacttataataatagacttagtatgataaaaaatacttttgcctatttttttaaaatgaaattgaaaagtatagctcctgttcatatacagaagtggccgaatgagctgttggaacngtatgaaaacacgtatgtaagaaatatttatggactgtttcngat

SEQ ID NO: 312 - DNA, 2594 bp; double-stranded, linear
taaaatawtwtttataatagaaagttatcgaaaggatacctatgtttaaattattaaagacttttcaaattgtgtatgagcaaatgaacttttccaaagcagctacctgcctatatatatcacaaccagccgtttctaatcaaatcaaacaattagaagaagaattaggctgttcattgtttttaagaaatggtcgacaagatgtagtccctactaggcaagcggaagtcttgtataatcgtttgctaaatttagctgatgattggcaagaaacattaacagctcttcatcaggcgagattacctaaagaaacttgccgaattgctgcgtctaatacttttgcagtttattatttgccgcaactgatgcagcatttacagacacagtatgcaacgatcaattttgttttagaaatgaacaattcagaagaagtagtggaaaaagttgaaaaacatcaagttgattttggctttatcgaaaaaccattaattacgaaaggagcaactcgtgaagaaattattcaggatcaattggttttagctggggaccctgccaatcagaattggttggtacgtgaaaaggattctggggtctttcattatacccaacagtatttagaagaaagtaatcaaagcccaacactcatgacggttaaaaacaatgaaatgattgttaaaatgttggaattgggcatggggcaatcgttgctttcaagaaaggcgattactgaaaaaattcctttccaaacgttaggtgaaaagtattggcgttccttttattttttgacacggggacatttaaaatcctccttgcttcaagaagtaaaacaagcaatttatcgattctatcagacggaaatgaataaatactaaaacgttctctttgtttatttatcaatctttgactacactaaagaaaacgaaggagggaaccacaatgcctaaattttcaccatgtttatggtttaacacacaagcggaagaagctgctaacttctatacaacaatctttgaaaaaggtgcgattctaagtaaaacgaactacgttaatgaggagcatcaacctcaaggaacatcattaatgaccattgaatttaccttggcgaaccaaacaatcattggtttaaatggcggaccagaattttcctttacgccagctagttcattttttgttgaatgtacaacattaccacaaacagaaacgttgtggaaaaatttaacagcagatggacagatattgatgccttttggggaatatccttttagtcctttatatggttgggtagtggacaaatttggtgtctcttggcaagtgtctttttcaggaaaagaacaaacaattgtaccaacctttatgtttgctaatgaaaaatatggcgaagcagccaaagctctatcagaatggttggcgattttcggtccaggcgaaataattgaaaaagttgaatatgaagatgggaacattgcgcaacacttttcacattacaggagcaaccgtttcgagtaatggatgcacgagataaacatgattttgattttaccatggccttctccatttatattgattgtgaaaatcaggaggaaatagatcggctatggcaacaagtgactgctaaagggaaagaatggccgtgtggctggatggaagatcaatttggagtcagttggcaaacaggcaatcctgaactgaaacgttatttatctgactcaaatccagctagagcaaatgaagtgaccaaaaaattgtaccaaatgaaaaaaatagatttaaaccagttaaaagaagtgtatgacaaatataatcattagaaaaactgaggttgtctgatccactacacttcgttacgttggtatcaattccaatacatggaacatactagagttgaaggacttgtcttttaaggatcaagaccttcaactcttaaaaaaggctcgattcttgcgagtttcaaagaagccacttctattctgttgtttatcttaagggttaggactctgccgatttttttataagattatgctataattaagagtagcaattattgaaggaaaaatgaaaagtccaaaataggaagtsstaaaatgattgagttaattgtgttgttaacagtttttacttatggaacaaactttgttttatatcttattttgaaaaataaaaagtccatgccaattgtcgaaaaagcttctattgtattaggaattaatatgtctgtgttattattagatggtatttttgctttcgttggtaaattcatcatgttatcagaatgggaattattagcgcctatttttgaaatagtgtaaaaatcatcataaagtcctatatccaaaaagaatgaagtttgttaggataagaaagatgaaaatttagaaataaaagaggtgggattgcatggctaaaatcatgattgtcgaagatgaaacaaccattcgagaattaattagcgaggaattacaaaaatggcaatttgaaacgattggaacaaccgattttaatgatgtattggatgatttncaagaggagaatcctcaattagtcttgatggatattaatttacctgtttacgatgggtactatnggtgtcagaaaat

SEQ ID NO: 313 - DNA, 4234 bp; double-stranded, linear
tgtgctaagcgtttnttaactttttttangtagtttggcaggttcattaggagntggcgctcttttatatagtgtcataataggtgttntaggatttgcggactatcaaaagatgttttatcgtgtcgaacctatttatccagacgacttaaaaatgatcacagaagttagtttattaaaagaaatggttggtttatggccgtttatttttgtggtagcgttaggttgtgtagcactttttttcttaggaaaagccttttataaaagtttctttttatcgaagaaaaaacaaacgattcgtgtgttaagtcttgttctttcgattggtctattttcatatattggtgattttaacaatccgcaaaatttgttacgtaaagcctataataaaaccgcgttatggattccttacagccaaaaaatgaattactacaatacaggattyattggtggtttyctatataatttaaaagtagaggctatggaccaaccaaagggctattcaaaagaagctatttcagaaattactcagaagtatcaaaagttggccgaggcgaaaacactgccgagcaatgagcaaccaaatattgtgtttgtcatgagtgaaagtttttcaaatccagatcatctgaaaggcttgtccattattggtaatcctttagctgattatcagcaaatcgctgataaaacttacagtggccagatgctttcacaaaactatgggggcggaactgcgaatattgaatttgaagccttaacaagttttcgatggaattaatgaatgctcaaatgactacaccttatacgatgatgattcctaagatgacggaattgccttccattgtttcattacttaaggaacaaaagtaccaaacaacggctattcatccgtacaatacatctatgtataaacgaaaagatgtgtataaaattttaggttttgatcaatttatcaatgaaaaaacaatgaactatacggataaactagaaaataatccttacatttcagatcaagcagcgtatcaggaagtgacgacactgcttaaagaaaaagagcaaccgcaattcattcatttagttactatgcaaacacatatgccctatgaaaacaaatacacaacgtccaattatttttctcaaggaaacggcaatcaagtcgcgctcaataattacttgcaagatattgcctacagtagcgaaytttgcaaaaatttcctacaagaaatcgaaaaaatgcccaaacgcacattagtcgttttttggggagatcacttaccaagtatttatgatgaaaacattcaagcgttgaatgaaggggcagcccttcaccagacagantttctaatgtatgatacggcgaaccagttaacagraaaaaatcagcatcaagcaatcattagtccattttatttngctccctcacttttccamcaaagtggcttaccgcaatcgggattttacgctatgctaaatgaggtacaagaacaattgcctgcttttgaaaaggggaattactatctcggtggggaatggaaaaaaacagtagaaatgaataaaaagcaagaacaactatatgaggaataccgactgattcaatatgacattgtttcagggaagcaatatagtttagaaaatcaattttttagctaaaaagrgcctgggacaaaaatcactttggatttttgtcccaggctcaaaacctgataaacggcgggaacagaaccaactccttcggaaataagccgaaattctccaaaaattaaagagcaattttcggaaatttcttcttatttctcggagctaaacggttctgtcccsacctcttgagttttattttaaagttttacgataaacaatgacataatagctgaaagctaacagacaagcaaaacttaaaaagtaaagcggcaagacccaaatggtaccattgtgaaagtaactaatcaaataggtaaagaaactaacaaacaagtaatagacaaaactaaaaatcccactggcagtaccaattacagattcatagccttttaaggccatacttaaggcattgggcaaagtaatattaatccctaagaaaaagagaaaaataaacaaaataagaccaatgattgtttcaaattgtgtcattattaataaacagcaagccgcaaagatacttagcagcaaaccagcaaaggcaattttttccgctgaccaatatcctagcaaccaattgataagaaccgcagcaagaatactagacacagctaaaactaaaccaagaaagccatattggacactgctaaagccaaagtgattgatgaaaataaacggagcttctgcatagtagctaaacaataaaccattaatgcccccaatcaataagccgtagcaccaaactttcgagtcgaaggaaaggcgtttcgccacggaccaaaaaggcgctttcgttaaggtatttcctaagtgaaaggtttctggtaaacgataaaaactatagaaaagtaatagaacagccatgacaattaaggtgctaaagacatgctgatagccaaaataggtttgaacaagtccgccgactaagggtccgatggcaggagatagcgatagggcagcgcttgtttgagcaaaaattttccctctttgaagatcgttaaagctttcccgcatcatcgattgggtaatgacagaaccaacgcttgcaccaaatgcttgaattaaacggaagaataacagccaaggaaatgtcggactcaaaaaaaggccaatatttccaattaaatagcataaaattcctaataacatagctgggcgacgtccaatcgtatcggatagaattccccagaataaaacgccaacggcaaaggcaacaaaataaatactcatggttaattgtgccacgctatcgtgaatgttaaaagcagaactaagcgctggcaaaatgggtgtgaaaatcgactcgctgatttgtggaaatcccacaagcaaaataataattagtaatgatgggacggtgtttcgggtgtttttcatgatttttctccttaaaagtttaatctaatcaaaaacacccattgtcttttacaaccgccaaatttaaaataagtaaaataatgtcaccaactttccttgaaattttttattatacaaagtctaaatgaagcagcgcttcttcttgactaaattcataagtgtagcgaccggataaaccggcaagctcacctgatgcttgaaatagtttacctgggcagtctaaaagaccctgtgtaaacgtccctttttcgcaagcagtaaaggtgcctttttttcctaaataagttccttcgaaatggaggaaaccgaccacttgagccacagcttcaagcccatctgccattgaagagccttgataagtcattaagtattccacagaagctgtcccagataaggcgcctgacaattgataagtagcgctcgcttgatttactgggaaattttcattaagattgtcaatcggttgttcttgccaactagatacagtaaatgatgcttgctccattgctgtcccttctttcttattaataagaatagggtagcgggaagcgcactatttgtcaacaatccaccactttaactcttcattttttgcacaaaagaatgtaacgctaagcggttgatgtgataagcagttccttgtttttgaataaagccgcgctctcgaaattgtttgaaggtataaataagatggcgataactaacccctaagtattcggcaatctcagtatgtttttctttataaacatcttcgtgattagcggcaaccaatagcaattccgctagccgataacttagttcataggtctgattcgttgtaaagtggtccacccgttgaagcatttttttccctagataatggctgagttgctgcataaaaagcaccttgttttttaaaacagtttctgcgtaagctaaaggtacagccaaacaacaggtttcacctaaggcgataacgtccttggttatcgtttccgcttgaactaatgttaaatcgccaattaaatcacctgccgttaaaaactgaacaatggattggcggccattgcgttctgtttttaaaattttcgcttttcctttgattaaataaaaaagataatttaatggctctgcttggtgatgaatgaattcttgattttcaaaatcgataataaaactgtgttttaaatcagtttcattaaaaaaaggcgtatttttagctaattcttgtttcggtgatcgt

SEQ ID NO: 314 - DNA, 2642 bp; double-stranded, linear
taaggttgcaaagccaatttttttattcttatccgtaaaatattttttgcgtcgatggttcactgaatgaactttgtcttcaagggttcgtaaagataagctaatcttttgagaatattcatcaacatcaataacttgaacggttactttttgtccaacggttaagagtccatggatatttttggtaaagccagcttgtacttccgaaacatgaatcagtccttgtgtttcttcgtctaaagaaacaaatgcgccatatggttgaagtccggtaattgtgccagaaagtaccataccaattttgtacttcatcaaatttcctcttttcatacgataaatttctttttccgtttctactcatttaaaataatagcattttttcaacgtttgtgcattatttcttccctagttgttaaaactattgtttcatcttttaagcaaaatctactatactataggaagtaagactttatatagaagaaaaggagttatcttatgtttaattttaatgaaaccattgagcgtcgccacacgaattgtgttaaatgggacaccgttgaagcgagttaccacgaaaaagatttactacctttatgggttgctgatatggatttcaaagtacatcagcctattcttgatgccttgtcacaagttattgaacagggcattctaggatatgcagttgcacctaatgaactgtatcaagcaattcaagattggcaacggcaacaccatcaattgattgttgaaaaagaagaaattttgtttaatagtggcgtggtacccagtttggccacaaccgttcaagcgtatacagcacctgctgattctgtcatgatttgtgatccagtctaccccccttttgcagatgtggtaaaacaaaatgagcgtagactcgtgcgccattctttactagaagttaacggacattatgaagttgatttggttaaaatggaacaacagataatcgaagaaaaggtgaaactgttacttttttgtaatccccataatcctggtggacgtgtttggacaaaagaagaattgctggcaattggccgtttatgccaaaaacaccaagtaactgtggttagcgatgaaattcatcaggatttgattttcaaaccgcataccttcacttccttcactgtcgctgatgatgcatttaaggaattcactgttaccttaaccgcagcaacgaaaacctttaatttagcggggattaaaaattcaatgctgttcattcctaatgaaaaactacggcaatctttcgtatctttacaagacnaaaatcatcaaggcggcatcaatacttttggctacgttggaacggcagctgcctatcaaacaggggaggaatggctaacggcattacttgattatttaaaagaaaatattgattttgccctttcttttttccgtgaagagctgcctagcgttcgtgtaatggagcctgaagggacctatcttttatggttagactttagttcttattcactaacggatcgagaacttcgcgataccttaattcataaggggaaagtggttctaaatccaggaattagttttggtccccaaggttctcaacacatgcgtttaaacttagcttgttcaaaagaaactctcgaagaaggccttttacgtatcaaaaaagcctttaattaaaaacagctgtcctagtttttaggacagctgtttttaattctttcttttgcgtttagctaaataaactctgacgaaccagatacctgaaaatagaagtaaaatttctccaattatgattgtataaaatcctggttcatgaacgattccttgctgatctacatacgtaaaaaacgttcctataaatgggagtattactgcaaacaaagccaaggccattggatatctgtatttttctaacaaatttgcttcctctccttctattctttaactcagtatcctataaagacttaattaaaagaagagatttggatgcttttaaaaaaaagttagtcgttttaagaaawaaataaagagtaccaacgaatttgtccctcgttggtactctctttttcaattggttaaacttattcaccaatgatttcaactgtgtccatcacgacgtcaaatgttggacggtcttgggcatcccgttggactccaccaatttcatccactacatccataccatcaacaacatgaccaaaaacagtatgacggaagtctaaccaaggtgttccgccttgtttgtaagcttcaataatttcttctggaaaaccagcatcttctaactgactcatcatttgagctggaacattttgattagtaacaacaaagaattggctaccatttgtgttaggaccagcatttgccattgacaatgcgccacgcaaattgaaaacatcccgagaaaattcatcctcaaatgcttctccataaatactttcgccgcccattcctgttccggttgggtcaccgccttgaatcataaaatcaggaatcacacgatggaaaataacgccatcatagtagccctttttcgctaattcaacaaaatttttaaccgttttaggcgcttgttctgggaataattgaacagtgatgtcgcctcggtttgttttaatgaccgcttttgggcctttagcattttctaaatctaattg

SEQ ID NO: 315 - DNA, 4605 bp; double-stranded, linear
cagcttaattttccttcatttacataaaattgaaacatagtgtgacaaggcggcaacgccattgaaggcacatcttctggattccaagcggaaacaattaaacggcgagaatcaggattggttttaatcatttcaatcacattagctaattgatcgataaagctaccatctttggtttcccagtgacgccattgtgcaccataaatattccctaattcaccatatttttctgcaaactctgcatcatttaaaatggcatcacagaatttttgatgttcttctttgtattgttctgcaaacgctggatcttgtaagacacgatgcccaaaatccgtcatgtctggtccttgataatctgcgctttttacgtaacgttcgaacgcccattcatcccaaatatgattatttcgctctaacaaatagcgaatattcgtgtcgccttttaaaaaccacaataactcacttttaatcaagccaaacggtactcgtttggttgttagtaagggaaatcctttggccaaatcaaaacgcatttgatagccaaataaactatacgtcccagttcctgtacggtcttctttaaaatgaccttcttctaaaatcttttttcctagcgctaagtatgcttcttccatcttattccctccgtctcttaatccgcgtattcactcaagtattcccaacgattcattttttcttctaacaattgttccgttgctgttactgcttcttgcaattcttgtaaacgaacaaaatcatcaccctgatgattcatttcttcagttaatgtttctaatttcgtttctaattgtgtgatgtcttcttcaattgttgcccactctttttgttccatataagtcagctttgttttttctttcttttctgtcgatgctcttttactggtttatgagsggttyttctttgacttttcttgttctttttggttcgccaaatattcactcatcgtgccataaaatgataggakctgaccatttccttgaaaaactaacaatttakccattgttttatccaagaaataacggtcatgagaaaccgcaattaccgctcctttaaacgtttggatataatcttctaaaatggtcaacgtatcaatgtccaaatcattggttggctcatccaataataacacgttaggctgactaattaataattttaagagatataaccggcgtttttctccaccagacagtttgccaatcagtgtgccatgcataaaacgaggaaataaaaagcgctctaacatttcagcgaccccaacgctgcttccatcactgcgtttcacttcttctgctgcttcttgcaaataagcaatcatccgttgattaggatccatttcttcgttttgctgggtataatagccaattcggacggtttcaccgatactatatagaccactctctaaaggaatgcgtccagctaaaatatttaataatgtggatttgcctgcaccgtttttaccagtaatgccaattcgatcgtttgcttgaatgagtaaattaaagtctttcaaaagctgtttatgatcaatggcataatttccttccttgatttccagaacttttttccctaaacgctgcgtggcaaagtctgcttctaaggtgccattggtttgtacctgatgcaagttttcttttaaatcctgaaaccgatcaattcttgcttgttgtttcgttcctcgtgcttgaacgcctgctcgcatccacgcaagttcttgtttgaagaggcgttttcttttttcttcttgttctacagcgacacgttcacgttcggctttttccatcacatacgtttcatagtttcctttgtattcatacagttttccaaaagaaagttcgaaaatccgattggttactcgatctaaaaagtagcggtcatgggtcaccattaaaaccgcgccacgatagttatttaaaaagttttccagccattcaatcgtttcataatccagatggktcgttggttcatccaataacagtaaatcaggcgcttcaattaagacttgcgccaagcttactcgttttaactgcccaccagaaagctcacctattttcttttccaatgttggaatgcctaatttttgtaaaataatttttgcattggtatctgctgtccaagcatcttgtttattcatggcttcttctgcttgcgtgtaacgtctttgaaccccttcgtctaaaccattctcacttaaagcagtaacgctaattcataatttttgaccgcttttatgatcgggctgtctccctgaaacacggcttctgcaatcgtaatattctcgtcaaatgtttgattctgggaaaggtacccaatttgataatcacttggctgctgaatcgcagcaagatcaccatcaccgctatctacgccagcaataatatttaataaactggttttccctgtgccgttaatcccaattaaaccaatgcgatctttttcatgaatcaaaaaagaaagatgatcaaatagtgttttttccccatatgttttggttaaatctgttacttttaattctttcaccgacactaccaactccttctattttggtcttgcttattgtatcaaaaattggattataaaaaaagtgcatgagataaaaatcgtcttggtttcatctcatacactattacttattctttattaaaatttttaacaaatcgtttcagcggaacattattcacttcgccgctaatcgaataactctctaataaattgacattttttcgtaactcgttcgcttcgataattgaaatgcgttcagattgttcgtaatgatcaatcatccgtcgttcttcttggaagcctaataataggtctttgacatagtctgtctccgtatgaacaatatacgaatcaataaattcgcctttttcaaacttatgggctaaatccaagcgtccgtcaatgaagaaatcaattaaatcatcatcatagacaccgcgcaaattatctaaactcttcagaataacttgagaatttcttagaaaaacttggcgaatattttctagttcttcatttcgtaattctttttcttcttcagaagcttcaccacgattgaaaaatagcttaggatgtaaaagaatcgaaatgatttgtcgagcaaataataaccaaaagcctacaatcgataataattgtttggcaatcgaccgttgcatccgtgtaatcaagcgttgatacatacgataacttctgacactaatttctccttgtttcagactttcttctaagccgtctcgttcaatggacacaattaacgtccgcaactcttgcacttcttgttttcgttctgcacttagctgctcggtatacaattcttttaaacgatcttgataattttcaatgaccgcattcatttcaccacgaggattctcttcattttgctgttytaagacatcaatgacatcacgtaataaatcaatttcgactgactcttcattttccacttccgtctctgaatcagttaaaaatggtaaaactagaatcccgccaatcagagtcaccaaaataacacaagccgtaataaatagtaataacggtcgttctttaaaatgctcgccgttaatcgctgttggcaaaataaagatggtggctaaactcactgttcctttaacaccgccaaaagttaaaatcagcatttcattcattgcgtttttaactttcttaagtccatgttgaagcgtgtaaacactgaaaatggctaagaaacgaatcaaaaagacaacggcgctaataattagaacaaccagtagtaggaaccagtttgaatattgttggtcaatccaaattggcgaaaacacttgagraagttcaattcctaagaataagaaaactaaggcatttaaagtgaactcaatcaaactccaaatactttcgccaacatttgacagctcagcttcaaaaagcgaaacttttttcaaactagacgcttgcataattccagcaatcacagcagcaataattccagaaacgccaatcaactctgaaattaaataagcaataaatggcaagagtaattcaatcaacaagtagcctgtaacatcttttgccactgcagtttcaagtaaatgaacaatttgctgttttaatagaactaacacgattccgactaccgctccaccaatgctggaaataaccaaggtccctgccgcttccaccggcgaaaatgaccccgttaataaagccgctaatgcaaattgaaaggctgtaacgcctgatgcatcattaatgagtccttcaccagataaaatgttcatcgaacgttcaggaatgtcaattcgacctgataacgaacctaccgccaccgcatccgttggccctaaagccgctccaaaagcgaagcaagcagctaatggtaaagtaggcaaaatcatatgcagggtccagccgactccaactaaggtaattaacacaccaaaaaaggccaagaaaagaatcatcccgaaatttttcatcattgctttcagattgattagctccccttctctaaataaaagcggtgcaataatcattactaaaaacacttcaggctcaaattcaatttcctgccccattttagttaaaccaattagaacgcctacaataatt

SEQ ID NO: 316 - DNA, 2726 bp; double-stranded, linear
tntacttctactgtcacntgcggtantantttcctttgtggattgtatttgtttatgcacctatttgcttttcgttatggggacatggaaattggctagggaaaatgggagtactggattattcaggcggactagtagtccatactaccgctggaataggaagtcttgttttagcaataacatcaccaatacgtttaaagaattcattgatatttaaatcacaagaaatgatagcttttgtaggaatgctgtttattaccttaggatggttcggatttaatatggcaccttctggaaaaatcggtgaagaagccattcaagtttggttaaatacacttatttcaattttaggcggtagcattagctggacttttacccaatggattttaataaaaaaagtatctatctattctataatgaatggaataatcggcggattagtaggtagtacttgctcggttggatatgtawctcctgcatttagtttattaattncggtaattgkatgtaccctttgtccaattgtwattcacataatgcatctaagcatagcaaattttgatgacgctgcagattcttttgggatgaatgcagtgggtggaattgcaggatcgattttaactggtgtcatggcagaaaaaggggacttttttcttcaattatttgggacttttttaatcagtatttggagccttagtttaagtcttttgattcattatttattgaaaaaaatagtaaatgattgttattctcaatgtattaaataaaaaaattaaaattattcctagtgtgtatgaatatcaaaataatagtcaataataacactcaggaagaaatttgaagactttaaattttagtggaggtaaataatggaaaataaagaagttataattattggagcaggcgctgctggcgtaggtatgggggttgctttaaaagattttggcataaataattttgctattttagagagaaagcaggtaggtaatagttttattaaatggcctgagcaaacaagatttatcactccttcttttacaagtaatggatttgggatgcctgatttaaatgcaatagcaattgatacatctccttcatatactttaggtgaggaacgtttatctggaaaagattatgctaaatacctacaattagtttcagaagaatataagttacctattaagacaaattgtaaagttcaatctattaaaaaagaaaaaactggttatttgcttgaaacaacaaaaggatttatttatgcagaatatgtaatttttgcgatgggagagttctcttttccaaataaatctagtattaaaggtgcttataagaatagtttacattatggcgagattaattcttggattgaaattaaaggggataagcagacgattatcggaggaaatgagagtgcgattgatgcagctattgaattagctaaattaggtaaacgagttacaatttatacagatactttggggttaaatataagagatgctgacccgagcaaaaggttagcaccacgcacaagacagagattttttgatttacgtgtaaaccaaaaaaaattagatagtattaaaatatacacaactaccaaagttaaaaaaattgaaaaaaagtctactagttatatattgattacagaaaatgggaaatcattacctgtagaaaatataccaattctttgtacaggttttaaaaatggcacaaaatctattactgcatcattgtttaagtataaggaaaatggagaggttcttttaaatgattttgatgaatcgacaatagctaaaaatattttcttaaccggtccaaatgtacgtaaaggtaataccattttttgttatatatataaatttcgccaacgttttgccgtaatcgctaatgaaattgcccgacgaaaacatattactattgacgaaaaaaaattgtcatactataaaaatcaatctttttatttagatggttgctctgggtgtgaagtaagatgtagttgttgacaaataagtaattgttacaacttattttataaattaaaagatttttaaataatttaagtcaagtccagactcctgtgtaaaatgctatacaatgtttttaccatttctacttatcaaaattgatgtattttcttgaagaataaatccattcatcatgtaggtccataagaacggctccaattaagcgattggctgatgtttgattggggaagatgcgaataatcttttctcttctgcgtacttcttgattcagtcgttcaattagattggtactctttagtcgattgtgggaatttccttgtacggtatattgaaaggcgtcttcgaatccatcatccaatgatgcgcaagcttttgaatattttggttgatcgatataatcatgaatcaatcgatttttagcctcacgcgctaagttaatatctgtgaacttaaaaattcctttaacagcttctctgaaagattttgaattttttttaggaatggtggtaaagatatttcttaggaagtgaacttggcatcyttgccamcttacgttggtgaaggattttctaatggcagagactaatcctttgtgcgcatcagaaataacgagttccgtaccttgtaaaccgcgtcctttaggawtcmaaaaatgtkgtccaggctctcgcttcgccacttgaatcagaagcgataattcacggcgcancttggtatccaacggcaaagaagctttgagng

SEQ ID NO: 317 - DNA, 741 bp; double-stranded, linear
ataaaaaactacaattttttggtacaaatagtaatgtttttttaagtttattcaatactgttgggacagtaatattgatagctataggcagcttattagtattaaagaatagtataaatttaggaaatttaacagtattaatttcattatcaggaatagtagtatcatccctaaatcaatttgggtcgtttcaagcgcaatatgaatcgatgcaggtggctagtcataggcttgaatctatattaataaatatggaaaatgagaatgtatgcggggaaataattttagacaagaaaatagaatcaataagatgtaaacgtgtttccataaaaaaaggagatactttattactcgacactgttaactgtgaaatctatagagggaaaaatctttcaatacgaggtgaaaatggttcaggtaaatctacattaattaagtctttagtaagattagatgatgactataggggacagattctaattaataatattgacataaaaaaaatcaacttggactgtctacgatcaaaattagtgtttgtagagcccaatcctaaatttttagaaggtacaattagagataatttattattgggacataaagttccgaatagtatatttaataagttgataagagattttgaaataaacaaaatattagacgatctacctttaggtataaactttcctggagaagctgcaataaaatgcttatcttctggacaaaaacaaaagctagcct

SEQ ID NO: 318 - DNA, 6157 bp; double-stranded, linear
agtaaataaatgaatacattgcaattatttaagcaggcctttttttcagtttcagaattacggcatgcgaaaaaaatggcgttttggaaagtaattctctatgctgtttttttaagtgctattttagcactacctattaccaaacaagtcttttctgtgctacaagaggtgcaacaagatggccaaaaaattgcagaaaagttgcctgacttttctattgaaaatggcacgttgcaaacaaaggccaaagaatctggctttatttatcaaaccgactcgattatttttacgtttgatccagatggaaaacgtacagccgctgatgtccaaaaggatttaattggtaatgcgtttggtttggcttttttacaagatgaatttgtagtcgccttaccaaattcaggcgcaactgaatcaattctaggcaccgaccaatttatcttcccctatagtaaaggaaccttagatggcgttaacgctcagagtatcaagactgcgctaagtgaggcagcgatcccctggtggacaaaactcattgtctttttagtggctatctaccctgttctaatcggtttagttttagacttactgattgccgctatcggtgcatctctctattcaaaattacgtttttattctttacgtttgattgattgtttaaaaattattacgtattgtgctaccgtgccagttatcttaagtgctattttaaacttcgtaaatccgatgtttaacgatggcatcctagttattttactaagtctgttctttttctttgtcacaaccaaaaacgaaccacggaatatccctggttcttaaaaaaaggtgttgtcttaaagacaacacctttttactattcttcaaattcttcttcatctgttaattcaggtaagtcaatcgtggtcaccgcagattggccaatttgcgttaaatatgcagctaattcatccacattttccacaggtgagacggctgcttcaattgccattgctaaattaagtccagcgactactcgcaattgcggataagtgcccatggccatcatagccacattacaaggtgttcctccttttaaatcagctaatacaagcgtcgggacattgccagcttcttttaagattgctgccagttttgcttgcgtgccgctcaagccatcttctgcggtcattgacacaatcgcagcatctgctaattccccgacaatcatttgagtagaagctaaggtttcttctgccatccgtccatggctcattaaaattaattttggtttcatcatatcctcctaaaaatactgctgataaatttttgttcgtgctttcagaaagccacgttcttcacgagtgggatgaatccgattcgttaacaaaattagggcttctttggtctcttttttcataccaatcgccgttccagtaaagccagtatgatacaaatagtctgcccctgcttgcgtctttttcacttcccaaccaaatgtacgtcccccttgattcatagaccagagagcagtgaacattttttcagaaaataatggtttgccagacgggtagcgattgttcataaaacactgaacaaaagtgagtaaatctggtaaagttgcaaataaacctgcactgccaattggcgcttttagttgataggctttcgaatcgtggaccactccctgaataacgccgcgttgttttgtaatctctgtgggcactgcctgggcaaaatcgctgaccgtaaaacttgtatgctgtaggttcattggttgaaatacgtatgtttgaaagctctcttctaatgagcagcgatccaatacttgaataatttctcccaataagtaataccctaaatcagaataagtggttttccctcgttcagataacgaatgcgttaaaatgatttcttgcaagcttttttttgtgacatttttcttatcgacaacatcagctggcagtccactctgatgcagtagaagctccccaatcgaacaagatagtccttgataatcaggtaggatttcccccacagtggttgaaaatgtaagctgatttgtatcgattaattgtaacattcgatttgttgtcccaataactttcgttaaggacgctaaatcatacaggctagctgatgaaatcttttgtcttgcaaatggaccagtattacctaaaaagcccgtatactgttctgataagctatcttctgtgatcgtcccccaagcgacacccggaacgacttgctgattaatcagtctctgaattgtttcttgaattgcgatttgattcattgttcaccacttctatgctaaaacttctgaaatccgtccgtcatgttctgctaatagttgtttggctttttgaaaatcaacgtgggctttcgccattacaatggctggtgccacttctagctgtgctgcctccaagtattctttggcttgcgattcctcgatttctgctgcttctttaatgatattcgtggcacgttgaattaatttttcgttcgttggttgtacattgaccatcaaattttgatagatattccctactttaaccataattcctgttgaaaacatatttaacaccattttctgtgctgaacccgctttcattctagttgaccctgtaatgacttccggtcctacaattggcgcaatcccaatttccgccaattgattcatcggactttgattattacaggtaactgaaatggttagagcgcccactttttttccgtattcaattgcggaaacagcatatggtgtccgaccactagcagcaatcgcaattacgacatctcgggcagtcaattgatgttgcgttaaatcttcgatagctaattctttcgagtcttcagcgccttcaattgcttgatacattgctttttcaccaccagctaaaataccaaatgcgcgttctggcgacacactatatgtgggtgttaattcaatcgcatccaaagcacctaaacgtccagacgttcctgcaccacaatagattaaacggcccccttttttaaatcgttctgccgctgcatcaattgctgcagcaatctgcggaagcaccttttcaattgcttgtgctaccttttggtcttcttgatttattaaagttaccatttctaatgttgacacttggtcaatctttttagtcgcttcatttctggcttctgtcgttaatccttctaagttcatttgcttgcacacccctacttctcttttagacggctgacaagttgactcgtttcaatcatattgcgttcaatttctgtgtctaaatcatcttgaattgaacctaaatacagaacatcgccaattgccattgacgaagcaatcgatgaaatagccccaactcgaatgaggtgctcattattggggactaaaagaacttcatcgctcaatgatcgcacgttttctccatcgttactggtaataaaaataaccgttgcgcctctatttttggcaatttcacaggcgattaaggcttcttttgtcaaaccactataggagaccgtgatcaaaatgtcttgtgccgttgcataatttaaaaactccaacatcatgtgactatcataattaaaaattgcttggcgaccagcgcggttaaacttgtgataaagattataagtcgttaaagaagaggcaccaattccaaccaaatgaattttttccgcttttttaacatgcgcgattgctcgttccaaggcttgtttatccactgtataaaataaatcctcaatcgtagcatttaataaagattccactttcatacaaatagtatccaccgaatcatccaccgctacaattggatcaatatcttttttaccgttactggcagcttgtaccgctgcaatggatagttttaactcttcccagctgtcaaaccctaattgtttagaaaaacgggtaactgacgccggagaagtttcgctattgctagcaatttcgtttgctgttaatgagagaagacgggtcggatccttcagtatatagtctgcgattctcttatttactttggaaaagtccttatatttttgtctgattgaacggattggctccatcttctcatctccatttctattttatgaaagttaaaattgcttcgtttggttcagaagggatcatctgtgcggtaatagtcaccccattatctgttaaacgacgaacggtttgaatatcttcatcggttaatgcaacagattttttaattgctcgactgccttctttttgagaaatattgccgacattgaagctctgcaacggaacaccgccatcaattaaagccgccatatctgcaatgtctttcgtaattaaaaagactttttcttcatcataattgcctgctaaaattttttcaatcgctttacgttttgataaaatggataatttaactcctgcaggcttagccatttttaaggcaccaatttgtaattgatctttgacagcggcatcatttactaccatgattctttgtgcgccaaccgtattcgtccaaacggttgcaacttgtccgtgaattaaacgctcatctactcttgcatgtacaattgtcataataaatctctcctattatatactatttttttaaaataaaccgccaacccaagccaacattggttgtaaattgcctaaaaccatgccaattaaaattaaaacaaagattagccgtgttgaattcattttctttttccctagtaaccaataggataaaagaacaatccctaaaggaattaatgcgggtaaaattttatccaacatttcttgaacagataatgttacatctcccattttataagttaaatctaatttgtaagtaattaccgaaggaatcaaaccgccgaccactgttaaccctaaaatggctgcrccttgcgtaaacaatttcattttatccgcaaattctgtcgcaatttttttcccttgatggtaaccaatccaagtgaatttatagcgaacccataggaccactgctccggcaattaacgggatcagtaacccaacaacctggcccccttgcgccatgtaagctgcaatcgaaaaaacaatcgsacgrtaaatngcgataaaaatggtatcaccaacaccagcaaacggacccattagacctgttttcaaaccagtaatggccgtttcatcttcaatgccgacttcttcttccaaagccatatcagctccgacaattaagtgcgacatggctggcgttgtattcataaagccaagatgtgtcttcaaggctttcttcatagctactggatcttcactgtatagtcgctttaatgcaggcatcatcacccaagcgtaaccaagtccttgcattttttcatagttccagccccactgatagccaaaaagattacggacgtaaactttattaatatccttttttgttaatttgttagtcatcaatctcaacctcctcatcatcttcgtaaataaccgtgccacttgttgtagtgcgccgcctttgttatgattcatcacataaatcgctgctaaagccaagccaaccagtgcgacacctaaaactgagaagaattgggccccataagcaagtaacacgaacccantaataaaataaggccagtatgttttaattggcaagtaacgcattaaaatagcaatccccatcgctggtaaaatagcgcctgctgcttttaacccattcatcacccaaataggaatccaatcattgatagcgtttacaacttgttcaccaaaagctaggccaataaaaactgggatgacacgagaaatcgtccaaggaaaaattcctaaaacattgcagcgctcgacccctttataatttccttcttccgcataacgatctgctttgtgttgaaaaaacgtattagccattctgcctaaaatatctagttgtgttaataataacccaattggaaccgcaactccgataccatactctgcccctttccctgaaatgattgcataagccgttcccataatggcccctgaaagaaagtctgggactgttgctcctccataagtcgctacacctaatgtcatcaattgaagcgttgccccaatcatcaaacctgtttgaacatnaacctaagactaggccagtaaacgttgcagcaaacaatggtgtatatggaccaatctgaatagaaatttggtcaagtacaccaacaactgtgtaaagacataaaatcaaaa

SEQ ID NO: 319 - DNA, 2378 bp; double-stranded, linear
caatctcaaatagcaatcaggcttcagtggatattttaaagacaactgctcataggggattaaccccaagcaacataagtatcgatccttcacccagtttttcgacgaatggggatcaaataatgttatctagtgtgactagagaatcaatgataaacaaatcaattaggttttcttatgcacctcaagatttaatagaaggttctacaacaggaactaaatcatttagtggcacaatcaatttttttgaagttagcaatttaactagtgatttaaaacctaatttaaaaaaagtatattcaggagataaagtagaatggacttgggaaataattaatacatcttctaaacaagcgtcgaatatttattcggaattaaatttacctgttggattaattattgatcaaaacagtattataaagaacggaaatgtagcaacgataaatgatcttaacggaacgaataacctaggagcattagattctaatcaaacaataaaatttacttttgaaactatagtatctggaaattcaggagaatggctggaattaaacggaaaagtaaattgggaagatcatggggctcgttttgtgacaagttcaaatcaagtgaaaataatagatgatgaacaaaaggataaagctgaagagacagatgagttagagattctttcagtaccacaatcttttaaatatggcatcctaaataaaagtaatgtcgaacaaatcattcatttgaacacnaataattaccagacaaatacttcggtggttacggatggattttatacacgtatgagagatgagcgtcctagtcttagtggrtggraactaactgcacagttatcygrttttaaagakgttmcaattycacggtgttaacgaattctgggrtagcyttaaaaatggaaaatatgaaattgaatctataaaaaatcgagatastccacaagagagtattgatcaaaatccaacaggaacaccttcaactgttagcacsaatgaaacgctgatatcaggacaagcagcaaaaacattgatcaatgcacaggcaaatgaaggtcacggtacgtggcaactaaggattccttttgataaagtgtccttgactgtaccagcgaatacaggggaaataaataaaaattatacagcgactttgacatggtcattagatgatacaccataggaggagagttctgtttatacgagtatggattgattcttgaatcgtattcttgcctaactttcctctattttgttattaaggtatggtccatagggtgtggacattggtgggaaatcaacagaattattagtagactttggtttgatgtttataacttagtgtatgtagttgaagctgcttattatatcttgattatgttaagcagcttaatatttytatcttattaaaaaagggggaagctcaatgacaagagtactgataattgcaagaagtcctttagcggaacaagagttggaatgtacacttcagcggtcattcgatgaggtcttttgttcttctgaattgatgaaagaggtcgaaaaatactcgttagttactcaatatttttcagtggtcatttttagtgatacaatctccaccagtgaaatggccacatacttaccatattttaagaaattgggcttgtctattctgcgaaaaggacagaaagaacaattgaaaacaacagaatatacgtatctaatagatgaaattgacgattggtttgatgaacaaacatcaccgaacgtgctgatagagaaaattgttaaacttgataataaatctcaaaaaaacaggatacctaaccttcgtataattgaatcggtacaaaaatcaatagttaaacgagatcaggttatcatttattttacgaaaaatgaacgtaaattattgtactatctatataaatctaagggtaaatgtgtttcaaggagagaactgtgtcaattaatgtggggagaggaaataagcaattcttccctgagtcaattatctacattagtagcacatgtgcgagaaaaattaacccatgtcgggtttgaggagttatggataaaaacgatttgggggagaggctatattttaagtgatgaatttatcgactatttgtctcaaaataatactttcagtaaaggtcgtgtgtctaaattattgtagatttggaaatacatttcgttaaaaaagatttaaaacaatataataagtgttgtgctacatagttagtaatgcagcgaaaaatttaaccgaagctagcgattgctaactttggttaaatttcaaaaatacaactggattagaaacttctggatagtcnactttcnggtaagtatttatataccaaatccttttattttagnaatgaataggggatc

SEQ ID NO: 320 - DNA, 4480 bp; double-stranded, linear
gattaaagctattaatctcttgctgcagttcaatagtttcttgaaattcttccgagttttctctcaaagtatcgtaatatttagtattggctttcgttngggatttctttgataacaagattaagacaaaactaaataacgttggcaaaataacagctaatcccattttgacattaccaaccaaaagcatcactgaaataaaagggaaaaacagagccataccgccggatttaggtattgcatgactcatcgcatgctcaataccttcaacgtcagacatgatagtttgagataaatctgataaattatgttttgaaaaataggataatggtaaatttgacaaatcgtctgcaatttgcactcttaaatgcgcactttctttataagtactattatataagttttcatactccctatctaacaaccaatacatgaaaagcaaagtaacaaacgatactgcaaaataaagccaacggggctttgcattttctaaaactaattcgtctatcagcatcattataatgaatgctggtaccatattaatgcagtatacaaaaaaactagaaatagaagctttagttaaagcttctgcgccctgatcagttaaagcaaatttttttttataaaaatttttcattgtcaagcctccaatcatttgcattctcataattagtgaccaattgtttatacactcgatgtttagccattaattcattatgatttccacgttctactatttttccttctgacaagacaagaatttcatctacagatttaatgctggataatcgatgagctatcataataactgttttttctttcatcaaatattgaaaagccttttgtagttcatactcattatctggatcaatagatgcactagcttcatccataataacaatctttgcatcttttaaaattgctctggcaatagctatacgttgtttttctcctcctgacagataaactcctttactaccaattaaggtatgctctctttcgggaaatttttttaaaatcgattcgcaaccggctaatcttagcgcgtcaaatactttacttgctggcgctgaggatttgctatagaacgttatcgtaaatactctgattgaatagtttcgtatcttgaaagacaaaagcaattgtgttaataattgtgtcttttgaatagtgatttaaaggcttaccaccaattttaatctgtcccttatccacattgtagaaacctgaaattagtttagctatcgtactctttccgcttcctgattttcctactaatgcataaattcttttttgttctaaaactaagttgaaattttctaaaacacactcttctttgtatgaaaagctgacattttcaaatgcaatgtcacaatttttaatctgtgtctcgttcccatattttagttggtcttgcttcatttctaaataaagggagtctagtgtttcgactgcatatcttgcttcaaacaagtgcatacttacatacattattctcatgaaagaaacaaaaataattccacttaaaaaaaacaacatcaacaagtcaacagctaatatcttgggagtggtaagagaagttataaaaaaggttataggaactatcaaaatgcaaactatgccaaaaaatagccattgaaaaagaacaaaaggtgttttcccactcaaagaatacttatatgcaaacttagcataatcgttaattgctttattcaaggctttaaatgatgttactttagcaccaaatatctttataacttgaattccgcggatatattctaccgtttcagagcttaacacatctaacgattcttgatatttttgaataaaatttgtattccctgtcattttctttaacaagaatacaccaattactaacatggcgattagaaccaatccaattttaaagttaatgaaaaagcctaaggcaactgataaaacaggtgttactatggcttgagcactatctggaatcaagtgagcaattgccatatgtsttttagccgcgttgtcatcaattgtctttcgaatatatcccgaagaatttaaatcaaaaaaacgaaaacttgcttttgttaaaccgctaattcccttttytctcaaattagtctcyaagcgaaacccaaggatatgagaaaataagccagaaaaaatataaaataaagctcctaaagttaaccaagcaacagtttgaaccgcataactcttagctaaatattcatctcctacaataattagagactgaagaaatttgtaaatactgtaatatccatagactgttaatacgacagaaaaatcagaaaataaagtggctaaccatccgtagtatttcattttagggacataactaaataattttttgtatactttcattttttcctcccccgcattcaatttcttctcttattcgtttacaactgttaatgctttccgtaatggcgtaaattagagatgtacaaacagatagaaggtaaamtacgttctattttttgtatttttttaagacttttcttccaatcaatacaccaatcatagataaacttgctacaactaacactgaaataattccccatatacccaccgcgtagtggatcattgcatccattgttgcagcagattgtcctctatctatccagtcttgacgaaaacgatctgtaaagaaccatatgggaatccactgtccggcagcactgcctagttgcattagaacccaagacacaacttgaggaattgctcgatcatatccaaatacatatagaataatatcagctaagatcgccatactaatcgaactgataaaccaaggtaagtacgccccgcccattaacgtaaaaaataacaataaaacaattgtgtaaatagtaaaaattccttttctagggtagttatagctaatataaacaaatatgattccagataataatccaaaaatccctggggatatgctgtgaccaaacgccccaccaatactactaaccattattgaaaaaaagtaaattactagggaaataactgtagctaaaccaataaaaatataatcttttgttttcatatatattttcctcaattctatttcgttatgtcattaaaaatctgttctatcaaagttgaatcttctactctaagttttatatctttttttattccaccattttttaaataaataattctattgcatattttataaagaaattccggatcatgagtggctatgactactgcacccttttcttttaaatctttaataaggtcagcaatcctttccatattgatataatccaacccacttgtaggttcatcaaatagaaataaattagtttttgacaatgaagctatagaaaccaataatctttgtttttctccaccggataaatcaaacggtaatkgatctttcattttataaagttccatttttttaaaattttttcttgctgatctttactaactatttcattccccagggctaactcgctcctaactgattctgtgaaaaattggtaatcccatttcttgcattactaaaaacggcgatgacaaatttttnnnattttcgattatctttcctttggtagggcgaataatcttcatgagtattcttagtaaggttgttttccccacaccgtttttccctaccaaaccaataacatctccaactttgacatcaaaatttatgtcttttagaatattttcataagtaatttcttcaacttttaatacatctgcacttgccttttcgatatagggaacttcaatcgaactattaaaaatgtcaaatttccttaatgcgttattgttttcagtttttaacaactgaatagttgtagtttttacagttctatttttaacaaatagaacttgatcaattaattctttcaaataataaaaacgatgttcagctataacaatagtaaatcctttattttttaaatcacaaagtaagtcagcaagtttcttagtcgcttggaagtccaaatttgaagacggttcatccaatataattaatttagagtttagcgataaactacatccaatagaaattttctgccgttcaccacttgatagcgaaaaaatgtttttatctaatatatttgaaagatctaataattcagctaattcattgattcttttatccatatgctcttttgtaaatccaaagttttccatcgaaaatactaactcactcgttgtatttgttgtaaagaattgtcctctaggatcttgacttacgtagccaatattttttgatatactttcttgtgttaaggattgtagcgagttattttcaaataaaatttccccaaccaattttccgtcataaagtcttggaataagtccattcattaactttaatagtgtggatttcccactcccagaagaaccagtaatcaatgtaagactacctttttttattgaaaaattaaggtcaacaagcgcttgttccttaacatccttatatgaaaaagaaacattgttaaattca

SEQ ID NO: 321 - DNA, 6720 bp; double-stranded, linear
tacagattacttgaaaatctttacgttccagttttattctntctaaaaaacgtactcactttttttcttagacttctttttttgattttcctcttttaggtcttgtcctttttgtcttcaaaatatttaaataaatccctttcaaaagtatttataggttttggacaataaggaatatcttttttcttcatataaacacctcattaaactattttatatcatcacattatcaaattaacaaatgtattaaaagaaagttttttattaaaactttcttggccttttgggagatttcagtgcgatttctttttattccaatacttttttgttggtcactttcgtatacccattctaagcgataatcggcgacaatgtttttacaacgaatggtaggacaaaacaatgggagaaaaaactttttctacagcaatcccttgttttcacctaccacatgttgtgaacccaaagcacgccgacgaacgcttagttatacgaaaatgacctaccaaaaacaaaaaaagtgaggtgaatagaaacaaaaagaaattgaaatctcccaaaaggtcgtccacctcgggggcaactttctgccgaaaatagtagttgggcctatgaacaaactaacgttactttttggtaaattattaaattaaccgaaaaaacagcatggtttctccccatcaaaaagcaaactgtaaaaacatatacttctatgagtggagaaactatgccaatgctaaatcaatttatcgrttatccmcttgcacgaaccaaagacagcattgttagaaaacaaattaacccgcccttatataccaataaattatacggtaatcgtagttgggatacattttactactatgataatcaactggtttatgaaagcagttattactaagagggaattttcttcttagttagcgttaaaaataacaaaaataaaaggaacaagaacaatgaaaacaataactctctatgaaatcttaggtgaagaagggtctgacaaatatatttctgtattcaaatctttaattgcttccaattttacagagaatgaagacattttatcaaggtgtcagctatttatacacaataatgtcagtgctgaagaaaatttataaagatgaaccagaaaaactgaaagagacggcaagcgcaaacttagaattttataacacgaatccacaaatgttgacatttattaccagcatgcagttagcgatgtatgataatgatcaaagtgtctcagatacacgcagcattaagatggcacttatgggactcctatcaggaatcggaaactcgattgctcgatttgggattgcctccttattttcaacaatatttgcaggattagcgatgaatggtctgggatttgctctgatgtttttttggttatcgatgttaatctcaatgctagtcatcaaattattaatgggagggatatttagggtttaaacttggaacgagtgtgatcgaaaccttaagtgataaaattggtaaaatttcttcagcagcaaatattggcggagtggctgttattgcggcattaaatacttcttttgttaaggcaaatatcgccattaagtattcacataatgtagaatctggtgaaaaacaagtaattgctattcaagatattttagataagattacgcccaaaatgcttccagtcattttaactattttagttttttatttgatcaaaaaaagaaaatggaacacgtatcaattgttattttttttattcgtgattgggattctagcctctgacttagggattttagcatagtaagtgagtgtagtaagggacagggttttcgatttcgagtaaaccttgtttccttatttataagttttctgagtgatgggcataatattttttcagttaacggaaataaaatttgaaagcgagaacacgatgaatcttcaaaaaatcgaaaactaccaactaaagttttatcagaaagatttactttcaggatatttggaaaaacattcaaaacttttggaaccactttttgaacgtacttattttctattaaaagatcagattatttacaatgatgcgakggatatggaagcctgttctattccgtattctctaaaagaaaatacacggaatcgataacatggagatgacccagaatggctctttatgttgaattgacaaagttttcttctagatttatcacaggcatacgcgttaataaaagaaaaatgctatttacaaaaatggtgcagtctgcttcttgattttattcaagaggaaggcgaaccaaattctactaataggaatgtttggcgacaccttgatgttggaattcgagtgatgaactggatgaagagtttgacttatatttctattgctgattataaacaattgggaattgataaagtgttgcgaaacgctttgctggttaatctcgagtatttggagaggagctatatcgataagtacagacttagtaattggggagtattggtaacgggtggaatggctgctatggatctatttcttccagaactagtgaacagagtaaactaatatgggaccggttaactgacttacaattttattcagatggcattcattgggaacagagcgcattgtatcaatatgaagttttgatgacgtatgtatatctattacagatttctgaatatcttgaaatatcattgccattggatcttcgaacgaaattgaagatacctatcttatctacctactatataacggataatcaagatgttctgaatcctatcaacgatagcgatcatgtcaattttcgatatgtatatgatagctatcgtaatatgaagaaagaacttggaaaacactgcagccagagaaacttttttcgtggtgaatcaagtggtttagtgttttataaaacagaggatatttattttacgctttttaatggattgcatggaagctcacatggtcatgcttctacagggagttttacgctacaattacagggtgatgatttgatatctgatagtggttgttacagttatgtcaacaaagcagagtggcttcaaccgaaggagtgtgattcgcataatacaatgtttattgcagagaattctcatactttagtactgatacatggggctacgggaaattaccaaccccattatttcagcgaataaaagaaattcctgtcggtttttttgcggaatgcggctggatagataaagatgatcagaacttaatgatttttaagcgtagttttatctacttgaaggccattaattcagtaattattattgatagttttataggtcaaaaagagactgaaattacgagtacttataatttagcacctacgctaaattgtcaaaaaagcagatcaattcaatttaactacaaattcacaaaaatataaactccttatagtatcaggtcaaacggatcaaactactgttgaaagatcagagatttataatcagctgatcgaactatatacgcttgaccaataaatttcattataaaacggggaaagaagttcaggataccgtgatttcccctttggaagatatccagattatgccagtaaaagtgaaccaagcgggagaagacgagccattctgtcaggccaaaggattttgcgtgatcactggagagaaaaaattttatatttttgttatatgtggagatattgttaaagggaataaattattagtgagtatggtcaattttttatggccgacttgttttgattgatcaaaatgaagcgattattcgtattaaataaaggaggagaagaatgaactttttaataactggacatagtgaatttgctattggaatgcaaagcgccttaacgatgattgcaggagaaatagaagatgtgatgtttatcccttttttagccaatgaaacgacagaagaatatcgtcaaaaaattgaatcttcaattgagatgtatgaacatgtcgtttgttttaccgatttattaggcggtacctcattcaaaaaatgtattgaattctctatgacaaaaaaacaagtttttgttataagtggtacaaacatagcgatgttattggaaggattgatgatgcggaattctggtattgagccgtttgaacttgccaaatcagtggtaaaagttggaaaaagtaatattgtgctttttgaaaaaaataatgaagctgaagaactatcagaagaggtaatataaaataatagttgtatagcgattatctaaagtgactggtcaaacgtttctaatcgtatatcagtcattcagtgagtataatttaaaccataacctaccaattgccaaggaaatatagcgtattttactcttgtcaattgacagtttatagtttagagatggctatgccaaacaactaatatatgaaaaaggaaactaaacatcattcctctattggagcaatttcttctttgatggcttataaaatgtactaatacttcatttgaggcagtagaaagttgagaaatagttgtttcttgtgctgtttttgtcgttattaagtttgccaaaaagcaactttcaaccaacatttttgtttcttatcatatcaagaacctgttttttatttttctataaaaaatgtcgaaattattaagttatcgacatgattttgttatatttaagataaattagtcaaaatttttgccaatattttttccaaatttttctttattttttctttccttacctttttcaattaatatcatttggtgttaatatatctctgataatacaaaaaaacattgacctatcataagataaagagtgatagtttaatactaaaagaggtatattaattttatttaaaaattgacattaatgactcttaatcagagggtctagggttcgaatccctatgcccccattgggtgccaaacccacgagaacggtattctgtcggcgtcttaggacgtttcgaagacggagtacgcgttctctttttttacataaaatgtcgtgtgtcgtgagagatacactagttaaatcggttaaagaatntacgcttagaagagcgagaaagtacgttatataaaaaaagttaaaaaaatttcaggctaaaaaagcgaatttaacaaaaagcgcactttttggttcctatgaaacgaaaaagtacgtactatacagcatgtacggcacggtatatgatgatatcagaaaacgttaaaggagcgaatcaaatgattacatcactagcagatacagtaacattaaacaacggcactaaaattccaggaatgggtctcggggtattccaaataccagatgaagagacagcaaaagtggtcgaagaagggattatcaatggttatcgtttaatcgatacagcgcaaatctatggcaatgaatctggcacaggagcgggaattaaagcaggcttagcggcaactggtttgaaccgtgaggacttatttgttacctcgaaagtttggaacgcgcatatttcctatgatgaaacaattcaagctttcaatgatagtttggaacgtttaggtttagattatttagatttgtatttaattcattggccaggaaataattcttacaaagaatcatggcaagctttagaaactttatatgctgaaggaaaagtgaaagcaattggtgtcagcaacttccaagttcatcatttagaagatttactttcttatgcaaaagttgttccggtaattaaccaagtggaactacatccaaaattggatcaaaaagaagtgcgtgatttctgtgaaaaacatgatatcaaagtccaagcttggtcaccattgatgcaaggccaattattatctaatgaaaccattttggcgattgctgagaaccataataaatcagcagcccaagtgattttacgttgggatattcaacaagatatcttattagcggtgaaatctgtccacaaagaacggatgattagcaatgcagcggtctttgattttgaactaagtgcagaagaaatggcacaaattaaccaattgaatgaatcgttacgtgtgggaccagatccagacacgtttgatttctaaaaattaactaggaggagatacaatgagtgaagcagttaaaggtttttcagtagtcaaccacgtggggattacagtcagtaatttggatgaatcagtgaagttttatgaagcattaacaggaacaaaaatcgcaaatcgtgatgaaattggtggaaaacggatggcccaaacacaagggttagatgatacattaatcaagtatgccaatgtgcatctagaaaacatcaatattgatttattagaatatgttaaaccaaaatcagaaaaagcttcttattccaacgaacaaattagtgcaatgcatatgtgtttcgaagtggaagatattgatgcagctgttgcacgtttaagagcgattggcgtagaacctgatggagagccgattacattccaaaaagaagatggcttgaagagcggttttggtacaggggttgcttactttaccgatccagatggtacaaatttagaattgattgctcctaaaggtccatttacacgaaattaagttaaaagactttcaaacmaacatcaaaaagaccccctcattctagtatcactaactagaatgggggcycttttattttttgagacagaagtcgctaaagaaaagatattccaaatccgtaattgatggtatactaaaacgtaacaaataaaggaggnnagacaattgatgcttagcgtcttaacag

SEQ ID NO: 322 - DNA, 5069 bp; double-stranded, linear
gtaagaggggagtatgaaaatatgggaaaagaatatcatgttgccgtggtaggagcaacaggtgctgtcgggacaagaatgattgaattgttagcagaaacaagtttgccaattgccagtgtgaggttattggcgtctaagcgttctgctgggacaagagattcagtttaaagggcaacctcttatcgtggaagaattagtcccggaatcatttgaaggaatcgatttagcattatttagtgctggtggggagtatttccgaaaagtttgcaccagaagcmgttaagcgcggactgtcgttgttgacaacactagccattttagaatggcaaaagatgttcctttagttgttccggaagtgaacccggaagccttgaaaaatcatcagggaatcatcgcaaatcccaattgttctacgattcaaatgatggtggccttagaaccaattcggcaagcgtttggcttagaacgaatcatcgtttcaacgtatcaagctgtgagtggcgcaggtatccgtgcaattaatgagctaaaagaacaagccgaagattttttagagggaaaacctgtcagcgaatggtcagctgaaattttaccagctggcagtgacgaaaaacattatccaattgcttttaatgcgttgcctcaaattgatgttttttcagaagcagggtatacctacgaagaatggaaaatgatgaatgaaacaaaaaaaatcatgggagacaacaagctaaaagtcgttgccacctgtgtccgtattccggtaatttcaggacattctgaatctgtttatatagaagtgaaacaagcagatgcatcggtctcagccatccaagaattaatggcgcaagctccaggtgtaattttgcaagatgagccaagtgaacaactatatccacaagcgctaaatagcgtcaaccagaaagaaacatttgtcggccgtattcgtcaagacgttgacgtgaagaacggtttccatttatggattgtgtcagacaacctattaaaaggagctgcttggaactcggtccaaattgctgaaacgctacacgaaatgaatttgcttcgtgtacctgaaaacgactagaaggtttgtattgtatactcgggagggaataggatggatttaacgaatgcaacaattattacggcaatggttacgccgtttcaagaatcgggagaaatagattttgataaactaccgcaattggtagactatttattggccaatcatacagaaggcgttattttagcaggaacaactggtgaatcacccacgttaactcatgaagaagaattacaattattccagcgaattattgaactgatcgatggacgtattccgattatttgtggtgtaggtacgaatgatacacgtgactcagtcgcttttgtgaaagagttagcgacaatcgctggtatcgatgctgttttggcggttgttccttattataataaaccaaatcaagaaggtatgtatcaacattttaaaaccatcgcagaagcaagtgaactgccaattattttgtacaatgttcctggtagaacggctgcatgtctagaagtggaaactactttgcgcttagcacaattrgaaaaaattgtggcaattaaagaatgtgcagggttagatgcaattactgagttgattgaaagagcgccaaaagactttctagtgtatactggagaagacgggttggcttttgccaccaaggcacttggcggacaaggggttatttcggtagccagtcatgtcttcggttcgtcaatgtatgagatgtatcaagcgctggagcaggggaacttgccggaagcggctaaaattcaacgacagttattaccaaaaatgaacgcattgttttcagtgccttcgccggcacccgtgaaagcggccttaaatcatttaggtattcctgttggaaatttacgtttacctctagttgcttgtacaccagaagaagagcaaagaattattcgcacgttagagatttaaagaacgtgtaatcatagagaggtgaaaagagtgagtacaataaaaatcgttccattaggcggcgttcgtgaaaatggaaaaaatatgtacgttgctgaagtggaagatgaaatttttgtactggattgtggattacaatatccagagaacgaacttttaggaattgacgtcgtcattccggattttacgtatttagaagaaaatagtgaacgaattgcaggggtctttttaacacatggccatgctgatgcaattggggccttaccgtatttgctttcaaaaattcaagtgcctgtttttgggacagaattaacgattgaactagcaaaactaagtgtcaacagtcatgcggaaacgaagaaatttaaagatttccatgtgattgacccgcatacagaaattgattttggtcaagcaacggtgagcttctttaaaacaacgcacaccattccagattcgattggcgttagcatcaaaacaaaagaaggcaacattgtttatactggtgattttaaatttgatcaaagtgcgattgagatgtatcaaaccgattatggccgcttggctgaaattgggaaagaaggcgtcttggcgctacttagtgattcatcaaatgctgaaaacccagcccaagttgcatcggaagcccaaatcgctgatgaagtgttcgacacgattcgctattgggaaggacgaatcatcgtggcatgtgtggcaagtaatttgcaacgggtccaacaagtattgaatgcagcggatcgttctggtcgtaaagtcgttttgacaggccaagattttgaacggattattcggacggcgatgaaattggaaaaattacaattgccaagtgaagatctattagtgaaaccaaaagaaatgaaaaaatatgcacccgaacagttattaattttagaaacaggccggatgggagaacctattaagtcacttcaaaaaatggctaataatacacatggtgtcgttcgaattgaagaaggcgatttagtttatattacgacaacgccgacaacggccatggaaacaacggttgccaaaacagaggatattgtctatcgggccggtgctacggtgaagcaaatttccgacaatttacgtgtgtctggtcacgctaatccgaatgacttgcaattgatgctgaacttaatgaaaccaaaatatttcattcctgtccaaggtgaataccgccagttagctgcgcatgcggacttagcacacgaaattggcatgccttataaagatatctttattacaggtcgtggggacattctagagtatacaaaaggtagaatgtcggtagctggcagcacaacggccgaaaatattatgattgacgggattggtgtcggcgatattggtaatatcgttttacgggatcgtcgtattctttccgaagatggtatttttgtggctgttgtgacaattaatcgtcgagaaaaacgaattgtttcaccagctaaaattacttctagaggttttgtttacgttaaaacaagtaaagacctaatgaaagaaagtagcaatattgttacagaaattgttgaaaagcatttagaaagtgacgatttcgaatggagcaaactgaaacaagaaatccgcgaaaacttaagccgttatttatttgaacaaaccaaacgtcgtcctgtgatcttaccagttatcatggaagcgacgcaacgcaagcgtcccaaaaataacgcatagttcgtcctgataaaagcaggtgattttaggagaaattcttctaaagtcatctgttcttttttgtaactttcttctataaatatggtactattaatcagagcgctgaataaaggaggcgattttagtggaagagattgtgttgttccataccaatgatcttcattctcactttgaaaattggcccaaaatacggcgtctggttaaagccaaacgttcgctgtaccaaaaagagggcaaaacagtcgtaaccattgatttaggtgacttttcagatcggtgtcatcctttgaccgaagcaacagatggtcgagcaaatgtagctataatgaatacattagcgtatgacctggttacaattggaaataatgaaggaatcggcaattcaaagaaacaattagagcatttatatgatcaggcaacatttgaagtggtcttagctaatttagaagaaccaaaaacccaaacgttaccagatttttgtcaagcatataaaattatgacaactaaagaaggcacaaagttagggtttattggcttaaccgcaccatttcctttaacgtataatcccaatggctggacaatcaaacaagtggaagcagtccttcctcaactgattacagaagttgcgcctcaatgtgatgttctcattttgcttagtcacttggggatagatactgattttatgattgcggcgaattatcctgaaattcaagtgattttaggttcccatacacatcatttatttaaagatggtgaaaaaattaatcatgtgcaactagcagctgctggcaaatatggacagtatattggtgaagtgcatctgtttgtggatgccgacacgaagcaagtcacaagttatgcgaaaaccattgaaacagcaagtttagaagagcaagcaacggatgccaaggaaattgcgggttacttaacggaaggtcatcgactattgcaagcgcagcaaattgcacaaatccctgaaaccttgtcaacggacttacggcaaccgcatgcctttataactgttgccttgaaggcgttaaaagaagcggggcagaccgaagcggctgtgttgaacaacgggttatttttagcagatttaccagaaggaataatcaatgcagaccaattacatgaggccttgcctcatccaatgcatttaatcaaggttaccttgaaagggtcagacatgagccgtttgattcgtgaaatggaaaaaagtcgtcaatttctgcggaaatttccgattcgcgggatgggcttccgcgggaaaatttttggcgaattatgttatgatgggattcgttttgagccaaatagccagaccgttttttggcaagggaaacctattcagcca

SEQ ID NO: 323 - DNA, 6279 bp; double-stranded, linear
attttaggattatggttaaatcaaacagaatctaaaaatcgctggatgcaagtatttgatgaactgaaagcacgtggtgtcgaagatgtctttttcatttcgatggacggtgtttctggcctcgaagaaggcgcaaaagcgatctttccatcggtaattgttcagcgctgtattgttcatcttgttcgaaatgcattgcgctatattccaagtaaggactataaggaagtctgccgagatatgaaaaagttctacggtgcttcttctctaaacgctgcacatgctgcttttggcagttttcaaaatcggtggtctcattattctggtgctgtagatgtctggaaacggaactttgcacatgttgaacaactatttgattatggtagtgccattcgaaaaattatgtacactaccaatgcggttgaaagtgtccactccagcttcagaaaagtcacaaaaaaaggagcgttctctaatgagaatgcactcctaaaactactttatttacgcacgaaagaattacacgcgaagtggtcaggtggtcgaattcaaaactgggctatggtgcttaagcagttaatgatcaacgagaccttctcctctagaatgaaaagtatgcgatttaccttccgtaacaacggtaggtttattcaactatgtgtccgatcaaaatttatctgatttcaaaatagccgagagaattatggtggttaaaaactcttaactatttaacttccacagtttagttgacaaaccccaattagttctctattttcacatactattttcaatagtgtgttttttatttatattcttagtcaagctaactgtatgagtatttagtaaagttgtttctttcaaaaattcagaagtcttatcmccttgtatacctaaccaaatcagtgtccaaggttcctttttatctgtataatacttcactttttgaccttgaaaaaaaagaaaatatcgtgttctataagttcaaaatgttgagcttctacttctaagaatcccttaccagataaaacataatgaaatatccatttttgttgaactatataattacgaatagaagaattgggatgataagattcatatccgcattgggaaagggaaattggagcagaaactgacttattatgataccaaaaatcctccattattatcctcctttatagaactaactatgaagaaaataccatgttttaagtatagattatcatgttcaaatggtcaaaaaaatctatactataattagatagcgctttctaactattttttgaaggagtcaatcataatgagtgagaaaataatgaatacaayccagaataaagttttacctatagctactaagattgggaatcaacgatttttagtagcgttaagagattcatttatgggtacgatgcctgtaataatgacaggttcggttgcaatattattaaatgcttttttagtagattttcctatgcaatttggctatgagaagattactgattattttcaatggttagtagatataaataatttgatatcaaaaggaagcatttctattgtttccttactgtttatttattgtttaggagtaaatattgctaaaatatataaaacagatactttgtcttcaggactagtcgccctgtcttcatttattatttctataagtaattctatgacttcaacttataatttatcgaataataataatattgacttaacaacactatttactgatgttgagggaataacagttacaggtaacagtttaaatgtgactatatcaggattgttgcctggtacacaaattaattcaaatggttattttaccgcaataatcataggttttttatcttcaattattttttgtaaactcatgaataaaaattggacaattaaattacctgatacagttcctccagctatcgctaaaccatttttatcaattattccggctttagtttctctttatataattgctattttgacatttttgttaaatagaattacaggaaaaattttaacagatgtaatttacgaaatattacaacgccctatgttaggactttcccaaagtttttttgttgttatattagttgctttcttagttcaatttttctggtttttcggtattcatggtggaaatgttatggcacctattatggaaggtgtatttggagtagcgcttttagttaatttagaagcttatcaaaacaatgaaactattccttatgtttggacaagtgtatcatacggatcgtttgtctggtatgcaactttaggtttattaattgcgattttttgggtatcaaaaaatagtcattataaagaagttgcaaaacttggaattatgcctgttttgtttaatattggtgaaccagtaatgtatggattacctactgtattaaatcctattttatttattccattkktgttatgtcctgctgtaatgtctagtgtggcttatttagtaacagattttaagttgggtttctccagtaacacaaaatgtaacttgggtaataccaccggtcttatatggattcttttcgacaggatttgattggagatcaattattttatcaattattaatttatttttaaccacgttaatttatttgccatttgttagaatggcaaataagaaaattggataatttttaagtaagtcgtagttagtgtgtattagaagtatgataagcctcatttttgatatattaaggaaggrgaagacatgcaaacgtttgagataaargargaatttttggtagatggaaaaccaactaaattgattagtggcgcaatccattattttcgcatgacaccggcacaatgggaagatagtttatacaatttgaaagcactgggtgcgaataccatagagacttatattccttggaatctgcatgagccagtggaaggcgtctatgactttgagggcatgaaagacatcgttgcttttgtgtcattggcgcaagaacttggcttgatggtgattttgcggccatctgtctatatttgtgcggaatgggaattcggcgggctacctgcttggttgctgaaagagcacgtgcgattgcgttcaactgatccacgatttattgcaaaagtccgtacttatttcagtgtgcttttaccaaaattagttcctttgcaagtgacacatggcggaccagtcatcatgatgcaagtcgaaaatgaatatggttcttatggcatggaaaaagagtatttgcggcaaacaaaacaggtgatggaagaatttggcatcgatgttccgttatttacgtcagatggtgcttgggaagaagtgctggatgtgggcacactgattgaagaggatgttttcgtgacaggaaatttcggcagtcattccaaagagaacgctacagtgatgaaagcatttatggcaaaacacgacaaaaagtggccgattatgtgcatggaatactgggacggttggttcaatcgttggggagaaccgattatcaagcgtgatggccaagatttagctaatgaagtcaaggatatgctagccttaggttcattgaatctctatatgttccatggcggaaccaattttggtttttataatggttgttctgctcgtggtgtgttggatttgccacaagtgactagctatgactacgatgcgctattgacggaagctggcgagccgactgagaaatacttccatgtacaaagagccattaaagaagtatgtcctgaagtgtggcaagccgagccccgcaggaaaacatttggttctttaggaacattccctgtgcaaaacagcgtctcactgttggcggtaaaagaccagatgatgacggcmcaagaaacgatgtatccaataacgatggaagaagcagaatctggttatgggtatatgctttattcagtaaacttaaaaaattatcatcacgaaaataagctcaaagttgtggaggccagtgaccgattgcatctttttgcagacggtagcctgcagacaattcaatatcaagaaaaccttagggaagaagtgatgatcaagggtacgccagagaaagaatggattgaactagatgttttagtagagaacttaggccgagtgaactatggctttaaattgaatgggccgacacaagtgaaaggcattcgtgggggaatcatgcaagacatcccattttcatcaaggctatcggcaatatgcattgacattgtcagcagatcaactcaaaaaaatcgattatactgccggtaaaaatccggcccagccttctttttatcaagctgaattcacattgactgacctcgcggatacatttatcgattgccgcagctatggcaaaggggtggtcatcgtcaacggtatcaatttaggtcgttactggcaaagaggaccgattcattccttgtattgtccgaaagagtttttgaagaaaggcacaaatgagatcgtgatttttgaaacggaagggatagaaattaatgagctcatcttttgtggacaaccgatagtcaagaaacttttgactaatgatttttctgaaataggttcaaatatccataaccatatagacagctagtttaaatttattgcagcaaaccaatcattgtatgtgtcgcgatttttccaaatctcaatacttattctaacgcatcacaaatatttatctcaacaagtctcgaatgatttttacttttcatttatggttcaagcagtgaataatttacactttcttttgagattgacttatattcgcgataaacatcctaaatgatagagataatttaagcatttgatcgttgataaaaggtataattatagattcatcacagatacattgcttttttcgaagaaactataaaaaatgagagtctaggttatttgagaatatcaattgagcaagtacaaataactccaaatttagtaatattcctaattgattattggtgagtaattaaaaaggaatactcaagctacatgtatagcatagaaaatcagcattcaatcagacaattaggattgaatgctgacttttttgttatattgatattttcaattatcttctttattttcttctagtttttcgaaaaataggtattctctgatcgttgtattagtggaaaggggataaaggagcatattgatcgtgcaacaaaacaacaatgagatatctacacaacaccaatttgatgcctactgtaaaaaagtattacgcaatgaagctaagtctattcgaaaacgaaacgataaaataaaagaaaatgaggaaccattaaatgatttaaatgaaggtaagtattcacaaactcatttagatgagcaagatgtttatttcttatttggaatggagatattaatttcagatcagaagttatcagcagcaattgatcagttatcggatacaaggaaaaagattgttttactttattattttgcaggttttaatgatactgagatcggtaaaattttcaacatgagtacaagtggtatctggtatcaacgaacgaaagcggttgaacaattgaaaatggaatatggcttatggtagacaaacaaaggaaccaacattacccattagttcctatatctattatcttatctgctttgaaagaagacccaatttcaatcaaaatgatacttaaacattaccacggttatataactaagttatgtttaaaaaatggttttaatgaggtggggcaatttattacctatgtagatgaatatrtgctaagacagctagaaattaaattgatagaggctatattgaaatttaaagttaactaattaaaaagtcccctttccacttttgctatctaaaagaatcttctaatatttgagagatatgttttttagttagaaaacctattgatcattgaaaattaaataaattctatcagtacgttaacacttcaaggagcatattttagttgcgccatgatctcttattgtaaagaaggagcgattaaaattctgaaatagtttttatagtcaataaaaagcgatgatttgaagttgaaataatgatacttccgtaaggctcgccgtaaacttggggagaggtgaaattcctatgtacttttgacaaaagtggctgatagattaattattgttaatagaaaggaagagacaatcatgtcgaagaataacaataaaagtaattcatcagagttagaaaaatatttgtttcatccagaaaagatagaggattctaataataaaatgaagaggataaatcaactaccattagttttaacgaataaagatttaaaagaacaatttcaaataag

SEQ ID NO: 324 - DNA, 5330 bp; double-stranded, linear
gcgttcatggaanccagaagagacttgtttcagcaacagataaaacaggtcaagatgtcccattcgaraaaatcactgtttcaggtcaagttgatactagcaaagcaggcgtttatccaatcatatacagttacgaaggtaaagaagaaacagcccatgtggccgtcaaacccgaccaatctaagttagaggttaaagatacaacgatttatgttggtgattcgtggaaaccagaagataatttcgtttcagcgacagatcgtgatggtcatgctatatcctttgataaggttcaagtaaaaggggaagttgatacaaagaaaacaggagagtaccagatttcctataccactgagccagttaatgaaaccaaaccagctgtgcagtcacgacttttctcaatgttttcaaacgaaacacctcgtcaattaacgacagtagcaactgttcatgtgattgatcgtaatcctacaccgctaccagataaaaatgagaacaaccagactagttcttcaacgaatcaaaccacgataaaaagtagtcagtatgtcacacacattgtgaaacctgacaagcaaggacgttatcccaaaacgggagaacaaactaatggtctatatcgtgtgctaggacttgttgtattacttattgtgattattagtggtatagtcatcaagaagaaacgaaaataattaaatgagcgtggggcaaaagtttaaagtaacttttgttccacgcttaaaagatgaataagtgcatgaatgagggtagctgtttccttggaaaataggaagttttacaagtgacttttattttaagaacacctattagcaggtttttctgttaagatagttatttttatgaaatagtttggaggaataataaacgagatgaaccagcgaactatttattatggtagtatcggcacagccttatttctttcttcaggaatgttgattgcttcagtgaatagctatgcaaacgaagcgacaacaccaggcaaatacaccgtgacttatgaagtggatggcaaaattgaaacagcaaccattacggtcaaagaaaatcaaacggaacttaaattaaaagacacgtttttaggagttaatcaagcatggtcaccattagacaatgtcgtttttctaaaagataaagagggtcgccctttaaatttagaaaatgtaattatagaaaataatgtaaatactcaaaaagtaggcctttattttgtaaccttccgttacgagtcatacctttctattgcgaakgtgtatgtcaaccctactaattttgctgcagaggggaatatgcttgcagagcttccttatagtcaagcaatgattggcccagaaagatcaattattgcctcgagacaggacaaggagcaacaaacaaaacaggagaaaaagaaaaataaaattgaacaggaacgagtaaataaaaaggtgctgttaaatgatgagttgttgaaaaaaatagatacgatagccccagtggaaattactggaggagcggcaagtgggtcctctcaatttggcaccactttaagcttcctgtcaggctcacttttgtatggaacaaggagagtttaaatggaattcttgttattagatgatcgggaaaatttaaaattagcgattattagaaagttagagcaacaatattcattttctgaacgaaaagatcgtttatgtaagcaattagctatttctccttatttgctagaacggaacataacagaaatcaatgcagatttgcaacgctttggtctgattaatgagatggaaatcagtgaaaaaaataatgaaattttgttatctcaaagccttcgtatttcttcaagtattattgaagaatattatttaaaagactcgttagaatttaatctattaaaaacgattttctttcatcagtttacctcaatcaaaaaatacggtgaaaagcacgggatgagtcgaacggttgtatataaaattgttgaccatatccggaaagaattaggtcaatacggtattaagttatccaaaaatttacaacttagcggcaatgaaatggcgattagacaatattttactatgctttattaccgaatttacaaagattctgaagaattatataatcaaacagatcttcscscagtgaaccaattattggctcaattgaaaggctcttatgaaaatatcactaattttcatttatttaaacattatgtattggtggcgttagaacgaacgcaaagaaaagctaattattttttatcccaagaagaaaatccattcgcttttgatgaagaaagttcgatttatcaagaaattcaaagttggatcaacgaaggantgaaggcgactcatgcagagaaaaacgcagaaattcaaggaattatcggcaatttaggtctatcatgaacttatttcgacatttgctgagtctcacaatgaggcaattacggctacgaaaacattattcttttcttatatgccgtttacaatttcggacgaagaattttatcaagaaattgttccgattatttatcaacatcgttttattacgccgttcatcgatatcaccttacgaattatggatttagaattttttcaggaacgctacccaattgtttttaatagctgtcgtcagtttttatttgcgttggattgctcggcgtttgagtttagtaagctttctttattttttgatttgctattagtgttatcccgtctttatgaccaaaggaatgaaaaaagcacgatcaatctttatgtgaattttacgcaaggagaaaaatatactcagtttatcaaagaacaaatcaaaatattcgaatctttcagcattcactttcattcagcgattcgaccagatactgatttagtagtttcggattatttaccaaaaacgttattttcagtaaaatgtttaatttggctagcgcccccgcgagccagtgactggcaaaattttggcaacgaaattgtccgaattaataaagagctacaacaaacgaaacaaagaaaaagcgaataaaaacagtcgcaacgtgttttagttgcgactgttttttgttactgaatgtttatagtaaactttctcattatcactgatgtaaaaaattttaaataaaagccaaataggattgaagaaaaagaaaaaattgctagtgaaggaccaattctctaaagtttttctcaaatatagtagaattcctttcttttcttctgtgagaaagatataataaaaaacgtatgaacaaaggaaaagggatgacgaatgaatagaaaagagaaaacaaatttagatagtcgaattgattacggcgtgatattaccagtttttcttttatcactaattggtatgctatcgctttacgtagcgctttacaatgatccaagcaaacctaaaattggtagcttgttaatgaaacaaggactgtggtatttagtcggaggattaagtattgtcattattatgcattttagctcaaaattactctggcggttaacgcccgttttttatgcacttggattagtattaatgggattamtactgaaattctatgaccccgtgctagcagagcaaacaggttctaaaaactggattcgctttggtggcaccacattccaaccatcggaattgatgaagattgcgtttattttgatgttggcctatatagtgaccatgcataatgttaaatatgtggaccgaacactcaaaagcgacttttggctaatcgctaaaatgctattagtggcgattccggtaattgttttagtacttttacaaaaagacttcgggacgatgttagttttcttagccatttttgggggagttttcttaatgtctggcattacttggaaaattattgtgccagtttttattttagctgctctagtgggggcaggaactatttacttgattacaacagaaacaggtagagatttattgtctaagttaggggtcgaagcctataaatttgatcggattgatttatggctaaatcctttccatacagatccagaccgctcattccaaccagcgctagcattaacagcaattggttctgggggccttttcggaaaaggctttaacgtgagtgatgtgtatgtccctgttcgtgagtcagatatgatttttacagttgttggtgaaaactttggctttattggtggctgtttcattattttgttgtattttattttaatctaccgcatgattcgcgtttgttttgatacaaataatgaattctatgcctacattgccacaggaattatcatgatgattttgttccatgtttttgaaaacattggagcgaatattggtttactaccattaactgggattccattaccgtttattagtcaaggtggttcttccattttaggtaacatgattggggtgggcttaattatgtccatgcgttaccaacaagaaacggttcgtaccagaagtggtcgttaaagaaagaagaaagaaggggtagaaatgtacacactttatgaatatcctaaatgctcaacttgtaaaaaagcgaaancgwggttagaccaacaaggcgttaaataccaagcaattgatattaaagcaacaccgcctagtagtgaacaattagcaaaatggatgaaagagaccggcttgcctgttcgtcgtttttttaacacaagcggggttttatatagagaacaaggcttaaaagatcttgttgacagtttttctattgaagaagcaagtcagcgtttagctgcggatggcatgttgattaagcgtccaattctcttaaaagacaatacatttctaacgaatggttttaaagaagcagattacgaaggagtgcttggaaaatgagtgaaatgaaacaaatcgatcaattatggatcttaccaacagaagcaggttataaaattggtttaaccgccgaagcccaagaggatttagggaagattacttttgcgacatttcccaaagtcggacaaacattagctaaaggtgattctttaattgaattagaagcagaaaaagcagtcagtgaattcagtagtccattatctggtaaggtagttgcgattaatgaagcggctgatcaagagccaagtgcattagatgaagaaaatgcctggattgctgttttagcagatgttgaaccaacagaatttgaaaatctttagtcttacgttgacaaggccaatgattattgctataattttctcaatctaatcaaaagaaagctttgaaaagaagagtacatgttaaggacgtttgaagagagccckgtttgctgagaatgggtaacagatttaagatggragatggtcyttgrgcagagtaagtgagcgaagcag

SEQ ID NO: 325 - DNA, 547 bp; double-stranded, linear
tgacagrgacaattkgtkgaagctttcaggaatattggctacacttgctccgaataattgtaaaaaagtatcgttaaaaataacaccttttaaccctaggaacaatcctgttgctgcaattactggaacaattggaatgaatatttcacttaaaatgcgcattgttttgcgcatgcctgtttcattattttttaaaattgctgtttgctctgcttttgacacaacattgattccaagtttttctatttcatcatacactttagtcacaataccagttcctaaaatcacttggtattgaccaccattataaaaaacccccttgactaaatcgattttttctagttgtttaccatctacttgttcatggtccttcaaaataaaacgtaaccgcgtttgacaatgggtgaccgatataatgttatccataccgattaattgaataatgtctttggctgcctgctgataattttctgccatgtkatactcctcctagctactcattgatagtagncagtagtccttgatagctnttgaataatgncccngc

SEQ ID NO: 326 - DNA, 5354 bp; double-stranded, linear
ccttgttcatttgacaccgacgtatttaagtcgtttattaaaagaggagtttggtattccctttagtcaattttatcgacaattaaaaatcacatgggctaaacagcttcttttggagacagataaaacaattgcccaaatcagtgaagatttagggtttgttgaagatagctattttgtccggatctttaaacaagaaacgggtgaaacaccccttaaataccgtaaaagaaagaacagagcataaaaaaacaacgactcctagaagtcgttgtttttttacaccttttgctcttgctgtggctaatgcaacaagtgcaaaaggcgcattatatctgtcgtgcgacaaagtgatactattaaatatgaattggtaaacctaaagccaattcagctgtatccatagtaatttcgcccaatgatgggtgtgggtggattgttaaagcaatgtcttctgcattcatgccagattcaatagctaaagctaattcagaaatcatgtcacttgcaccgacaccggcaatttgtgcaccgatgatgacattgtcttctacagttgtaactaaacgcatgaatccttcagttttatctaaagagattgcacggccgttaccagcaaatgggaatttgtagccttttgcttcgattcccgcttcttttgcttctgcaacagtcataccaacgcttgccaattctggatcagtaaaggcaacagctggcattgctttgtaatcaactgcaactttcttaccagaaattgcttcagcagcaatttttgcttcgtagcttgctttatgcgctaacgcagcacctggtacgatgtcgccgattgcgaagatgtttttcacgttagtacgtccttggttgtcaactgggattaaaccacgttcgccaatttcaacgcccgcttgttctaagcctaagtcgtctgtgtttggacgacgtccaacagtgaccattacgtaatctgcttcaacactttcttcttttccgttaacttcatatttaacagtgacgctatcgccattgtcaacagcttctttagccattgcagaagtcacgattgttacgtttttcttcttgaagtggtctgtgacaactttaaccatatctttttcataagttggtaaaattgatgggctaccttctaaaattgttacttctgaacctaagttagcataagcgccacctaattcagcaccgatgacaccgccaccgataataacgaattttttaggaacttcttttaagtttaaaccgcctgtagaatctaacacgcgtccgccaaatttgaatcctgggatttcaattggacgagaacctgttgctacaatagcattattgaatgagtaagtttgtgctgagtctgggtgaataacacgcaatgtattttcgtcaacgaagaatgcttcgccttcaataatttctactttgtgttttttcaataacatgccaacgccgcctgttaatgattttacaactgtgttatctttccagtcttgtgtttttgcaaagtctaattcgactcctttagctgttacaccaaaagttgaagaatcttgtgcttcttggtaatgatgtccagcagcaattaaagcttttgaaggaatacatccaacgtttaaacaaacgcctccgatgtattcacgttcgataatcgcaactttttgacccatttctgcggcacgaattgcggcaacgtatcctccaggaccagctccgattacgactgtatctagttcaatggcgaaatctcctactaccatttgttaatcatccttccattaatagtaattctggatcagctaataagcgtttaatgttgttcattgctttttgagcagttgcgccgtcaacgatacggtggtcaaagcttaatgataatttcatcatgcgtcccacaacgatttcgccgtctgcattaacaactggttcttgtgcaattgtaccaacgcctaaaatagcaacttcagggtagttgattactggtgtaaaccagccgccaccgactgaaccaatgttactaattgtgattgtaccatcacgcatatcttgtgcagttaatttaccttcgatagccaatgctgctttttcgttgatttcatcagcgatagcaaacatgctcttcgtattagcatttttaacatttggtacatataagccatgatctgtatcagtagcgataccaatgttaaagtaatttttgtaaacaatttcttgtgctgcgtcatcgattgatgcattcaagattgggaatttttgaacagttgaagtcaatgcttttacaacgtatggtaagaatgttaattttgtaccatttgcagcagcaacatctttaaatttcttacggtgatcccataatttagaaacttctacttcatcatgtaatgttacgtgaggagcagtgtgtttgctgttaaccattgctttagcaattgctttacgtgttggtgtcattttttcacgtgtttccatttcgcctaaatcagaagtaaaggcttttggcgctgctttaggtgcagctgcttccgctttaggtgctgcttctgttgcggcagcttcagtagctggggctgcttgagaaccaccagagacaaaggcatcaatatccgctttaatgacacggccacctttaccagttgcagttacttgtgtaatatcaacgtctttttcacgcgcatactgacgaacagatggcattgctaaaacgcgtttgtttggatcagcggctgcaactacgcctgttgaagcggctggagctgatgcttccgctttaggagcgtcagtagctggtgctgcgactgacggtgctgctgaattatgaccaggtgcgtcaatttcaactaacacgtcacccacattggcaactgttccttctggtacaacgatattttttacagtacctgttactggtgatggaatttcttctactgatttgtcattttgkacttctaataatgaatcatcttcatwaattgtgtcgcccgctttaacgaaccatttaacgatttncnttcggcaattccttcaccgatgtctggtaattgaattggaaaaatccgccagctgcttcggttgttggtacagcagcaggttgtgctggtgtttgttcttgtgcaggagctgctggtgctgcatcgttatcttcgtgaccaggtgcgtcgatttcgaytaacacgtcaccaacgtttgcaactgttccttctggtacaacgatattttttacagtacctgttactggtgatggaatttcttccactgatttgtcattttgtacttctaataacgtatcgtcttcgttgattgtatcgccaggttttacaaaccatttaacgattttccttcggcaatcccttcaccgatatccggtaatttaaactgataagccattttttaagtcttcccttcttcgttggatctgtctattttcttaggagcaaaacgcggggaaacgactatagtagctgaacatttcatgcctatagccgtaatccacctgtttaattcttcgtttatctacttcgaataactattaaaattcgacgatttctctagcttttgcttcgatatctttcgcatttggtaaccagatattttctgcttgtccgaatgggaagattgtatctggagcagatacacgtccgattggtgcttctaatgataatacggcacgttcagaaatttcagaaacaaccatagcgccaacgccagcttgtttttgtgcttcttgaacgacaaccacacggccagttttttcaacagagttaataattgtttccacatctaaaggagccactgtacgtaagtcaatgatttctgctgaaatattgtctttcgctaagctatcagctgctttaatcgcttcacgaaccatagcaccgtaagtgatgattgatacgtctgttccttcacgagttacagccgctttatctaaaggcacttcataagcttcgtctggcacttcctcacggaatgaacggtataatttcatgtgctctaagtaaacaactggatcgttgctacgaatagatgaaattaatagtccttttgcatcgtaagggtttgatggaataacaacacgaacacctggtgattgtgcgattaatccttctaagttatctgagtgaagttctggtgtatgaacaccaccaccaaatggggcacgaacagtaattggcatattacgagttccacccatacggtaacgcgtacgagccatttgaccaacgatttcgtcaaatacttcaaaaacgaaaccaaagaattggatttcaggaactggacggtaaccttgcaaggcaagaccgaaagccaatccaccgataccagattcagctaaaggtgtatcgaagacgcggtcttcaccaaatttttcttgtaaaccttcagttgcacggaaaaccccaccgttgttaccaacgtcttcaccgaagattaagacattttcgtctttctctaattcaagagctaaggcatctgtaattgcttggatcatagttttttgtgccatttttatttcgactccttcgcttcataaaatgcaatttgttctttaattgtttgaggttgaacttcaaacatatttttcaagaaatcagaaactttttgttttggcgctttatccgcttctgcaatcgctactttgatttcttcttttgttttttcaataatttcttcttcttttgcttcagaccataagcctttatctgttagatatttacggaaacgagtcaatggatctttttgtacccattcgtcatccatttcttttgaacggtaacgtgttggatcgtctccagataaagtatgtggaccataacgataagttaatgtttcaattaaaactggaccgtttcctgcagctgaccaatcgcgtgcttcttttgcaattgcgtaaactgctaatggatccataccatcaacttgaataccaggaattcctgctgcaacagctttttgagctaaagttttagccgctgtttgtttttcacgaggtgtagaaatcgcaaaaccattgttttggataatgaagacaccgtttgcttggtaagcaccagcaaagttaattgcttcatagaagtccccttgtgaagaaccgccgtcaccagtataagtgaagacaacattttcttttccacgttttttcaatcctaaagcaacaccagctgcttggatgtattgagcaccaatgataatttgtggtggtaatgcatttaaatcttccgcgtagtagttccctgctacgtgaccacgagaccataagaaagcttctcttaatggtaaaccatgttgtactaattgaggtacatccacggtaacctggtagtaagtagtcttctttttccattgcaaat

SEQ ID NO: 327 - DNA, 6005 bp; double-stranded, linear
cgtaatcttttaaaatgacaagtttagaacagagagatgagtgcggacacttatttttctgttctttttctttctgmaaaagtctttgaaacttatcatttcggaaggttttcttttgagaatatgatagaatgaagctgaggtgagcgaakggncaaaaaaaatcaatttaccgaagccgttattttcagaaaaaggaaaacgggcggtccttttattacacgcttattctggcagcagtaatgatgtacggatgttaagcagacgtttagaaanagaaaattatactgtctattcgcctaatttttcaggacatggcacgctagttcctgaagatattttagatcaaacaacggaacaatggtggcaagatacacaagaagcagtcgcttttttgagagaaagaggctaccaagaaattgccatttttggtttatcaatgggcgggattttcagtatgcatgcattaacggaacaattaacaggattaattggtggtggatttttctgttcaccgatctaccctgtcgaaaataaagtcccagaaaattttgtattatacgcagaaaacgtgatgaaaatcgcagaagttcctgcagaggaacaacaaagccggttgcaatcgattgagcaacgagtcaaacaacaattaggagcgattgaaacgattgctagtcagacggctgacaaactaaacaaaatccacgcacctcttttcttagcgcaagctggcaaagatgaaatgattgagccaatgggcgtctatcaaacggcccaagcactaacacaagcacgtgtgaccttacaatggtacccaaacagcggacatgtcattacggtgagtggagaacacaaacaattagagcaagatgtggtgcaatttttagcaacactaccttggaatgaggagaaataatgacaaaacaaacaattaaagagcaaattttacatttcatggaaagccaaaaaaagaaaagcttttcaatggaagaaattgcacaaggcttgaatttagaaaaaagttcagattttaaaattttagtgcaaaccattgcacaaatggaacgagaaaagtcagttagtttcaacaaaaaaggcaaagtcctgttaccaatgaaagacttattaatagaaggaacgtttcgtgcaaatgaacgaggctttggttttgtaaccatcgatcctgaagaaccagatgtttatattccgaaagaggcaacgaactttgcaatggatggagatacggttttaatcgacgtgatccaacatgcggatcctttttcagatcgcggcgcagaaggtaaagtcaaagaaattaaagagcgagcagtgagccaagttgtcggagaatttgtggcatatagtgaagaagaaatggcagaaatgggactgtatggctacatgattcccaaagataagaaattgaatcagtatactgtatcaattgcacctgaagggattaagccagtagatggtagcattgtcattgctgaaattacctattatccagatcaagaatatccaacgagtatggaaggactagtcaaacaagtgattggtcataaaaatgatccaggaatggatattttatcaatcgtggtggctcatggaattcccacagcatttcctgatgaagttttggctgaagcggaccaagtaccagaaactattgcagaaagcgatttagtcggtcgtcgggatttacgtgatcagttgattgtgacgattgatggagaagatgcgaaagatttagatgatgcagtaacggtacaaaagttagcaaatggcaatttctttttaggggtgcatattgcagatgtttcttattatgtaactgaaggaagccaattggatatggaagcgtatgaacgtggtacaagtgtctatttgacagaccgagttgtgccaatgattccgcagcgattatcaaatgggatttgttcgctaaacccacatgttccacgtttaaccatgagttgtgagatggaaattacaccagaaggagaagttatttcgcatgaaattttccaaagtgtaatccaaacaacggagcgaatgacctatacagcagtcaatgaaattttagaagagcaaaaacctgaaacgttagaacgctacaaagaactagttcccatgtttaaagagatgggtgagctgcaccatatattagaagagatgcgtatgcgccgtggtgcgatttcttttgaagatcgtgaagccaaagtcctagttgatgaaaatggtcatcccaaagatattcttttacgcacgcgtggtgtgggtgaacgattaattgaatcctttatgttggcagcgaatgaaactgtggcgcgtcattatcatgacttaaaactgccatttatttatcggattcatgaacaaccaaaagaagaaaaaatgcaacgtttctttgactttgctgcagtacttggcattcttgttaaaggaacaaaagaaaacatttcaccgaaagatttacaaaaagttttagagcaagttgaaaataagccggaagaagtggttatcaatacgatgttgctaagaagtatgcaacaagcgaaatactcagaagacaactacggacactatgggttggctgctgaatattatacgcatttcacttcaccaatacgtcgttatccagatttaattgtgcatcgtttgattcgcagctatagccaagatcaatctgaaaaaaatcaagaaaaatggaacgaagcattaccagaaattgccaatcatagttcaagtatggaacgtcgcgcagttgatgcagagcgtgaagtggacgccatgaagaaagccgaatttatggtagataaagtgggagaaacgtatgacgggattatcagctcagtcacaaaatttggtatctttgtggaactgcctaatacaatagaaggcttgattcacgtgaacaacttaaaacaagattatttccactttattgaaaatcatatggcgttagttggtgaacggacgggaatgactttgaaaattggtcagaaagttcaaatccgtgttgaaaaagctgatccagaaacaagagaagttgattttgaattgatttcagctgaggaagtcgcgccagtcgaaggaccaaaaggacgtaaaaaaggcaaagccaattcttcaactcgttcaaataatcmacgaagaaataaaaaagatgaatcatttgatggtaagaaaaagaaaaataagaaaaaaggcaaaggcaaaaaacaacctttttataaagaagcaatgaaacaaaaaaataaaaaagggaaaaagaagaagtagaggaggtcgcttatgccaaaaggggaaggaaaattaatcgcacaaaaccgcaaagctagacatgattattcaattatcgatacggttgaagctgggcttgttttacaaggaacagaaatcaaatctattcgaaatggtcgtatcaatttaaaagatggttttgcacgaattcgaaacggagaagcctttttgtataatgttcatattagtccatatgaacaaggcaatatttttaatcatgacccattacgtaccagaaaattattattacacaaaaaacaaattaataagttaatcggcgaaaccaaaaatacaggtatcacattagtacctttgaaggtctatattaaagacggctatgccaaagttttgattggtttagctaaagggaaaaagcagtacgacaagcgtgaagacttgaaacgtaaggaagttgaccgacaaatcagccgaacattaaaaaataaccgacgttaaaaatgtaaatttattctttttcgcatatttgcttgcctttcttcggattaggtgtaaaatctggtaagtgttgagtaaatgaatgtaaatgattcattttttaatcgcttcggaaagcagtaccaccctgcattagattggtttatggaaaaggttttccaaccaattttcaacacatgaaattttaaaagtaaactatttgtaaattatcaacaagtggtggtacgatagctttgccagggattatcactcaggagtaggatgaaacttctgaaagattgttggaaaagaggtgaattgatttggaagagaagaaattactcttcaatatcggaccaatttggtttgatggaaccattgttttgatggtgctgttgacgtgtatcattgttttcgcctttgtctatgcttgtacgagaaatatgaagctacgacctaaaggcaaacaaacggtcatcgaatggttagtggattttattcgtggaatcattacagacaatttacctcgtaaagaagtgagcaattttcatttaatggcgtttaccctcttcatgtttgtacttgtttcaaacatcttgggtctcgttacaaaaatcgttgtgggcgacgatctcagcgtttggaaaagtccaaccgccgatccaatcgtaaccttaacgttagcgatgatgatgattgtcttaacacacttctttggtatgaaacgctttggttttaaaggctatctagttaatagttatttaagacccgttggtttcttactaccggtaaaattaatggaagaattcacgaatctattaacattaggcttgcgtttgtacggaaacatttttgccggcgaagttctattgggcttaattgctggaaccgtagcaagcgtcggattatgggttatcccactagcaattccgctagaaatgatttgggtagcattctcaatctttattggatgtatccaagcgtttatctttgtgacactttcaatggtttatatgtcacacaaaattgaaacagaagaataatcaagaaatacgaaggacaaaaattatcttttaggaggattttacacaatggaaggattaaattttatcgcagcagcaattgcaattttcggttcagctatcggagccgctatcggtaacggacaagttatttcaaaaacaatcgagtcaatgactcgtcaaccagaaatgtctggtcaattaagaacaacaatgtttatcggggtcgctttaatcgaagctgtgccaattttaggtgtcgttgtttctttattacttttattcagataagcaataaaatggaggcaggacgctgattattatcgggaccgtcactgctttcttctatctttagccttttcaatagctggtgataaagcagttgaagaagctaaatcgatttttgcaggaaaggaagttgagacttcatgctacttactacattggtagtcggtgaaacggctcctagtaccacactaggcacgatgattgttgtcagtggtgcatttttaatcttgatgctcttattaaagaaatatgcatggggagcaatcgtagatattttgacacaacgtgaagaaaaaattgccaacgatttagactctgcagaacaatctcgcgtagcagcagcgaaaatggaaaaagaacgtcaacaacaattactttcttccagatcagaagcagctgaaattattaaaaacgcgaaagaaagtggagaacagactcgccaaaaaacattaaaagaaacaactgcggaagttactcgcttacgcgaaaaagctcggacagatatttctcaagaacgtgaagaagcattgtcttcagtaaaaaatgaagtggcagatctttctcttcaaattgcagccaaaattttaaataaagaattaacaccagatgcacatgaagcattgattgattcttatattgaaagtttaggtaaagcaaatgaaactagataaatatacagttggtaaacgctacggcaaggctttgtttgagttggcagttgaaaagaaccaagctgaagcamtttatcaagaattattgacgcttcgcgaagtctatcaccaagtacctggtattggcgatattttaagtgatgatcgcttagagccttatgaaaaagacagcatcatggnaaaactagtaacaggttttagtgaaatgatgccaaantttttgcgagtggtttacgaatatcgtngcatgtacgatctgctcttgatgattganggatatgaa

SEQ ID NO: 328 - DNA, 643 bp; double-stranded, linear
ttcgttgcaacagagttttcatttttcttaggaattccagtaatgtttggagcaagttttttaaaaatctttaaattcttggccaaaggaaatacgtttgggtcagaagaaatcattattttaataactggctctattgttgccttcgttgtttccatcattgcgattaaattcttattgaattacttgaagaaaaacgattttacagttttcggttggtatcgcgtaattttaggtgcgattttaattggctactggttattctcataaaaataaaaccgttgctttcaacagtgaaagcaacggttttatttttttaaatcaccaaacgttattcgctcaatcccctgttcttcaaaccactgacgaacacgaggatcacaaatcgttgctaattctttgcagcgtaaagtggtatatgaagaattatctaacacaaattgatccaaatacccaacatcaaaatgcatctcagcaattgccgattccggcatccgtaataaaccaaagtcatcttctaaaaaattctccactgatacgccttcgtgaatataagatagcgccccagactctaacaaatgtgttacctggaaataaccttgttgcggkggatawtctttttcccccactnataattncaggg

SEQ ID NO: 329 - DNA, 3384 bp; double-stranded, linear
tttggcaaactcttcattatacatgttaataagcgcattaatatgcggctgaataatttcttcaaataacgcttccttagaagtaaaatgtttataaaaagcacccgtagttacgcctgcggtcaagcacagttgccttatcttagtttgctgaaatccttctttttcaaaatggcttagtccactttctattaatttttggtgagttgtaatataatctctggtttctatgggtacttcctcctaataagatgaattaactatattatcttacacaggacttgaagtttcaatcgttaacgtctattactgaactcattccttagagctaaactaatgagaaagagcaaaataactgatacaaaaagcaatcctacaagaattaatagactcatctaaatcattcaccttttctaaaataatccgagaaagatttaaaaaaattatatccagctattaggataagtcctatcataatcactccaatagccattttcttatcctccctaaaaataaagtcttttacttaaaaccttttttgtaatcgtcaataaattttttccctttatcagttaattgaaatcctatatctaaatagtcctcatatctaagtttagccagcatctcacttacagatgctggactaacacttagaacttttgctaaatcattattttttaatttcttttttctttttgataattcctgaattgctagtaaataaattagtatagtagttgttttaatttgtaccatacctaccctccaaattatttcgaaaggccttcagcaattttatccaggttccatttcatcatcgcatagtaactatcaccatcttgtcctttttctgcaattgaatcagtaaaaatcgttgaatagataggaatattggtatcttttgatactgttttcatcggtctatcgtccacactactttctacgaataaggagggaacttttgttgtgcgtaatttttcaactaagtgttttatttgatctggtgttccttcttcttcagtgttgatttcccaaatgtaagcagaaggcacattatacgctttcgagaaatatttaaagcatccttcacttgtaacaatcatttttttatcattcggaattgaagcaaatttagatttagcttctttgtctagagaatccaacttttcaatatacttatctagattttctttatagaattttttattatcaggatctttttccgctaaccatttttcaatatttttagcgtaaataataccgttttctaaatttaaccaagcatggggatcttccttccctttctcactctgaccctctaagtaaataacatctatgccatcacttgctgcaaaatagtctttgttttcctctttgttcgcatkttttactaattttgtaaaccaagcatttcctccagtktccaagttaacaccgttataaaaaatcaaatctgcttttgaagttttttgaacatcttcaggcaaaggttcatattcgtggggatcttcccaataggtacgatactgtgtaaatcaattttatcttttgctatattttcagtaatatctgctaaaatcgaattagtaactactacctttaatttttcgttcgaagccactgtatctttgtctttactatttgttgaacatgccccgaatataaaaagagcaatcaacattcccagacttcccactactactttccattttctcatcataacgatctctccttctttcttaaaaatttttgttttggtgagattagaaaactaattacaaataaggatgccgctgttaaaacaatacttgatcctgcggctatgttaaaactataaccaataaataatccaagcaatgatgaacttgctccgactgttgcagaaataaatatcatagttttcaagctatttgcatataaatatgctgtagctgctggcgtaattaacattgcaacaattaatatagttcctacactttgcatagctgttactgctactaaagttaatagaaccatcaatagataatgataaaaattgacattcatccccattgcttttgccattaatggatcaaaagaagtgattaataattctttaaaaaatagaactactataaccaacactaaaacagaaacgccaattgtaatccacttatcaatatcttgtacagctaaaatatttccaaacaagatatgaaataaatcggttgagctatttgcaacacctataaggataactcctagtgctaaaaaagaactgaaagtaataccaattgctgtatctccttttattacactattgctttttataaaagtaataatgntagragctaatagaccaaatacaatcgcaccaataaaaaagttaatgcctaaaatataagaaattgctactcctggcaaaacagcatgagaaatagctcgcccataagagacattcctcttaaaataataaaacaacctactgttccagaaacaatccctataactacagatgtaattagagcattctgtaaaaagtgaaagtcatacagaccattaataaaattttgaagcatattattccccctctccaataaatatagtatctccataggctttttttaaattctcttcattaaatacagattctacacttccgtgagcaattagatttcgattcaaaagaataatattatcaaaatacttctttaccytgcttaawtcatgatgcacaattagcactgtttttccctgatgtttcaattcttttaacgtatccataattattcgttcactaactaagtctatccctacaaatggttcatctaaaaatataaaatccgcattttgagcaagacatcttgctaaaagtacacgttgaaattgtcctccagataattctcctatttgatgattagaatattttcccatatcgaccttttccaaagcctttgaaactttttgccattctgcatttttaattctttgaaaaactttcattccggcatatgttcccatagatacacattcttttacttttattggaaaagtaaaatcaatatcagctttttgttctacatatgcaatctttaccagttttttattgatatcttcattattaatggagacctctccctgatgagggataatatttaacattgctttaagcaaagtagattttccagcaccatttggaccaaaaatacctgttaaagcaccttcttgtatttttaacgaaatctcgttcaatgctaaaaaatcgttataacaaacmngtaagctttttcacttctaacataactttctccttctaaatgataatgattatcacgattgtatggtacacaaaaataatatttagtcaagcctaaaattttaaattgggattttncggtggttgga

SEQ ID NO: 330 - DNA, 7213 bp; double-stranded, linear
anaatataaatcctgagtagttgcactgagaaagccaaggattaaaacttcaaaggaaaagcctgggacatcaatcattttggatttttgttccaggcttaaaaatgataaagggtgggagcagaagcaactactaacaaataagacttttctttacgacaaataatgcggatcggtcttagtcgtgctaatgttgtcgcggatttttttcaaggaatcggcattttgatcaaaattgtgatacatcgtatttgtatataaaatatccattaccgttaagtaactgatccgtgaagccaaggattccgcacgaaacaagccttcttcggtgacgacaataattgcttcgtcggacaagcctgccaactctgaaccgctgttaccagttaacgtaatcatttttgcgttggtttttttaacttgtcgtgctaggttgattgattctttggttttgcctgaatgggaaaaaataaacacgcaatcttcactggttaattttgtgacaaaacttaactgcatgtggtaatcaaaaatgtagttgcaccgatagttagtccgaatgaatttatggaaactatcaaaagccacaatcgaggacccgccttgcccaaaaaaatgaagcgttttggcagagtacatcaaagccaacacgttatctaacagctcctttgttaagaactgtgtggcgttactgagggaataaatattggcttgtaagacttttttagcaatggtaatactatcatcatctggtgaaatatcatcggcgccattcacgctattgacgttttgaaaagtcggctgataattagaatttctggcgatatcaattttaaattcttggaacccagaatagccaatcttttttacaaattgatacacggaagattgggagacgccaatttcgttggcaagactttctaacgtcatttgtgtcaataatgattcagaatgaacaaagtaatcggaaattttcttttctgtgaggctcaaattcggttttttgatccgaatccgttgatccaaatagtggkttttcattaacacgttcctccaatcttatttttttaaaaataaaatgaatgccttttcattgttggtatagactgattatagtggaaaaagaggacaaatacaatttctctttttctccacaaaaaagaaattctttaaaaaaagccaaaaaaaaataaataatcttttttctgaaaaatgaaggggtcttgaaaagacttctctcaactaaagaaagtagccagtaaaaagaacgtgataccaagagatttacttgtgttttttgtatgaaagctccttaaaaataaaaacgttttaccttttgagtaggcaagatttttgctaaaaaataaaaaatattttttaattagtgtaatcgtttacattattttttttatcctttatgattgaagtatcaaaagaggcaggtgaaagaaaaatggacattggctttattggacttgggaaaatgggtttgaacatggcattaaatgttcacgaacaaggctggcccattattggctttgatgtaacaaaggaagcaagagcgactgctagagaacaaggtctttccgttgtagattcgttgtcagaattattgaaagcgcttaacaaaaggaaggtgatttttttaagtacccccgctggtcagattaccaatcaattagtggcagaattggtagagcaattagcaccagaggatatcattgtggatagtggcaattcaaattttcatgatagtgttgcgaatgctcagcttgctaaggaaaaaggaatttattttattgattgtggtacttctggtggcatcaaaggagcgcgggaaggagcgtgtttaatggttggcggtgcgcctgaagctgtcaaagtgttaaccccattttttgaagatttagcttgtgaacaagggtatctttatgctgggaaatcaggagctggtcactatttgaaaatggtgcataacgggattgagtacgtcatgatgcaagccatgggcgaaggattcaatttattagaagctgccgaatatgattttgcgttggagaaagtagccgatgtgtggaatcacggctcgattattgaagctcgcttgatgggcttagcgaaagaggtttttgcggaaaatcctacgttagccaatctagaagggaaagtggcagcaaatggcgaagcnaaatggatgattgaagaagcattgcgtttggagatgcccgtcccaactacggcgttgtccttatttactcgaaatgaaagtatgctagcaaatcatttttcaaacaaagtggtcgcttctttgcgacaaggatttggcgggcatgaagtcgtaaaaagtcagtaaaggagtttagtcatgttaaaaaaacaaaaaattgccatagtgaattccagtagttttggtcaaatttttcctgaacacttgacgcgcttagaaaaaataggcaccgtgaagcattttacagtcgacagtgaaattggtggcaaagagttagcggaacgtttacaaggatatacgattattattgctagcgtgacgccatttttcacgaaagaattttttgaacataaagatgaattgttgctgatttctcgccatggtattgggtataacaacatcgatttagacgctgcaaaacagcacgacacaattgtttccatcatcccagctttagtagaacgagatgccgtggcggaaaacaatgtcacaaatttgctagctgttttacgacaaaccgtggctgcagatgccagcgttaaagcggatcaatgggaaaaacgagcgaattttatcggtcggacgttatttaacaaaactgtgggtgtcattggtgttgggaacacaggaagttgtgtcgtggagacgttacgaaacggatttcgctgtgacgtgttagcgtatgatccctataaatccgccacttatctgcaaagttatggagccaaaaaagtagacttagatacgttgctagcttcagcagacatcatttgtttatgtgccaatttaactgaagaaagttatcacatgattggctcggcggaaattgccaagatgaaagacggcgtctatctttccaatagcgcacgaggcgccttgattgatgaagaagccatgatcgccggtttacaatcgggcaaaattgctgggcttgggacagatgttttagaagaggaaccaggtcggaaaaatcatccttatcttgcgtttgaaaatgtagtaatgacgccgcacacctccgcttataccatggaatgcctgcaagcgatgggagaaaaatgcgtgcaagatgtggaagacgtggtgcaaggtattttacctcaacgggcagtgcaagaagtcagtcgttacgttagttaagaaggaggaggagcatgttaactgatttaaaagtgaaagttggaccgcaattttatcgttaccacgaaggcgccttagcttcggtgccgtcacttttcaaggaatatcacgcccaacgaattttggtggtgcatggcaccgtatcctttgaaaaagctcagccatttttaccattcttggcagattcagagtatcaattcttctatcacacttacacaggagaatgtagttattttggcgccgaacaaatttcacagcaaataaaggaacaccagattgactttcttctgggagtcggcggcggtaagttagccgatttagtgggctacagcgcccatttaaacaatctgaattttggcttggtccccactttggctagtaactgtgcgccgtggacaccgttagctgtgatgtatcaagaaaatggcgcggccgaaggcaaaacggaacatttctttcgccaagctgcgtttttaatcaccgatcctaagttgcttctggatgcgccccgtgattattttgtcgctggtttagctgatacgttagcgaaatggtatgaatcagagaccattttacgccaagcccatttgcaaggggaaccctttttacaattagcgggagcgaccgccaagctttcgcaagaagcgattatgcgggactcaaaagcagccttagcagcgatggatgagggcaaactcacgcctgaatttgtccatctttcagaaattgttttcgctgtttctggattagtcggcggcttcggcgacaaatacgcccgcaatgcagcagcacacgccatgcatgatgctatgagtaaatttttacccaaaagtcatgactatttacacggcgaaaaagtagcttacggcatcttctatcaattagcattggaaaaaaggtgggccatcatagacgcattaatccctttttatcaagagctaaacttgcccatgtcgttacgacaaatgggcctttacccaaaagaagaagcagtactcgatgcaatggttcaatttattgattcaaaagaaaaggttcatttaattcctattgagatttcggaagaacgtttacgtcaagggattaaagagctagaaaagtatatccaaaaccaaggataagaaggaggaactatggaaacgttaagtgttttacaaagtttgataatggcgctttgggtggcagcaattatgtccagatggcttggaggaggagcaacgttaacgttgcgtttctcgcccttaatgacagggttagtagcaggtttagtgatgggcgatgtcccgaaagcgatgattgtcaccgcagcattacaaatgatttacatgggtgttttttcaccaggtggctctatgccagcagaaccatcaattgcggcagcgattgctgtgccagttgcgttgctagggaatttgaagccggaagcggctattgccgtagcggttcctgtcggtcttttaggaagttatttatatcaattccgtttctttattaacacgtttttagggaagtataccgatcgtgcggtggctgaactaaattctaaaaaaattgcccgctcaattatctggtatccaacgattgcctcatttattttattcgttccattagtcttttttgctctttatttaggggcaccagtcattgccgatattattaaagcattagaaggaaccgttgtgattcacgtgttagaagtagtcggtggtggtttagccgcaattgggattgcgacaacggtctatgtcattggtcgaaaagatttcttggttttctttttccttgcatacttcatgagtatcgtctttaagtcattggaaattaccatggtaacgtatgccatctttggcgtaattattgcgttaatttttgtgcaagtccaaaaaggcaaacctgtagcagaaagtgctggttccgccagtgccaccactgattttgatgatgatgacgattacgatgacgggttttaaaagaaaaaggaggaactgaaatgacggaaacaacagaaaaagtcgtgccgaaaacaacgaatttagcaccagaagaaattaccaataaagatgttacaaaagcctatctccgttggcattttgccaatgaaattccccattcctttgaacgttacttggcgccttcgttattgtacgcaatgatgccacttttaaagaaattatataaagacgatgaacaattaaaagccgcttatatgcgtcaactgctgtttttcaatacgcaattaagttggggcggcggggtcattactgggctgatggcttccatggaacaagagcgggccaaagaagaacatgaaggccgcgaaatcatgatgcaagatgatttaatgtataacaccaaagctggcttgatgggcgcgttagcggggattggtgatgcgattgactcaggtacggttcaatatatttttattgcgattgcggtgccgtgggcgcaacaaggtagcgcattaggtgcgattttcccatttgtggcgtttgccctttatcaagtactgttaggtgtgttctttgcgagacaatcctttaaaatggggcggaatgccacaggcttaatgcaaagtgcggggattcaaaaagccattgaaatgttatctgttttagggttgttcatgatggggattttagctggtaattatgtcaaagtttcttcaacccttcaatttaaactttctggccgtgagtttgtggttcaagatatccttgatcagattgtcccaggactcttaccgctagctgttgtaatgggcgtgtattggttctatacgaaaaaaggcttgaaagttacgcaagcattattgtggttaacaggtatcttaattgtcttagcaacagtcggtattttataaaaagaaaaggacgtgaatcagatgggcgtagtaaatttagcaagagtagatgaacgattaattcatggacaagtgatggtgaccttgtcccaaaaaagtggcgttaattccattttcgttgtcgatgaagtggtggcaaaggataaatttatgcgtgatttatacaaaagtgcaggcagtcggacaggacaaaaaaccattgtcattacgccggaaaaagctaaattttattgggatgaataccaattcaaagagtacaactgtattttaatcgctaaaaccgtctctgtaatttatgacttagtaaaacacggagtccctatgaaggagttaaacatcggcggtattgcacagaagaatccagaaaaagatttattagtaaccaaatcagtttatttaaacaaagaagatgccgaaaaattaaaagaactacatgaggtgtatggcgtagaagatatttatttccaagcaacgccttctgcaccaaaaactagtttaaaagaggttttaggcaaatttaatttataaaaaaggccagtcgcttgagtcattgcatgactgtttgaagtaatgactcaagccactgaactgaaggaggaacttttatgttagggattgtgattgctacacatggtgcactaagtgacggtgcgaaagacgcagctaccgtgattatgggcgcaaccgaaaatatcgaaaccgttaatctaaatagtggagacgatgtccaagcactaggcggacaaattaaaacagcgattgagaacgtccaacaaggggatggcgtgttggtcatggttgacttattaagtgcgagtccttacaatcaggcagttttggtgattaacgaactcgaaccagctctacaaaagaaaatctttgtggtgagtggtaccaacctaccaatggtcttagaagcgataaaccatcaattattgggcacaccgattgctgaancggcgcaagcgattgttgcgcaaggc

SEQ ID NO: 331 - DNA, 564 bp; double-stranded, linear
atccaaaaagaaaggaagtgccttatggctaaaaaatcaaaaattgctaaagcaaaaaaacaacaagcaatgattgcaaaatatgcgcctattcgccaagccttaaaagaagctggcgattatgaaggtcttagcaaattgccaaaagatgctcatccaagtcgcttaaaactccgcgatcaaacagatgggcgcccacgtggctacatgcgtaaatttggcatgtctcggattcgtttccgtgaattggctcaccaaggcttgattcctggcgtcaaaaaagcaagctggtaactcattatttcgataaagacaactagcgaggacagtcgcctttgggctgacctcgcagccccctttatcttttatacgcaattaaaaaaatcaaattggaggacggtactatgcgccaaaccattacgttagcttgcgctgaaactggcgagcgcctttacttaacargtaaaaacaracgaaatacaccagaaarattacagctgaaaaaatattcaccaaaactacggcgccgsgsacttttcackgaagtcnaatraccggggggaa

SEQ ID NO: 332 - DNA, 921 bp; double-stranded, linear
caagaatcgtgtggaacaaaaagcggaagacggcgacgcaaaagctcaaaaattgcttaaggtattgcaagaccccaataactttttatccacaatccaagtagggattactttggttaatatcctatctggtgcttcattagcagagactttatctagtcgtttggcccctgtattaggtggcggcgcgcagctaagagtcttgccagtatcattatcttagctttgttaacgtacgtttctattgtatttggtgaattataccctaaacgaattgctatgaataaatcagaagaagtcgctcaattgacttctggtgcagtccgctttttaggagttatcgcgcgtcccttcgtttggttgctatcggcttcgaccgatttattatccaaaatcacaccaatgactttcgatgatgctgattcgaagatgacacgagatgaaatgcgctacatgcttgaaacagaaggtgttttggaaaacgaagaactagaaatgttacaaggtgtcttttcattagatacaaaagtggcacgagaagtaatggttcctcggacagacgcattcatggttgatatccaagatgatgtccaagaaaacatcaatttaattttaggagaaaattattctcggattcctgtttatagtgaagacaaagataaaattgttggtattttacataccaaaacgttactaaaagctgcacgtaatttaggctttgaaaacattgaattaggcgcgattatccaagaaccattatttgtcccagaaaccatttttattgatgatttactttatgagttaaaacgaacacaaaaccaaatggcgattttactagatgaatatggcggtgttgtcggtttagcaacactggaagatttactagaagaaatcgttggtgaaattgacgatgaaacagat

SEQ ID NO: 333 - DNA, 1534 bp; double-stranded, linear
tgaacgtcctattagttatagacgaatttgaggaccaaaaagtttcaattttttcaatttagttagttgtttatttaataaaaaataaaaggttgctagaggatgaaaggagtataatttatttatctagaagagtaatcggaatgagaaagggctgtggaaatggatcatcaacaggtgttgaaaaatgaaattaaacaatatttagtgagtaaaaactgtgagaagacgtattatcattgtatggaagttggagagtatgcctatcmactcggtgaaaaatatttaactagtccagaaaaagtaagtattgcmggatatttacatgatatctctgcggtttatccaaataatcagrgaattagtgtcgcacaaaaatatgggattgaattaaacgaaacagaaatggcctttccaatgataattcatcaaaaaatttctaagtctattgcgaaaatggattttggtattgaagacaatgaaattttatcagctattgaatgccatacaacattgaagaaaaactattcggacatagatttagttttgtttgtcgctgataaaataaaatgggatcaagaagggaagccaccatacttagatggtttattacaagctttaaattgttctttagaaaatgccgcatatttctatatcgattatattttgaaacacgatattaaagtcgtgcatccttggttatgggatgcttacaatcaacttaatttgataattaaataacaaataaatatagccgtttttagtcgagttttgctggtgagaaaaggtgaaaagtagtacagtattcttgtcagaaagaagggattcccaatgaaaaaaataatcttgataggtcttttattgagtattttatcaggatgttcttccaacaaaagtggtgatagcactgcaagcaaatcaagcaagccgacagcaacatcagaaatgaaagcacaacagtagccaagcgagtcaaatgagcacggagtcaaaatctagtacaactcaaagtaattcttctgcttctactaaaactgaaaatcagttgtggtctgtgcaaaaaaaagcacagttacaacaatttatggctgactgggggcaacggatgaaccaaacgtataaagaatatataccaggaaatttaatcaattttaatggcgtccaagcgcctgatggtctagtaggaaatgttactatgcaaccagcgattggtcagcatcccatttatttagaatggtctgaaaatggacaagtgaaggatggatatgcgttagttgctgtttactctgatgcagaaacgcaaccagaaatgcaaaagcatttgtatttattcaccatcgttaacaatcagcccttagttttagtgacgatgcaaaatcaaggagatccttatggctatctgtattttggagcaacagataatgcagagttgagggctggctttgaaaaaattgtaggtgccccgtcaattactaaagaacaaatcccaatatttcagtcaatccgtgkctcaaagaggagcggntgnatttta

SEQ ID NO: 334 - DNA, 9212 bp; double-stranded, linear
ttgatttggcaaatatttcaggaaaagcgggtaaagagcttggtaattttggcatgatgattcaagacttaacgaaaacagtgccctatttaacgattacagaattggtgaaagaaactttacaacgtagtggttatcgggaagctttgatggcgcaaaataatttagagtctcaagctcgcttagaaaacttggacgaatttttatctgtgacacaagaatttgataaacgttttgaagcgcaaaacaacgacgatccaaatggcgaagaaacaaaattggcggatttcttaacagatttagccttggtttctgatttagataatttagaagagagctcttcgcaggtaaccttaatgacgttgcatgcggccaaagggctggaatttccagtggtctttttaatgggcttagaagaaggggttttcccattatcacgtgccatgctagaagaaagtgaactggaagaagaacggcgcttggcttatgttggtatcacacgagcggaagaagccttgttcttaacgaatgcttattcgagaacattatatggtcgcacgcaatataatcgaccaagtcgctttttagaagaaattgaggcggagcgtttaatgaaacaaggggcggcagccaatttacagaaagctccagcgcgcacctttgatcctaaagtatttaagcccagcgcaagtaaaccagcttatacacaaccagctacaaaatcagttagcaacaaagtggcaagtggtggcgaaaaagtttcttggcaagcaggtgataaggtccaacataaagcatggggcgttggtacagtcgttcgtgtaggcggttcggccaaagacttagagttggacattgctttcccagaaaaaggcattaaacggttgttagcggcatttgcaccaattgaaaaaatttaacatgcaaaataggtcagcgatttaatgagaaatcatcattagttaaattctttttattttctatcttagtgtaaatgtgttaaaaagacgataggagcattacgcttatgaggaggagttctacgatggaacaacaaccattaacattaacggcggcgacaactcgtgcgcaagaattaagaaaacaactcaatcaatattcccatgaatattatgtcaaagatcaaccatccgtagaagattatgtttacgatcgtttgtataaagagttagtcgatattgaaacggagtttcctgatttaatcacgccagattcgccgacacaacgtgtaggtggcaaagttttatctggttttgaaaaagctccgcatgacattccaatgtatagtttaaatgatgggtttagcaaggaagacatttttgcttttgatgaacgtgttcgtaaggcgattggtaaacccgttgcttactgttgtgagttaaaaattgatgggttagcaatttcattacgttatgaaaacggggtgtttgtacgcggagcaacacgaggcgatggaacggttggtgaaaacattacagagaacttacgaacggttcgctctgtaccgatgcgtttaacggagcccatttcagtggaagttcgtggcgagtgctacatgcctaaacaatcctttgtcgcattgaatgaagaacgtgaagaaaatggccaagatatttttgccaatcctcggaatgcagcggcgggaagcttgcgccaactagatacaaaaattgtggctaaacggaacttaaatacgtttttatacacagttgctgactttggaccaatgaaagcgaagacgcagtttgaggcattagaagagctttctgcaattggttttagaaccaatcccgaacggcaattatgtcagtcaattgatgaagtttgggcctacattgaagaataccatgaaaagcggagcactttgccatacgaaatcgatggaattgtgattaaagtgaacgaatttgcgttgcaagatgaattaggtttcactgtcaaagcacctcgctgggcgattgcctacaaatttccaccagaagaagcagaaacagtagtggaagatattgaatggacaattgggcgcacgggggtggtcactcctactgcggtcatggctcctgtacgagtcgcgggaaccacggttagtcgggcaagtttgcataatgcagattttattcaaatgaaagatatccgtttaaatgatcatgttattatttacaaagccggcgatattwtcccagaagtagcgcaagtgctagttgaaaaacgtgcagccgatagtcagccttatgaaatgccgacacattgtccaatttgtcatagtgagttggtgcatttagatgaggaagtggcgttacgttgtattaatccaaaatgccctgcgcaaattaaagaagggctgaatcactttgtctcacgaaacgcaatgaacattgatggcttggggccacgagtgttagcacaaatgtatgacaaaggattagtgaaagacgtagcggatctgtatttcttaacagaagaacaattaatgactttggataaaatcaaagaaaaatcagcaaacaacatttatactgccattcaagggagtaaagaaaactctgtcgaacgtttgatttttggcttagggattcgccatgtgggggcgaaagcggcgaaaattttagcggagcattttggtgatttaccaaccttaagtcgtgcaaccgcggaagaaattgtggctttggattcaattggcgaaacaatcgcagacagcgttgtgacgtattttgaaaatgaggaagttcatgaattaatggctgaactggaaaaagcccaagtgaacttgacatataaaggtctccggacagaacaattagcagaagtggagtcacctttcaaagacaaaacagttgttttaacaggaaaattagcgcagtacactcgcgaagaagccaaagaaaaaattgaaaatcttggtggaaaagttacagggagtgtttcgaaaaaaactgacattgtggttgctggcgaagatgcaggcagtaaattaaccaaagctgaaagcttaggcgtgaccgtttggaatgaacaagaaatggtcgatgcgttagatgcaagtcatttttaagaagaaaaattaacgttgtcagattttatgtagtaatttgatggtatgcttattttagtcataaaagttatatgaacgaggactttctgagttgagaaaggaggttgatgcttatgcgcaattcttcttatcttaatgaaaggagcaatgtttttgtccgttgaagcagcgttgggactgatgattggttttgcaacacttgttgtgaccattatcttcgttatcttagcgcttgtcttagacaacaaaaataaccgttcataagctttgaggagctgaacggttaagcgtttgaaataaaaccaataactcagtaagccgctagttcttataactagtagtggctactagagaggtatgttcctgcatatctctcttttcattttcataataacatgtttccgtcatttttgcgagcgacaaattatcaatgaaattcaaggtttcatctaaaatatccgaccattttatggtagaataggaacagagtgaacagctgtgctaagctgtttaaagaaatacaatccaattgattaatctgaaaatgaaaatttcagtaaatgatagaaagaagggtatctatggcaattacagaagaacaagtcaaacatgtcgctaaattatcaaaattatctttctccgaagaagaattagcggactttaccaatcaactagataaaattattgatatggtggaattactagaagaagtagatacaaccggggttccttttacttcaaatgtgaatgaatcaatcaatgtcatgcgtgaagacgtagcgacaccaggaatggaccgtaaagaattaatgcggaatgttccggaatcagagaatggttacattaaagtgcctgcaattatggataacggggaggcaggagcctaatggaaaaattatacgacaaatcgttaacagagttacatgatttattggtctcaaaagaaatcactgcagttgatttaaccgaagaaacattaaatcgtattcaagatacagaagaacaactaggttcttttatcacagttagtgaagaaaaagcaatggcattagccaaagcgattgacttaaaaggcatcactgaaagtaatccattagctgggattcctattgggattaaagacaacattgtcacaaaagatattttaacaacagctggctcaaaaatgttacacaattttgacccaatttatgatgcgaccgtgatggataaagtctatcaagcagatatgattcctgtcggaaaattgaacatggatgaatttgccatgggcggaagtacggaaacgtcttacttcaagaaaacaaaaaatgcttgggatcaaaccaaagttcctggcggttcttctggtggttcagcttctgctgtcgcagccggacaagtcccagtttctttagggagcgatacaggaggtagtatccgccaaccagccgcattcaacggtattgtgggcttgaaaccaacttatggacgtgtgtctcgttttggtttgattgcttttgcttcaagtttagaccaaattggtccattgacacgaaatgttaaagacaatgccttagctttaaatgcaattagtggttatgacgaaaaagacggcacttctgcaggcgtttctgttcctgattttacggcagatttaactggcgacatcaaaggcatgaaaattgctttaccaaaagaatacttaggtgaaggggtacaacctgatgttcgtgaagcggtattaaaagcagcagaaacgttcaaagctttaggcgcaacagtggaagaagttagcttaccacattctaaatatgggattgccgcttactatattattgcctcttcagaagcaagttcaaacttacaacgctttgatggcattcgttatggttaccgttccgaaaatgtccaaaatctagaagacgtctatgttaattcgcgttccgaaggctttggtactgaagtcaaacgtcggattatgttaggaaccttctctttaagtgctggttattatgatgcgcactttaaaaaggctggtcaagtccgtacactaatcaaacaagattttgagaatgtctttgcggattatgacttaatcattggcccatcaacaccaactgttgcttttggtttgggtgaaaatatcaatgacccaatcacgatgtatatgtatgatattttaactgttcctgttaacttagctgggttaccaggcatgtcaattccagcaggcttctcagaaggattgccagttggtttacaaattattggaaaacattttgacgaacatacaatgtataaagcagcctatgcttttgaacaagcgacagatttccatacgaaaaaaccagtcattttaggggggaacgattaatgaactttgaaactgtcattggattagaagtccacgtagaattgaaaaccaactctaaaattttctcctctgcgccagcgcatttcggagcagaaccaaacagcaacacaaacgtggttgactggagttacccaggtgttttacctgtgatgaataaaggtgctttagaatttggcatgaaagcagcacttgccttgaactgtgaaatttcaaaagaaacacattttgaccgtaaaaactatttttacccagataacccgaaagcataccaaatttctcaatttgatcaaccaatcggacatgatggttggattgaaattgaagtcgaaggcaaaaagaaaaaaattcgcattgaacgtgtgcatttagaagaagatgctgggaaaaatattcacggcacagatggctattcttatgtagacttgaatcgtcaaggcacgcctttaattgaaatcgtttctgaagcagacatgcgttcaccagaagaagcgtatgcttatttagaagcgttgcgttcaattatccaatttacagaagtttctgatgtgaaaatggaagaaggttctatgcgttgtgatgccaatatttctttacgtccgtatggtcaagaagaatttggtactaaagcggaattaaagaacttgaactctatgaactttgtaaaaaaaggtttagcttatgaagaaaaacgccaggccaaagtcctattatctggtggcgaaattcaacaagaaacacgccgctttgatgaagcaactagtacaacgttgcttatgcgtgttaaagaaggctcaagtgactaccgttacttcccagagccagatgttcctcgtttttcaattgatgatgaatggattgaaaaagttcgcgctagtttgccagaaatgccagcctcacgtcgtgcccgttatatcagtgaattagggttacctgaatacgacgcaatggtcttgactttaacgaaagaaatgtcagatttctttgaagcaactttagcaaacggtgcagatgcgaaacaagcatcaaactggttaatgggcgaagtttctgcttacttaaacagtgaaaaagttgaattagccgatactaaactgacaccagaaaatctagcgggtatgattactttgattaacgatggcacaatcagctcgaaaattgcgaagaaagtgttcaaagagttaattgaaaacggtggagatgctaaagaagttgtcgaagcaaaaggccttgttcaattatctgatccagcgcaattattaccaatgattaacgaagttttagacaacaaccaacaatcaattgatgactttaaaaacggaaaagaccgtgcagttggtttccttgttggacaaattatgaaagcaactcgtggacaagcaaacccaggtgtggttaacaagttattgcaagaagagctttcaaaacgataagaaagtagcaggcaaaccatgaaaaaagctagagtgatttataatccaacgtcaggaaaagagttaatcaaaaagaacttagccgatattttatctattttagaagaatgtggttatgaagccagtgcatttgcgaccacaccagaagaaaattcagcacgcaatgaagcacatcgtgctgcgcgggcaggatttgatttactagtagctgcaggtggagatgggaccattaatgaagtcgtgaatgggattgctccgttgaagcggcgccctaaaatggctattattcctgctggaacgacgaatgactatgcacgggccttgaagattcctcgtgataatatcgttaaggcagcagaagtgattaaaaaaaatcaaactgtcaaaatggatattggccaagccggcaaaaattactttatcaatattgcggcgggtggtcatttaacggaactgacttatgaagttccgtcagagttgaaaagtatttttggttacttagcgtacttagccmaaggagccgaaatgttgccgcgagtgaagccgattaaaatgcgcatgacgtatgatgaaggtgtgtacgaaggcaatgcatcaatgtttttcctagggctgactaactcggtgggtggttttgagcaaatcgtaccagatgctaaattagacgatggtaagttttcattaaksattgtaaaaacagccaatatttttgagattcttcatttagttgcgttaatgttaaatggtggaaagcatgttgaagatcatcgactgatctatacaaagaccagctatttacatgcagaaacgttagaaaagaacaataaaatgatgattaatttagatggtgaatatggaggcgatgctccaatgacctttaaaaatatgcatcaacacattgaaatttttgcaaatggtgatgcactgccgtccaatgcaattatgggttctgtcttaactggtagcgatgagattgtcgtagaatcagaagacgaagaggaagaagcatatamcgaagccagcaaagaatttgtcaaagaagttgaacgactaacagacgaagatattgatggcgatggaaagattgcggaaaaagaaaagcactaggtagtccgtgaatagctaatgaaagatttagttgataagatctttcattggctattttttgactaagggaaagggtctcattcttttatttacccaaaaagctcaaacggaattgctaaatcgccatgraaattcgttgttgcttttcttaggtattttcattagaatgagtgaagtgtattaaaaagaaggagcggacttatgaaaaattatcccagtaaagaaaaatgacgtcattgaagtagaaatcattgacttgacgcatgaaggtttaggcgtggcaaaagtggaccattatccattatttattgaaaatgccttaccaggtgaaaaacttgaaatcaaagtcttaaaaacaggcaaaagttttggttatgggaaagtattgactgtcctaaaaagcagtgaacagcgtgtgcccgtgaaagatgaaaactttacaaaagtcgggattagtccgttgcaacatttagcgtacggsgcccamctatcatttaaaacmcamcaagtagaaaatgttatgcaacgtgtcgctaaattgcaagaagtccctgttttaccaacaattgggatgaacgatccgtggcattaccggaacaaagcacaaattcccgtgcgtaaaattgacaaccaactacaaacaggttttttccggaaaaatagccatgatttaattccgatggaacatttctatattcaagacccagaaattgatgcagcaattgttaaaatccgtgacattatgcgtaaatatagcgtaaaaccttataacgaatctgataatacagggaacttacgccatattgtcgttcgtcgtggctaccatactggggagatgatggttgttctaattacgagaacaccgaaattattcccaattagtaaaattgtgccagatattttggaagctattccggaagtagtcagcattgtacaaaatgtaaatccaaaacgaaccaatgtcatttttggcgacgaaaccatcttattacatgggtctgaaaaaattacagatactatttttgatttgaaatttgaaatttccgcgcgttcattttatcaagtaaatccacaacaaacagaagtgatgtatcmaaaagttaaagagtatgcggctttaacaggcaatgaaattgtgggtggatgcctattgcgggattggaacgantggcttaactttagcccaagatgccaagccagtttacggtattgaagtaantggaggaagcggtccaagatgccg

SEQ ID NO: 335 - DNA, 1230 bp; double-stranded, linear
ccctgggaaattggnccattaaaatggaaatnaagaattctacagcattactgtgtaaaaggacatatttagcaacatcgcaatgatgattccgattaaggcactataagcggcatgaccaactgctgataggtctttcttcgtaaagacacctactaatgacatcgcgccaaaggtagctgctgcacttaaaaatgcgccggccactgttccaccagtatacattaataacgtcacggataaagtgacaccatttaataatgcatacgcaacaaatcctgcaatcgcaatggttggatttttctgtgcttttgcgcctagatataaamctaagccaatttcaacaagccaaatcatccaaaaagctaagcttgattggaataaagtagctagaacaggtaaaaagacagttgtcattgcataagccatgattgcgctaataccaattcctaacgctaaaaatccgtaaattttggcataaaatttattcaaacctgtgccagtttggatatactcttgattattcataagtnaaagtcccttctttctctgttagttcatcaatcgtcacttggggtggttgaaccatcaccactgcatctaacacgcgattttcttgctcattaacagcctcaactgaaatggtaatcacatctttcattttgtcgactttgattacttctaattggaaagtcaatgtttcgtaatgaaaaacgggttccacaaagttcacagagaaattcacaacatgtgaacctggtcctggtaaatgtttagaaatcgcactagtgataattcccatcagcataattgatggtacgattggtttttcatattctgttttttgggcataatcatgttggatatataaaggattcgcatcattggtcaagcccaaataaagtaataagtccttgtcttcaattgactctgtcaaggacaacgaatctccctcttcgatatcttcgatggttttgcctaattttctcggttttccgatattcaaattagtacacctccgttattgataagataattgtaccaaaatgtacttaaaaggcaagctaaaaagtagtctttaaaggatgtttaaacaaaaccaacttatctaccatgctagcattctaaaaaaaacaacggaacaggagcagcttcttattttttgaagccagatacccctggncccgattttggttatgtcccctataaaacggtcnagtngggtaccta

SEQ ID NO: 336 - DNA, 920 bp; double-stranded, linear
gtcacaaaagangtttcagtcaatactgaaactggtttaacacaacaagaggcccaacaacggctgaaagaaaatggccgcaatcaatttgaagaggctaagaaggattctgtgttaaagaaatttattcacagtttatctgattttacaacgattattttattagttgctgcggcaatttcgttttatacagcaatcgtaacagaacatggcgaatattttgaaggaatcttaattattgcaattgtgattatcaatgctgttttagccattgttcaagaaggaaatgctgaaaaatctctggcggctttacaagacatgaacaagcaaagtagtgcagtcttacgagatggcaaggtaatcgaagtcgatgctgaagaactagtagtaggagatgttctagttcttgaagctggttctatgattacagccgatgcacgacttattcaagcttctcaaatgcgcgtagaagagtcmgcactaacaggtgaaagtgaacctgttgaaaaagatcctacatacgtggggcatgacgatgatggcttaggagatcaaataaatatgattttcaaaggctgtaccgttgtgaatggccgcggacgagcagtagtaactgcaacaggaatgnatacggaatgggtaaattgctgggttactgaataacagcgatcagcaaaaacaccattacaaaaacgcttgaatcmattrggcmaacgtattagtttgttagccttaggggctgcagcaattgttttcattattggtgaactgcaaggagaaccgcttcttgaaatgtttatgacagccgtttccttagcggtggcagctgtaccagaaacactaaccgtgattgtaacgttaaccttagcatatggtgttcaaaaaatggcnaagaaacatgcgattatttcgttcgattg

SEQ ID NO: 337 - DNA, 2381 bp; double-stranded, linear
aatactataaaacctttttatacatttgtacacaaaaaacctcactttctgaggnagattttattatttagcattgccaaaaagtcaaaagcaagagcccccaaaacttctttgttagggttgccttgaaaataaagaaaaacaaaaagccgaaaacgctaaagacgttttcagctttttgttttttaatggrataaatggctcttttgtgctaaagccgcaaattttttcgatctgtgttccagatgtggataaagaattgcaccgccaatactaaagacgactgaaatccccaccataatccaaatggcaaaccaagcatttggccagtaaatgcctcctgctgattcccttagcaagttcacggcatgcgtaaacggcaagaacggattaatcatttggaagaatttacctgagacttgaattgggtagttcccacccccaccagagatggacagtaccaagattattatcgcaattcctttccctacattgccaaagagagcaacaagcacataaaccattatcataaacgtaatggcaatcaataccgcaaaccagacgctatacgctggattacgaacatctacgcctaacgcaaaataattacctaaggttacaatcagtgcttgaccaatccccatgacaatgaaggtaaacatccgtgctgaaaattgttcccgtttagagaagcgttttttatcttttccttcaagataaacatccgttgtcgcaacacttgagaataatacagcaccaacccataaacacaaagctgtatagaatggcgtacttgccgaaccattattagcaatcggataaacagcatgttctttgacttcaactggttgtgtaaagaagtcactttctttattggcatctaattttagtaatttaagaatttcgcctaaatcaacttctttttcacctttacggattgcattcgctgctttgtgtaatcctgttttgatatttggccaatcattaataattagctcgttggctttgtccaaggccgcttcaacatctggcattttctcattgactgttttcaaggtattcgttaaatcttttcggatacctggatagtcattttgcataaaggctgccgctttgctgactttatcttgaatgactggtaaatcgtttttatacaaatcagcaccacgattaatgccattgacaatggtttccatattgccattcaacatcgtattcgcatcatgaatttcttgtttaattgccggcatttcggcttgatatttttctaataaagaaatcgcattagtgaccgtttgacttgttgagctcaataaaccttcaaagtcaatttgttgcgctttgtttagttgaccttgagcgktttgggatggtagcaattaatttgtctaaaatcgtttttactgtgttttcaattgcatcaggggtaatactattgacggttgctctacttgttgagctctgcttgaatagcatttaaatctgcatcagttaccgcattcacatcaatgttatcaacatcagtttttaatctaactacaataccatcaatcgtattcaatctatttattgtgtcttgtaaatcagtgttacctgtggcttcttgtatttgcgtaaacagttgaatcagctgttggatattttcatgttgttttcctaggctttcagacagttgttgcttaattgcttctctttcttcaactggtaaacgatgattttttaaatcttctagtgctgtatttacaccagcgctaattgttccaattgcttttaaaatcgtccccacactttgagtaattccaggtaacgccttttccaattgagtggcgccatctaatgtgacattccctaaatcattggcttgatcacctagtttacgaatatctggtaacgccgtttgaacttgttgaatgatttctaatccttgttttgcttcttggattccttcgctcattgtttgttccacagaggcaaagtcttcatcaatcatagcaatttgtcggccagcgttttgaatttctggaattttttcttgtaacgtcaaaataacactagcttgttctttgatgcttggcattttaccatttagctcaacaatcttctctcctaaagcatcaacttcaggtaaatatttcatcgcatcgttggctttcgctaatttttcttttagctcaggcatcttaccatgtaagtctgtgacttgttttgcgtacgtatcaatggttccaatgttggcatctgtatctaaaatcatgctcttaactttttgaatgctaaccangtttttatcaatatcatagccaataaycatkgaaggtttgataacgtactacttgccggtttwaaatggaaatccttcccgaaaattttggtggaaccgg

SEQ ID NO: 338 - DNA, 13154 bp; double-stranded, linear
gccagattatcgttccttaaaaggtgtctatcaaggaatccagcaaccggaatacttattgagccggacttgcttaaaaacagagccagaaaagttttatcaattcgttaaaacgctctatcatccagacgcacaacctaatatcattcaccagaaaatggcccaattagagcaaatgaaacggggaaaaattgtttcacaaaatattgatgggcttcatcgaaaagcaggtagccaagaagtggtggactttcatggtaatttatatgaatgttattgccaaacttgtggtgcaacggttccttggcaagactatttgcttagtgatcggcacgctgattgtcatggacaaatccgtccagctattactttgtatgaagaaggactatccgaagaggcaattgaaaaagccattcaggccgttgcttctgccgacttaatcgtgattgtcggcacgagttttcaagtgcatccattttgcgatttgattcattataaacaaccaacggcaactattttagccattaatcaaacgccgctatttttacaacaaccttattattttttagaagcgaaagccgaaacgatatttgcagaattaacgataaaggagtaacggaatggaagaatttaaatcagaaaaagaaaaaatgatcgcaggtgcactatattttgcctcagatcctgaattagtggctgatcgcaaaaaagcccgtgaacaaatggcgttaattaaccaacaaccagacacttatattcgtcgtcaattaatagaagaaacgtttggaaaagtgggtgtcgggacgtacatcgaaccgatgattcaatttgattatggctacaacatttctgtgggaaaaaatttctatgccaattttaataacgtttttttagatgtttgtccaatcgaaattggcgataactgtatgtttggacccaatgtgcaactttatacagccgagcatccattacaagcggccaagcgtaatagcggaatggaatcagggaaacgaattatcattggcaacaatgtttggattggcggtggagcgattgtccttcctggcgtaacattaggcgataatgtagtggtggcagcaggtgctgttgtgaccaaatcgtttccagaaaactgtgtgatcgcaggtaatccagcacggataattaaagaattgactgaagatgacgccccaacaacttctttagaacaacaacgagcaaagattaaccaaatcgataaggaactggtccgtttattagaacagcggatggacgtcgtcgcagagattgctgcagtgaaaaagaaagcaggtcatgcggtttttgattctgaaagagaacaacaagtattagaaactattctgaatcatgttgaaaatgccgagtatgaagaaacattatctgagactttccagggaattatggacgcctctaaacgtttccaagaaaaacatttaggagagtgaggcgaaggtcgtggatggagaaatcagaagaagagagattgttaaaagattaagagagaccgaaaagccaattagtgccactcgttttgcaaaagcttttgatgtcagcagacaaattattgtaggagatgtcgctctattacgggcgacaggggtcgaaattgtcgcaacagctcgagggtatatgttggaacaacctttagaaggaattgaacggaaaattgcttgtcaacatacacctgaacaaacgagagaagaattgtcagtcattgttgccaaaggtggagaagtggtagatgtgagtattgcacatccgctttatggggaattaatcggcagtttgcgcattcaatcagagaaagatattgataaatttatggacaagtatcaaaaagagcatgctacattactatcagttttaacaggaggcgtccatctgcatactattcgctgtgcagacgaagaaactttccaagaaatcaaagaggcacttcgaaaaaaaagtattttgtttgaaggataacgagaaaaagagaggacgttgatgtttgttcaagccctttcttttttttcttagaaaattaccaaaaaaagatagaagaatttgtgaattttcttctatttttttaactttttgctagaaattttttatgaaacagtatactattaaaaaaggagccatttaaacaataactatgtcaattatatatgttggtacataaaaataaatggagaaaaataaaaaaggagaatgagtatgaaaaaacaatttgccctgttctctaccttattacttttaggttcatcaatgccagtaggtgcatttgcagaaggtaataacttggtagctgaaaatagttctgtcgcagaaacaaccgcagaagcaacaactgctgaagccactgaaacgacagcgactagtgaaacaacagaagcgacagaagaatcaacaactgaaacagaaagttcaaccgaatcaagtgaatctgcaaccacggagtccacggaaacgtcaggaaccgaaacgacagattccacaacggattctacatccacaagtacgacagaatcgactactgactccacctcgacgagtacaacagagtcaaccacagattctacgtcaacaagtacaactgaatcaagtaccacgccaacgaccacaccaagttcttctaaagaacagccaaaacctggcacgagtacttctgaatcaaaacagccggcgaaaccagtgacaccaacagcgccagctgaaaagccagtagaacaaccagcagcgtcaacaccgcagcctgaaatagtcccaccagttacaaatgaaacggttgggttagtggaagacgatgagacgtttacggtcagcaaaacgaagaagacagaagagtttattcaagaaatcggtgaatctgctcggaaagtggccaaggacaaaaacttatatgctagtgtgatgattgctcaagcaattttagaaagtggcagcggcaatagtaaattaagccagaaaccaaactacaatttgtttggtattaaaggcgattacaaaggtcaatctgtttcttttattacctatgaagacaatggtttcggtaacctatacacagtagaagcaaaattccgtcaatatccaacgtataaagaatcaatggaagattatgcgaaattattgaaaaatggtttagattccaataaagatttctatcatggtgtctggaaaacggaagccaaatcatacaaagaagcgacacgtttcctaacaggaaaatacgcaacggacaaagattaccataagaaattaaatgcgttaattaaaacatacgatttaacttattatgataaagaaaaagcaaccgttgaaccaatggaatcaaatttcccagcctataatggcaaaaactatgacacctttaatagttatgcttggggcaactgtacacaatatgtctacaaccgtattacgcaattaggtaaacgtgtggacttaacaatggggaatggtcaagattggggcgaaacaggtcgtgcacgcgggtacaaagtaagtcgtacaccaaaagcaggtgcagcggtttccttcccagctggtgttttaggcgcagacaatacttatggtcatgtcgcatttgtggaaaaagtctttaaagatggtagcatcttaatttctgaaatgaacgtgaagggattaaacgttgtttcgacacgtacaatctcagccgatgaaacacatttgatgaactatatcgttccaaaagataaataaaaaaatcagctctttgtcaataagaacgaatgagttggaaaawtcaaagctagcactgaagaagcaattttaattcttcagtgctagcttttttttgtggcaaaagttctctccaataaagtttaatacattcagatattgccaggaggcttcaggtcgggatgagttagcaacagtcgctgagagctatattttttttaggtagaatcatttacttttaggtggaagatgtcttataattgtaagcggatacaaaaataaaaaaagaggtgggtaaatgagtaaaaaagaaataaatcaagtagttgccagtagctatcaattgtatattaatggagagtggacaacaggtagtggtaacaaaatgattgctagttacaatcctagtaatggcgaaaaattagcagaatttgtagatgccacaaatgcagatgtggatcgagctgtagaagcagcccaagaagcgtttcagacatggaaagatgttgacgttgtaacaagaagcaatcttttgttgaaaattgctgatttgattgaagaaaatcaagaacatttggctatggtggagactttagataatggaaaaccgcttcgggaaacgcaatcgattgatgtccctgccagtgcagaccattttcggtattttgctagtgtgattcgtggagaagaaggatctgtcaaagaatttgataaggatacgttatccattgttgtgaaagaacccatcggtgttgtgggtcaaattattccgtggaatttccccttattaatgggtgcttggaaattagcaccagcgttggcagcaggtaacacggttgtgattcatccgtcctcgagcacatcattaagtctgttggaattgtttaaaatttttgatcaagtcttgccgaaaggagtagtgaatttaatcaccggtcgtggttctgattcaggaaattatatgttggcacatccagggtttgataagctagcttttacaggctcaacagaggtggggtacactgtcgctaaagcggcggccgaccgcctaattccagccactttagaacttggcggaaaatcagccaacattatttttgaagatgccaattgggaacgtgcattagaaggcgtgcagttagggattttattcaatcaagggcaagtttgttgtgctgggtctcgtgtgttcgttcagtcaggtatttatgatcaatttgtagaagctttaaaggaaaagtttgaacaagtgaacgttggtttcccgtgggaaaaagatgttgaaatgggcgctcagatcaatgagcatcaatggaagaaattttaaaatatgtcgaaattggtgtgaaggaaggagctacgctgattactggtgggcaacgtttaacagaaaatgggctagacaagggggcgtttttagcacctacgttattagcgaatggtacgaatgcaatgtgtgtggcccaagaagaaatctttggtcctgttgcaacagtgattaaatttgaaacggaagaagaagtcattcgtttagctaatgattctgaatatggtctaggtggtgccgtcttttctcaagatatcaatgtggcattacgggttgctcgtggtgtacggacaggtcgaatgtgggtcaacacatacaatcaattgcctgcgggcgcgccatttggcggttataaaaaatcaggaattggtcgagaaacgcataaatcaatgctagatgcttatacgcaaatgaaaaatatttacattgtgacaaaagaagaagcagatggactgtattaagtagtgtagtgaattctagataataaacttatttttggttattgttatttttcgagctaaacaaaacaataatttttttaaaaagttgagtgatgagtaaagtaaaacagattaaaagtaaagcctggtacaaaaatcactttggatttttgtaccaggctttaaagcggagtaacaatagtgttcactcttggttgtttttaatttttgactattgtagaaggagttattttgcttcttctgcttcaaatttagcaaaagctgtttcaataacttcttttaatgcagaagcagaagcttccattttttcttgttcagcatctgttaatggaatttcaatgacttgtttaactccttggcggttgatgatcgctggtgcaccgatataaatatcgttttgaccatattcaccttctaaataaacagataatggtaacacagagttttcatcgtttaggatagctttagtgatacgcgctagtgcaaccgcgattccatagaaagtagctccttttttctcgatgattgtgtaagcagcgtcgcgtacgttgaagaataaattaaccattgcttcttcatcgacgtcaggattatttttcacccattcgtaaatttgtaagccagcgacattcgcatgtgaccaaactgggaattctgtatctccgtgttcccctaagatgtaggcatggacatttcgtgcatcaacgtcaactaattcggcaattgcttgacggaaacgagcagaatctagtgaagttcctgaaccgattactcgttctttcgggaagccagagaatttccaagttgaataagtcaaaatatcaactgggtttgcggcaactaagaagataccgttgaaaccagaatcaacaattgttgtaacgatttctttattaattttcaagtttttatgaactaagtctaaacgagtttcgcctggtttttgaggcgcaccagctgttaagacaactaagtctgcatcatggcaatcgtcataagtagcagcatagatttttttaggagaagtaaatgctaatgcgtgagataagtccaacgcgtctccttcagtttttggtacattaatatcaataatcccaacttcttgagcaatattctgagttactaaagcaaaggcatagctagaacctacggcaccgtccccgactaaaattactttttggtgatctttattccctgcggctgcagtcatgtgtaccattccttcctctacattctttttcgtgagcaacgagtttttatttcctgttgctaaagtgatagtaacatggtttgtaaaaaatgtcacgaactttgattgtaaaaatgatacagttttcagacctgtttcaaaatggtagctcttacatgtgcgtaatttcactatcttacgcatatttaaatttctaaaaatttttttacatctttcttaatcttcaaagactgcgagtttttttatttctatggtataatgaataaaactgggtagcgcatacgcttcccagccattttgtgttggcaagcttataatccaaggagaatgaaagatgaaagtaatcgtaggactgggaaatcccggtagtaaatacaaagaaacaaaacacaacattggctttattacgctagatgaaattgcgtatcggcaaaatgtttcgtttaataatagtaattttgaagcagatattgcagagttttttatagggactgagaaagtattgttagtgaaaccattaacatttatgaatgaatcaggtcgctctgttggtccgttgttgacctactttggggtagatgaggaagatttgattgttatttatgatgacttagacttagagatcggtaaaattcgtttacggcaaaaaggtagtgctggcggccacaatgggataaaaagtctgattgcccatttaggaacaaatgtctttcctagaattaaaattggcattggtcggccctcaaaaaatgatacagttatccaccatgtactaagtacttttcccaaagaaacacacgaagagatgttacttgctgtaaaaaaagcagccgatgccgctttatatgcatgcgaaggacatacgtttgttgaaacaatgaatcaatttaatggaaaatagcagaaaggagggcccttgtttgaatattatcgaacgaattagccaaacagaaattgctaaatcatggcgcagtcaactaatgacaacaggaacgcgccaactaattactgggttatcaggctctgctaaaacattactgatggcaggcgctttacaaaagacgcatcaaaaaattgttattgcggtcccaaacctatactatgccaatcaattagtagatgattttttaaatattttaccttcagaacaagttcatctatttccagtagatgaagtgttatccgccgaaatggccttttcttcaccagaagcgcgcgcagatcgagtgagtgcgttaaatttcctgatgacagcgaatgcaggaatcgtggtcgtaccagtagctggactacgaaaatatttgccaacgaaagaaacgtggcaaaatgcgcaactttattgggaaatcgggacagaagtagaacctgagatcctcgcgcaacgcttagtgttaatgggctatgaacgccaagcaatggtcggaaagcctggcgaatttagtattcgcggaagcattgttgatgtctatccgctaaatgccgaataccctgttcgggtggaactgtttgatgttgaaattgactcaatccgttattttgaagcagatacccaacgttcattagaaaatcttgaagaagtaacgatttcaccaatgactgatttagtattctcaaaggcagatatgaatcatggcatgacgaggttacaagatgctctagaaaaacgtttagcgacagctaaagatcaaacggagaccgattttttagaagaatattttggtcagttgctgtcttcttgggaacaagggattcctacagaaaatgctcactattatacagattttctgtaccaacaaaaaactacgctgttagattatttaccagaaaatagtttgctttttgtggatgattattctcgtatgatggaaacggagcgagaaatcgctagagaggaagcggaatggcaaaccctgaaaattgaagaaatgcgcgtgttttctgaacaaacttttggcgtagactttcatgatcaattgcgaaaaactgcacgaaatacgaccttcttttcactttttcaaaaaggaatggggaatcttcgtttccaagaagtccataatttccaatatcgttcaatgcaacaattcttcggtcaaatgccgttgctaaaagcggaagtggaccgttggcaaaagcaaaaccaaacggtcgttgtttttgttcctacgaaagaacggattcaaaaagtcgaagagctatttcaggactttgacatacctagcgtagtaagcaattgggatcagttgttagatgggcatgtccaaattgtccaaggggcattacaaacagggtttgaattgcctaaaaacaagctcgtggcgattacggaaaaagaaatttttcatacaacgaccaaaaaacgggcacgtcgtcaaacaatctctaatgcggaacgtttgaaaagttatagcgacttaaaaacgggcgattatgtcgttcatgcgaatcacgggattggtaaatatattggtatggaaaccttagaagttgatggggtccatcaagattacatgactatcttgtaccaaaatgatgacaagttatttattccagtaacacaattgaacttgattcaaaagttcgttgcttccgagtctaaaacgccgaaaattaacaagctaggcggcagtgaatggacgaaaactaaacgaaaagttgcttcgaaaattgaagatatcgcggatgatttaatcttactttatgcgacaagagagtcggaaaaaggctatgcttttccgccagatgatgcgtatcaaaaagaatttgaagaggcttttccgtattctgaaacagatgatcaattacgtagtgccgccgaaattaaacacgacatggaaaaatctcgaccaatggatcgtttgttagttggcgatgtagggtttggtaaaacagaagtggctttacgagcggctttcaaagctgttagcaacaataaacaggttgcctttttagtgccaacaactattttagcgcaacaacattatgaaacgattcaagagcggtttgagggctttcctgtagaaattggtttattaagtcgtttccgcacgaaaaaacagcaaaatgaaacaattgaaaaaattaaacatggccaagtagatattgtgattggtacccatcgtttattgtcgcaagatattaattttagtgatttaggcttgttgattattgatgaggaacaacggtttggagtgaaacataaagaacgactaaaacaattgcgttcacaagtggatgtcttgacgttaacagcaacgccaatcccaaggacccttcatatgtcgatgttaggtgtccgtgatttatccgtcatcgaaaccccaccagagaatcgttatccgatccaaacgtatgtcatggaaaataatcctggggcgattcgggaagcgattgagcgagaaatggcccgagatggtcaagtcttttatttatacaatcgagtagatacgattgaacgaaaagttgaagagttacaagcactagttccagatgcacgaattgcgtatgcacatgggcaaatgacagaagtacaactggagaatactttgtttgattttattgaaggacaatatgatatattagtcactacaacaattattgaaacaggagtagatattcctaatgctaataccttgtttgtagaaaatgcggactacatgggcttatctacgttgtatcaattacgtggtcgtgtggggcgtagcaatcgagtggcctatgcttattttatgtacgaacagcaaaaaatcctaaacgaattagtgagaaacgtttagaagcaattaaagactttacggaattaggttctgggttcaaaattgcgatgcgtgacctttccattcgaggggccgggaaccttcttggtgcccaacaacacggcttcattgattcggttgggtttgatatgtactcgcagatgttatctgaggcagttgctcgtaaacaaggaaaaaatatccaagaccaaaaaacgtctgttgaaattgatttgggcattgatgcttatattccaggaacgtacattacagacgaacgacaaaaaattgaaatttataaacggattcgtcaattagaaaatatggatatgtacgaagaattagaagcggacttgttagaccgctttggagagtatcctgacgaagtggcgcatttattaaccactggccgtatcaaaatggatggcgaccgtgccttgttagaaagtattcgtaaacgcgatcaaaaagtcaagtttgtgttaagtaaaattggcacaaaaacatactctgtggagcagttgtttgaagcgttatcggcaaccagcttaaaagcggatctagcagttgagaaagaacaaatgactatttccttgaagttgccgaaagattgtaaagaagctgtttggattcaagaaattgctgcttttacaaccgcattgcgacaagaaaaatacaaacattcgcaaggaacggattccctttaaaaggaggcctagaagatggcacaaaaagaaatgcaacgaatgatgcaaggtgccgttgtgttaaccattgcttccttcattgcaaaagtgttgagtgcgttttatcgcgttccttttcagaactttgtaggggatgaaggattttacgtgtatcagcaagtttatccaatctatgggattgcgatgacattagcattgtcaggcttaccgcaatttatttccaaaattgttgctgaacaaccagatattcggagtcaaaaacaagtgttgcgccaactatatccctatgtgttatggttagcgattgcttgttgggccttctttttctttggtagtcaagaaattgctattagtatgggggatgctgcactccaaccattaatggaagttgtttcctttacctttttactcgttccaattctttctttctatcgtgggaattttcaaggtcatttgttgatggtgcctagtggtatttcacaggtgatggaacagtttgtgcgtgtcggggttattctagtagctgcgttgtcctatcattactttggtggctccatttaccaaacggggacggtggccatgagtggtgcgttggctggcggtatcttagcggtacttgtcttatggtactacaatcgaaaaattcttagtggaagtacggaatacttgcatcaatggaagattatgcctcaaaccacaggactatttaaacgtttaatgattgagggtggtttggtctctttatatagtgcttttctgattctatttcaattaattgattcctttaaagtaaaaaatgccctcatgcttttcgggctctctgatttagctgcgaaagtggacaaaggggtctatgatagaggacaaccactagttcaattaggattggtaattgctttagctttaagctcgacctttttaccaggtttgacaaaatattttatgaaaaaagaccgtcaacaatttttacaagttgcaaaaatctttttgcgccttaccacaaccttggcatcggcggcttcgattggtctaatgatgttattgccgtacatgaactttacgctttttaaagattataaaggcaacgatgttttaggggtgtatgttttatccatcgcttttatggccattattcaggcctaccaaagtattgaacaaagtcgcaatcgttttaaaggtcctttagtggcagctggtgtgggcttattagtgaagttactgacaacgggctttttcaccattcgttggggaacattaggtgctagttggtctactattcttgggttactagcgacgttattcgttttagtccgacaatcggatgcagcgattaattgttttgttcgagaacgaaactttttgaaaaaactgttgcttagtttagcaatcatgatgctgtcattactggtctatcaaggaattatctccatcttgttccaaggtgtgcatcaccgaagtcaagcgtttttcgttacagttttaggtgttgcagtgggtggtacagtttttattagcaccatcattaagttagaattatttacgatacgtgaatggttaagtttaccgtatggcgcaaaaattttacggatgagacaaaaaaaataaaagaggtgaatgtgatgcggttagataaatttttaaaagtttctcgcattattaaaagaagaacagttgccaaagaagtcgctgataaaggccggattcaaatcaacggagtcttagccaaatcttctagtactgtgaagattggtgaccttgtcaaaattcaatttgggaacagaattttagaagtagaagtcctgcaactgaatgactctacgaaaaagaagatgccacaaaaatgtatgaaataaaatcagaaacacgtgtctctgaagaataaacaggtgaggatggagcgcttggcaagttcattgaaaagatgaatattccaagcgcttcatcctttcagcgttttaatgaaacagacgcgccgcttttgaaaaaaat

SEQ ID NO: 339 - DNA, 528 bp; double-stranded, linear
tcgtcgttgctgaatgcgacagcagttgggcctgtaaaagactcgtctaagccgtctaaaccaacttttttagctgcacgagaaaggattgagtttttgatgactttcatttctacgcctgcatcacgtaattgtttacgtaagttagtgacttcttcaactgttaaaccacggtagtccacgattacaactgatgctgctgattcaaatttctcagcggctgcttgaactagggtttcttttttagcgattgctgcttcactcatttatttcacctcctgattttgatggtggagttggacttggtttacgttakgtaaagtagaagaatcaaatgaaacttcgctnacttcgttcgccaagtattgttttacatcggctttttttcaaaaagtcgtgtaaaacaacaaaactccatgccaccgtrgacatagagggaccgaattgtatataactcaacaattgtcctcggtaggaaattmaagacttgcgtcacctactgtcttcgggacagttaattattaaccc

SEQ ID NO: 340 - DNA, 4126 bp; double-stranded, linear
ggggaagccaagcaagaacagaagcgacgggttatggaacggtttattttgttaaacatttattagcagataaaaacgatacgtttgaaggcaaaaaagtcgctgtttctggtagtgggaatgtcgcaatttatgccatggaaaaagcaactgagctaggcgccacagtaatcacatgttccgattcgtctggttttgtctatgatccagaaggaattgatgtggcgttagtaaaagaactaaaagaaaaaaatcgtgagcgcatttcaaaatatgttgaaacacgtaaaggcgcaacttattatgataaagaatctgtttggaatttcgaaacagcgtatgacattgcgttaccatgtgcaacacaaaatgaaatcmacgaaaagcaagccgctattttagtgaaaaacggagtgaaagtcgtggcagaaggcgcaaatatgccttgtacactagaagcagtcgccgtttttgctaaatcagctgtaatttattgtccaggcaaagccgctaatgcaggtggtgttgcggtttctgcattagagatgagccaaaatgctgaacgtttagcttggtcctttgaaaaagttgacggtatgctagatcaaattatgcaaaacatttatgagacttgtcgtgatacagctaacgaatatcaggcacgagataactttgttttaggtgcgaatattgctggctttgaaaaagtagcggcagcgatgctaagtcaaggactcgtttaataacaaaaaatgctaggatttcctagcattttttattgatttgtttgattaagagaataaatatctctaattaaatagttaaaattaaacaattggtctatccaaaagaatttgcttgaaaaaatgtctaaaaacacgtaaagtatacatgtagtaagtttactttcgaggaggaaaaggaatgtcacacmttcmattagattattccaaattagcaccatttgttgctgaccatgaattggaatacatgcaacacmagtcactgcagtgggacaaagcattacgtgaaggtacaggagctggtaatgattttactggctggattgatttaccgaaaactatgacaaagaagaattcgcgcgcmttwaaaaagcagcagcaaaaattcaatctgactctgaggtattagtagtcattggtatcggtggttcatatttaggtgcccgtgcagcaattgaatttttgacacattcatttaataatctattatccaaagaagaacggaaagcgccacaaatcttctttgctggaaatagcatcagctcaacttatttagctgatttaatcaatgtgattggtgatcgtgatttttctgtgaacgttatttcaaaatctggaactacgacagaaccagcgattgctttccgcgtctttaaagagttattaattaataaatatggcaaagaagaagccaataaacgtatttatgcgacaactgaccgtgctaaaggagcagtaaaagttgaagctgatgcggaaggttgggaaacatttgtgattcctgatgatgtgggcggccgtttcactgttttaacgccagtaggtcttttaccaatcgctgttagcggtgcggatattgatcgtttaatggaaggtgcaaatgatgcccgtaaagaatacggcgcaacgagcgacttaaaagaaaaccaagcctatcaatatgctgcgttacgtaacattttatatcgcaaaggcaaaacaactgaaatgttaattaactatgagcctggcatgcactatttctctgaatggtggaaacaattatacggtgaatcagaaggaaaagatggcaaaggtattttcccagcagccgcagacttttcaactgacttacattccatgggtcaatatgttcaagaaggtatgcgtaacttatttgaaacagtggttaaaattgaaaatccacgccatagcatttcaattccagaacaaaatgaagacttagatggcctaggctatttacaaggaaaagaaattgacttcgtcaatacaaaagcgttcgaaggtacgttgcttgctcacacagatggtggtgtgccaaacatgatcgttaaagtgccaacaatggatgcttattcattaggttatgttatgtacttcttcgaaattgcagtgggcatctcaggttacttaaatggggttaatccatttgaccaaccaggtgttgaagcttacaaacgcaacatgttcgctttattaggtaaaccaggatttgaagaattagcaaaagatttaaatgcacgcctatagaatagtattctaagttaatttttagctttgtggtgatacaaagatgtttgctttgaaatatttttggtgatacatttggtgatacatttataaaaaaatcaggtaacgttttagttacykgatttttkgtgtgcattkgatataattcgagtttatttacagctcgttctttcacttcaggagagacatgtgcatatatctcagtcgttttaacattcttatgaccagmatgtctttaatgtcctcaagtggaactcctgcttgtcgtaaacgagcagcattagtatggcgaccgtcatgaattctgatttttggtaagtttgctttttgaatgatacggtgccaagctgtgtcaacggatcgttgacgaataggcaagccaacgttttttcctctatgattgataaataaaaaatcttggtttgagttagtcatgggtaatacattacttgtaagatcataattaatactatagagttctaagacggagtttctcactctgtttgtcatttttaaacttctcttcccagcatcagttttaacatcatctaaaattacttgaccaggttgctcttttctatacaaacgctgcttgtcaaatgtgagaatatyatctctaaaatcaaagttaaaccatcgtaaggccattacttcgcctttccgcaagcctaagtcgaaaatgattaaaaaaaatacataccacataaaatcgtcaaaatttctagcggtgtcaagaaatagattttcctgctctaaagtgtagaattctagtttcttttctttatttgttttttccttaaccttatctaaaggaaattcaacgaagtaggtaggattgctttttatataccctaatttttgtgcctttttgaatgcgttggaaagagctgcatttacaatttttactgtattgtaactaagcccatttttactttttcctagttctttattcgtaaacaagctattaataaacttttggtgatccgcaggtttatatttatttaattgataattacctatatagggatcaatatacatacggatagcatctcgatagacaattcgtgatccttccttaacgttatttttgtattcgtttatccaaatattcataaattttgaaatagtcattttttgtggattttctttaacgaattcttcagatgcaatttgcccttcaattatttttgcagctttcaaagcttccttatgacttctaaaacctctcttgtgtattttttgttgcctgccagtaccattgctacgtccatttgaaacgaagtattcccaacgttcttgaccatttttcaatttataagattttatagaagccattaatcttcactcctgaacatagattttggaagggtataaagtttaggtttataccagcctttttcatagaacttatccatttttaattctttttctttccatgaaaataaggggagtgtgaccatattatcagtttcaatgtctttttttagttttaattgatccttcagcacatcttgatattcttcttcactataatatgggtttgttaatattggataaattgttacttctggaacatctcttttcaatctttctctcaattcatatggtgtcatcattatagtcaatcctttcgtagttttactgtttaaataaaattagtaacataaaatagaagatttatattaaaaatcatttattttttcagtattcagctcaatggataagaacgtatgtnctttttggttttaaaagaaaagcccataggctaatcttacttagcggatttaaacgtacatccgcaattattacacnccatgtgtttttnttacccntttttccagcgaaaccagcta

SEQ ID NO: 341 - DNA, 13884 bp; double-stranded, linear
gacgatttaggcgttaaattaaaaatcgaagaactaggctttgatgctctgttaggggccttaaaaactggcaagattgacatggtcatctctggcatgtcgccaacgcctgaacgattaaaagaagtagctttttctcaaccatatatgaacgttcaacaaagagtcattgttcggaaagaagacaaagataaatttcattccactaaagatttcgaaggcgttcgtgcaggtgcccaaaagcaaacgacacaagaagaattaattaaaaccgaattaaccggtgctgtccctacttctcttcaaaaaattccagatttaattatgaatctaaaaaataataaattagatgcagtcgttatggaagaaccggttggcgaactatggtttctcaaaatgaggatttagcttttgctgatgttacctttgaaaaaggctcaaaagatactgccgttgcttttcctaaagatgcgcccgttttgacggagaaagtaaatgcctctattaaacaaattaatgatcaaaaattaatggacggttataaaaaagaagccaatcaattaatgttccaaaaagatcaaagctttttacaaaagtatggaaagttctaccttaacggtgcaggctataccattttcctagctttcattggtgttttgtttggtgccattttaggggcattacttgccttaatgaagttagccaattccaaaattttacgtggcattgccattgcttatattgaatatgttcgtggcactcctttgcttgttcaaatttttattgtctatttcgggacaggcgttcttggcttagacttatcaaaagtagcagctggttgtattgccctttctttaaacagtggtgcatatgtagcagaaattatcgtgctggtattcaggcagttaataaaggacaattggaagctgctcgttctttgggaatgaatcaaaaccaagcaatgcgatacatcattttcccacaagctattaaaaatattttaccagcgttaggcaatgaatttgttacagtaattaaagaatcttccgttgtttcagtcattggtgtttcagaactaattttccaagctggcaacgttcaaggagcaagttttaaacccttcttaccttatttaattgtatcgttaatttatttcgtcctaacctttactatctcacgtctattaggtgttgctgaaaggagaatgagtactagtgattaacattaaaaacttacagaaaacattcggaaaaaatgaagtacttaaaggaattgacttagaaattgaagctggtgaagttgtcgtaattattggcccttctggtagtggtaaaagtacttttttacgttgcttgaacttattagaaacaccaactggtggcagcgttgaatttgaaggaaaaaatttattagataaaaataccaacattgatcaacttcgtcaaaaaatgggaatggtattccaaaatttcaatcttttcccgcataaaaatgtcttggaaaacttaacgattagtcctgttaaagtaaaaaaagaagccgcttctgaagccacagaacatgctctttctttactggaacaagttggtttatcagataaaaaagaaaattatccctctcaactttctggtgggcaacaacaacgggtagcgattgctcgtgctttagccatgcgccctgacgtgatgctgttcgatgaaccaacttctgccttagaccctgaaatggtgggcgaagtgctatccgttatgaaaaatttagctattgaagggatgacaatggtagtggttacccacgaaatgggcttcgcaaaagaagtcgcggaccgtgtcatttttatggatgcaggaatcattcaagaagaaggcacacctgaagaaatttttgatgcgccacaaaacccaagaacacaagattttctaagaaaagttttataaaaaggagcacctagtatggatcgcaagaatatcgcaacacgttaccaacaacctactgaaaatttactcatggatattgcaacattggcgaaaaagaccccaaatttaatcgatttatcgattggtgaccctgacttaattaccgatgagcggattatcgaacaagcagctaacgatgccaaaaatgggcatacaaaatataccgcttctgatggtagcgaggcattcattgaggcggtcattcagttttatcagtcacattatcaattatcttttcaaccgaatcaagtccgggccacagttggcgctctacacgggatgtaccttgccttacaagtgattctaaatcctggagatgaagtgattattcatgaaccttatttctctccttataaagaccaagtccttttagcagatggcgttccggtctttttaccaacctatgaagaagatggtttccaaattgatgtagctcttttgaaagaaaaaatcacgcctaaaaccaaagcgattattcttaattcaccgaataacccgacaggcgctgttttctctgaagaaactttcagagaaattgcacaggtagcgattgaacacaacttatacattctttcagatgaagtttatgaagccttttgtttccaagaaacgtttactcccatggctacgtttgctccagaaaatactatcacttttggcagcttttcaaaagcctttgcaatgactggttggcgtattggttatatgattgccccagactatattaacgaagtagccaaattaattaatgaaggcgttacgtattctgcgcctacgttgtcacagcaagcaggaatctatgcgttacaacattttgacgaatttgtagacccaatcgttgaagtgttccaaacacgtttagagtatgtggcacaacgagtagcaaagattcctttcctttcgcttcatccagtcaaaggaagtatatacgccttcattaacattcaaaaaaccggactaacttccgttccttttgtggaaaagcttttaaaagagacacaagtattagtgattcctggaaaagcatttggtgaaacaacaggcgatgagtacattcgtttagccgcaacacaaaatttagatttattaaaggaagcgttcgatcgaattgaaagaatgacctttgaataaaaaaagcttctgcattagctaataatcatagctaatgcagaagctttttagatttcttctatcaattcaatcgcttgcccgccaacatgcggtggaattgacatagtcatcggcggcaagcccacgactgtgaaacggactttggtcccttttttcaagtgagacagtgggatactttcctctaactgttcaacaagtatgtttaaaattaccccatgagaaaataagggaacaatggattctggatcactttctgcttggatattttctaaatgtaatcgcattgacaatggctgcgtctcatttaacacaccagcctctgctaatttccctgtaaaaacagcaagtttttcagtcatttgtttgcctcctttttaaacatcatattgaagagaattaattccatcccctaaaaattctgaagcgttgttaaattcggcaggatcatatttggtataggaaacttgtaatgtcaaagtaatatttcttaaggtttcagaatgggtaaatttctcttgagcttgttgtttgaattcttttctagtagtgtatccgtcatccccatcgcggaaaattaataacgcccaagtcggcggtgtgccgtcgataaagtatggtaagaagcgatcatccgttgtctctttaatcgccgctgtcacgatttgtagcaattcatttttttgttcaggacttaataagttacgaatactttcccaataggccacttggatcacgactaaatataacggcgcttcataacgtgtagaaatatcagaaaataaatcgaatccttcctcgtacatttttgctgttcttaaattagttactgcatctaacgcatttaaccgtgaagtttctttacgtaagcgaatattttcttcttcaatcgtacgaatttgataagtcactgcatagattgttaaacagtagagcggcggcatgattagccaaaataatgagccatagctaaacaaatcatgatagacatactgatatacaacataggtcaattgtagaaaaataaatataagcgaaaatgttaaccccgctgtaattcctacaaaataggtaacgataattaagataactgaaattaatagacaacttaagtccacaaagaaatcattcgttcctaaggccataaagatggttgtgccgacaaccaaaacaattcctaccaacaaagttaaatccaaaagtaaggtcactcgtttttgattcactctattccccacctttcaaattcttcttcacgatgaagaacgcacttaatccaataatggtcataccaattaagaagacaaatagataaatcattaatttatgattattgacaattcgtttacctaatgattcgttgctaacgttgcttacacgttttttgaaacgataatcatagcgacgatagttcggatcgaccacaatggcatctcctttgtacatagaagtattcttctctgtattcacttgtgtagaggctaaaaagacaccttgtgatttagctcctgttaagattaacgccgcggctttcgcattatatggagaaaacattaactgcgccgtaccgatttgtttaccataatctttttcaatgctcagtttctcgtttgaaacaaaacgtgtgaagtccttatcataatggaaatataattgatcgtttaacttacgaatcatcggattatccttaggcgtaccaaaaataatcaagttatgattttctaatgccgcatttttaggcgcttttttataatacgtaatctcaccgacattactttcggcataattaccaattaagttaaatagattggtcaacactttaaaatagttatcgtccattttttctggtaataaaatcgctaaatcagcaaaagaacggcttctgataaaaatgttcggatagttgttaaataatatgtcattcagttcttctgtttgaataaacgcattcgaattattttcaataaaggcccatggagtctgaccatttcgtaaaacttctggtgatttaacattcaaatcaaaagcaacttttaaaacaaaactatcagcaatttctaagttctttggaaattcgagatttaattcatcaccgttcgcacgagcagcggttaatttcttgctgccaattggtttgtcattggcatagaccgtcactaaagaagaatcaaaatctaagttttcagcgtatttaaaatgtaaatgcacgcgacttccattggcattgtttcgatccactggtaaattgacaaagtacgtttgttcttggtgataagccccttctagtttgtcccccgttgaggttaatggataatttccatcaaattctaaagttgaactaaacgtatcggtattctcatcaactgttgtctcttctttatctgtttgggtcattaattcatagtttgctaaataacgtcccgcacgaacaagtaagtcctcatctttagaagtagctactaaaacatgcttatctggttgattgaaaaattttaagacagcctggtcctccacgcgtttgctatcaatttgacttttatactgatctggtaatttatcatagctggcaataatcaactgatagggtgctgactgttctttgttcaaagaagccattggcaacaattcttctgaggtagtaatcaaacgagcagcaccagctaacgcatgggtcgctgcagctaattctttttccgatgcattttctggtgtcaaaataacactgtgtttattcgcaatcgtgtctgctcccacaaaatgattataaaaagaatgaatcgtattctctggtaattgtaaatcgtattggaagtttacgttagatccttcatacatcgttaaccaatttgctggagtttcaattaaattatacatgtcgtttcctgcctgattaataatttggccttcaacagtcaatgtatttgtctctttaatcagttccaaagggatttcaatcgtcttttgttgaataccagtcgtattttcaggacgccaagaataaaacttcacaccattaactgccacagttaaatctgaggtctgattattttttaattgtgtgatttggtaggtcatattgaatgatgctttttttacgtcccaataatcaatttttgtaaaatacatggtgctacggacagaagtacctgttaaagagattgttttattttgaaaaggttgtgtaaaggtatggtkgtctkgttctttgtttncggcatatacggtcggacttgcgacaccaatcagaattgccagaaagaacaaccctattaaagtgactgttttttgtttcattgcacgtttcctccttatttaaatcgttcagttttgtaccattttgtttgtgtttgtttatgaaaaacattttctttaatatacatcaccatgccataagcggcgactactagccacatctgactgtatgtaatatacatcaaggcaataattaagatattctctaaagtcatttcgcctttttcggttgtaatactgacaaaagtactgaaaataaataacaaaatcgctaacaaccacaaggaattgctaaatccttgcagggtcgttgttaagtaaccagacattgataaaactaacatgatgtctgacaaaacgagcgatgtcattaagagaaaataaatggacaagaaatataaaatatcaaaacggatccgactcgctttaggattaaacaataatttagcatttttaacaatgacataaatattgcctttgacccatcgcgtccgttgtcggaaccaaactgacaaagtttgtggctcttgctcccacgtcactgcttttggttgaaacttaattttatagcccatcatatagatgcggaaactgatttctgtatcttcggctaacgctttgtcatcccagccgccaatggcttcaataatactacgacgaacaatgaaatttgtgccaggaatcgtgcataacttaaataattgaaaacgaccggcttgtgccatccattgaaaggcaagtgtttcgatattaataaagcgtgtcaacaggcttgcattgcgatttctcgttctaaatttaccaataaccgcgccgtattcctcactagcaattaactctccaactaaataacggagtgcattcggttcaggtgtattgtccgcatcataaatggcaatcacgtcccccttggcttgcttgaaaccaatgtttaaggcattagacttacctttcccacctgttatattgtctgtattaataatctgcaaatttcgattaaccgcctttttttggacgttagctaaaagctcagcactattatcacttgagttgtcattaatcacaataatttcatagcgatcttgcggataattaaaattcaataacgcttcaactgttcgcacaatgacaattccttcattatgggccggcaccataattgaaacaaacggcgcgtcttcgtcctctacaggtggtggtgcgacaggatctgtttttaaataataaacatagccaaaaataactaagagaatatttacaattagtagactccaaataatgatagttgctgttaacattacaatgtcagcaatggtcatttgtcttcctccttattaatatatttcgaccgataattctttcgtccaatcataaacaaaataatcaggatgattaaagtcagcgtgacaacgccaatcaaaatattgtttgtaatactgaaaaagaatgaaaataaccctgtaaatcgttgtttttcaactgttgaagcccctgtatcagccaaaccattgacaatttgattgtttaagaagaaccgattattccgaaattcgattttctgcgtttgtgtttgaacagtgaaatgttgatccgcttctgaaacactaaacactattggtgcttccttgacttcttgaattagatgatccacttcttttttagaatttggaaatgaaaaactaatggtggtcggcattggaaatcgatagtcattcggattatctttatccgtccattcaatccccgataaataatcatacggtaaatcaaacaaagcattcttataagtgattgattctcccgtttggtttcgataaaaaacgcgttcaatcggcggattttctcttagaatcactgtatcactaattgctagaccatcctcttggtattgaaggtcttgattccagtatcctggagcagaaatgcctactggatagacatgtctgtcgaccaataaactaatctgctgctccatcaattgtttcaaggcacgttggtcatttaaatcaacattgttaacgaccggtgtttctaagaaaatgacccccgtcgaagcaaacgcacgtaacgcattcgtaaatagtttataaggtaaaatcgtattgttttgtgaaacgctcgtactggataaaatataaggatacgtggttttaactaattcttcttgcaaataggttgccacagacatatctcttaacgggttaaaatcagaaatcgtcaaaaacggccgtgacattttttcactttccagccattgactaattacgtctaagctttctaaaaaaacagcgcctttgcgttcaaacattggtagaaaagcatgcccattctcaattacaccaaatggatattcttctggtgctaattcttgtgtttttaatcggccaaccgtctgaccttgcgtattttccagcacaactgattgatcttgaaaaggcaatacttgagaaaaacggtttttttcatcttctaaccgatattgacgatgacttaattctttccacgtaccgctaaaatattgtttttcatcgtcacgcatgtttcgaccaatgtgtaattgtttgcctttaaaatgaactcgatctgctagaaaatcagaggcaataacgccggcttgttcaggccaattcaccatagaaatcaaactgtcatagccatcatttagcaattcgccaggtacataatctgataccgccacactctgaacttctactccaaaactcgtcaacactcgttgtaaagcatccacatcattttcttttttcccagcaatattcaagctgtcatagacaagtaagacatgtttacttggtgcagccagcgccggtttggcaaagccacaaaaaacgaaaaagagtaagaaacacacccagccaataagatattgtttatttttcaattccctctacctccccaatgacttgtggtgttgtatcttgccacattcgtttaccaataacatcagaaacaatttgtaacaagagaaaatctaaaaatactgagactaaaaacaaatgacgtactaagtcactatccccatcaataataattgttgaaatgaaaacaactaataaatttagataaattcctgtcattaaaaagaagcgaaaaactaatctgggttcgttyctcttgagtcctctgtataaaccaacgccatataaaccaaacagaatcacgcctaataatagatagaaagcaaagtttttaggaaaaaaactggctttaatacggttatacaccataaaaaatttagattgttccagcggtgcacgccccgtcgttttctcaaaattccccacattattaggctttactaagtaaacatttgggaccgctgaattcagtccttgccataattcagatggataatttaaataattcaataacacccatccaaaactcgttttatcaaaaaaatcttttttcatttgttcagaagttggtgacacaggactgtattcttcaaagtaggaacgtcccttttgcaacccatattgcgggttgattccgccctctgacatccgtttatctggaaccttactatccttcattacaccgcgcgtcatactgtggtagacatcacgttcatagatatcgttaggaacgataaaagccgctaacgttgtaaaaccaatcaacgcaattaaaaaggccgtcattgacaatcgttgataacgttgtgacaagtagacaaaaaatcctaatccagcaataattacgccaataatcagcaaatattcttggcgtgttgttcctattaaaagtactactgcttgtgccaagataactaaaactattcttctgagccaagttcgtggtttcgtcacccgataaaaatagacagaaaatgctaagacactcacagaaagtaaaaaactcgtcgcttctgtataaaaggaattaaaataaatcgtataggaggtatcccctaagatgaaaataaccaacaaggagataagataactttttttcaaagatacgtcttcggttaagcctcgcaccagaatataaattgacactaaaaaacaactaagataaacgaaacctaagaaacgaatatcgaaaagtgtctgactataaaaaagtttattaagccaaatggcaacggtaatgaaaaattgttgagtggaaacaaagtgcgtcgttgtttcattaaaataacgcataattgaaaagtccttaacaaaatagaccacattgtcgtagctatcaccattgacacgataaagactatttgaatttaacacacgaaaatactcgccattatctcccaagccattaatcggataaacgaataacaaaatgcttgtcactaacccaatccctaaaacggccaaaagacttggagaaatataacgactcaaccattcaaaagccgagttcatgtattttttgatcttttccatgctttcacctcatctagaaatcataggccaaaagagccattaagttattataggaatagacttgtttcgtaactttatcaccaaatcctccataaatcggactgcttgaatccataatttgaaaattattaagtactgtaattgccgcacgatacaactctttgtcattttcggcaacaccaattaaagccgctatcgcataactagctgcagattgatttttatccacgggcgatccatttaaatcatacgagttaaaaagcgttccttgctgaacttgttttcgcacaaaatcaatactagtctgcttcgccatacccacttcacttaaatggacaatcgttaataaagattcaataatattaagtgttccgttgttttcgtatttatttgtttgatgattaaacttcgtttgataaagaggtaaatcatcagaaatatagccatcatctattaattggtaatgatactgcaagtagtctgctgaaatcccaaattctttgtatagataacccagcgtaattaagtcaatataaaacaaagaagtttctgaagactgttgttttgatttactatcgtaaaaatcaattagaatattatctttcatagaggttttcataaaactcttgcctaattttttaatttcttgatcatactgatctgttttaaaatgaccccctgcttcaattaatgaacgaatgatccgtaaatcatcaatcgaggcattgacattgtatttattgccttgctcgtcaattcgataactaaattggacgccgtcgtaaaaggtgtctttcgtctgcttgtaaaaattatcaaaacgtccctgcgtatcaaaagctaaattacgcaaatatagacccgaagactcacttagcaattcatgtcctgtggcgacatctttgcgttcagcatctggtaaataattggttaaaaagccgccgtctgttttgagccgggtttcaataaaaaacttcaacaaatctttgcgttcagctgtttctttkgtgtgaaattcatgttttgttaaaaaatgttgtttgtctgtcgacattaagcgttgaatttttggattcactttttccacctctactttataggatttttctctaaacaaaagaaaatatcctcccagaagcaccacgaataccccaataaaaatccaaagttttctcttcattgttacgcctcttttcctcacttctttattgtcagtgtacacaaaagtacttgtttttgcgaaacttacgctacatcttcaagcgcaagaaaaaaagcaatccataaaaataaaaggattgctttaaccgtttcgtcgatcatttcctgtcatcgtaatctcttttgacagataacgcacacgttccataattcgtctggcttttagcggctcttgttctcctcgttgcgtcacggttaaatgctcttctaaagcttttaaatctagattggaagagaaaaaagtaactaattgttcttgcattcggtattgcaagattacgcttaaaacgtcgtcacgaatccaactagtcatggattccgcaccaatgtcatcaatcattaatataggggatttttttactgcatcgagcttttcaccaacttgatcgcgaccaatggcttgcttcatttctactgtaaatgttggaaaatgaacaattgtcgtagtaaatccacgttctgctaaagcattagccatcgcacctaataagaaagattttcctacaccgaaggggccttgtaaatagagccctttatgaaattcttttggtgtcgcaggatattctcttaaaaattgcattgcttctgctaacgctttggctcgaccttgagaagatggatcgaaatctcgtaaatttgcttctcggacatcttttggcatgtccattgcccttactcgattacgaatttcttcttccttctgacgggcgattaaatcagccgttgggacatacgttacatcaatgtaatgaaaattcaacattaatcttggctcatagccaggggcaatcattgccggatcgtttacttgaaatttcyttttttcytgaacaaattcatacagcttagcataacttttacgaatatcttcatcggttaaacgctctcggtttgcttgtataaaggcttgaacatcttgatctttcaatacttcgttaaccagctcttcatatcgttcattgatgtcacgcttctggataatttttgacatttcttttcctacgtcttccatcattggtcacctccttggtttaaaaattcttgaatttgtcgatctaactcggcttgttcttctggggaaagttttgtttcatcgtttggctgatctgcccattctggcaatcgctcttgtcgaacagtttggcgtttccctgaataattttgttgtcgctgtttttgtttggtttggctttgttttgccaattctctgacatgttcaattgcttttwctggtgaatgaatgccactntgtccccatycatycgcaatycgattcacatactccgcttttaaagtcggttgttgttgaatattgtaaacatagttaatcaaaatattaatcacactagtcggtaagcctgatttggcaaccaaatatttcactaatgaacgttcttgtggtgtcgtatagccgcctcgactattttttaaagcttctaaatattgaataggcggattcttttcactatccataatcatttgaatatccagttcagaaaaaccattcatttttaatgcgttatatcgatacgttngtggctctyccaccgtcaattgtgcttgcttgtttgkcmctacgtttgttgattgtggttttttatcaggatcaaacgcttgatgaatcgttcgcactaattccttaggcaaaattcgacttgtataatagtcaaatgatttcgaagcaaagtctaccatatctaactcattgatgccatataattgatgaaaaacatagacttcttcttgaaaactagcctcatcttcaggcagttgtaaacctaaacggtgcaaaccttccacaaaatagtgccaatcaaaagaatccgttgatacagaaattttcttcgatttttctttttgagaaaaagtttcttgaatcgttgtcaatcggttcgctt

SEQ ID NO: 342 - DNA, 784 bp; double-stranded, linear
attaatacctgtattaatgtcttttacaacttgaaatttgattttttccatggcgacatgcttcttatcccagtattttggatttttagcaatcgtccatttatctgaaataccaacaccgtttaaatcagttaatgtaaatgctccattcgttacaatgttttcttttgttgttccatattctttaccgtactcttttactgcgttttgttggactggaaaataagcagtcaatgctagcaaatctgtaaaataaggtgtaggttcttctaattcgatttctattgttttgtttcccttagattttacaccaagtgtttctttttgttgctttccgatactaatctcttttgcattttttatagcagcaaacagttctacgtttggcgaggcagttttaggatcaagaactctttgccatgccgttacaaaatcatcagcagtaatatctgtwccatcggcccattttgcaccgtctcgaatcacaattgtatatgttttaccayyattggatatttttggttgcccagctgcaattgctggttgtggttgatttttttcatctaatcggtacaacccttccattacgttggccaacaatgtaayacttgtttgatccactgctgttgctggrtctaaactttgaactggtgtacctgccgataaagttgctatttgttctaccttagtttcatttgttttttttgaatcttctgttgatttatttactccacaacttgcaaatacnaacaacacnaatactaaaacaccaactnttttaagc

SEQ ID NO: 343 - DNA, 3907 bp; double-stranded, linear
cccttnattattcctattttttggngntaaaaatcagaaattacttgtaggataagctgtccaataggtannattaactaataggtaaagtaattcgttattcaatggtttcccatctgtcaatatatcgataattctttttacaaacggaggggaatttgaacagaaacgattgcggcaaccatacttattagtaagggtattaaaatgcataacattgttttcttgtcaataaatagattaaataagttatatttttccttatgctacagggcgctcccaaggataacgaccgtattgttgtttataccaattaatttcgtaagtcgttagcttagctgctaaagtataaggggtagggaatttcttaatcatcgctttaatttttgctaacattaattttcctcctttcattgttatgcctataagattataatagatatagacaattacattttagcatactttaaatagatttttactatttttgttaaaatattgataattaattttgaaagtgggtgaacacaaatgtttaaattttatatttttatatttgtagtattgatcgtaatattcttgtggtatttttattcatttaaacctcttttgaacaataaaaaagaggttaccctactatctttaattgcaacaatattagaatctctttttttctggctgtaatccttttaaggcaacaaaattatttataacaaatgttggttgtgttgcaaagttttaaaataaagtaagctacttcaatttttactgtttagcttaagctgatttgaatagagtatcaatttcttcccacggggaaaagtcgaagagaccaatttctcttcgactttctttgtataaagcagaaacaacttcgattcctttaatcgttactgcagctgtataggtggactgaaagttgttgccataaggaagcttccccttcaactgtcggtgatcctgttcaagaatattattgaggtatttcgacttccaatgcttcactttttggtatagaattccttcttctttcagctctttgatcgcttttaatgaaggagcatatttatctgttacaatggaacgtggttgaccgtagactctgattagacgcttgaaaaaggctttagtagagacagtatcacgatggtttcgtagccacatatctaacgtattgcccttcgaatcaatggctcgataaagataccgatcttgacctttcactttgacataggtctcatcaatccgccaggattttgataaggatctacgtttattccatagatgataaaggatttttccatactctttgttccagcggtaaattgtggtatgatccacgccaacactaaatttacgcatgattttggcacaatcacgatagctcaaagaaaagtgatagtataacccgatggcttctataataattcgatagtcatactgttttcctttaaactgatttttcatgactgttccctctcgttcttcatagatttacttgaaattataccgtaaaatagggctaaataaaactttgcaacaaaacccagctcttttctcttgacttttctttatgtaaaaagccttgtattgcaagcaatacaaggctttttatgctataatagaattgatagtaaagtttaatgacggtggctatccaatcgaaagtgaggtggtgcgtatgaacgtacttccaaaatctatagaaaggagaagccttttgtccgtttcggaaagtttgcaactaatgcytgcgtttggtgggtttacattgaccctatccacaaccattgttgccayctgactataaagacaaaaagaaataaccgtcactttagcaggagaccggttatttctaaataacttataaaaactctgccaccgtctttagcggtgctatcaatgagggcgtattaccagtacgtcctctttacataattattataccacattttgtgcgaaaaggtaggcgaatgcctaccttttttcatgcgcgcctaaacgacggtggcggtgggagtgtggcgcgcatganaaaacagatctattgattgtagccatattcagacaacccgttcatggacggttgttggtagacattttgttgtgttggtgcttgatncattgctggttgttcattaaccgttggggttgattgtccttgtgggactgcgtgttgtttttcttctcgtttttgtacggtttctttggactctaaaaactcaaaatcttctacaactaattctgtcacataatgcgtaacgccttgttggtcatcatacgaacgagtttgtagttccccatttacaccaactaatgcgcctttttgcgtgtattttgcaaagacttgggcgggtttgccccataaaacacattgaataaatgtggtcggcacatttccgttagtgtctggtctttttcgcttacaagccaatgtaacgtttgcgacactctttccgttagtggtggtacgtagttcggctccttttgttaaacgcccgacagctgataattgaatcatgattgtttccttctttctgattttttatttatatcatgccttttttagtggcaataaatatcttgttaagtggaagtttttttgaaatgagagtgatttgcctgtctaggcaaatcacctccttctatctgccatgcccttatgagggcatggctttttcaatctctatttgccattgttcaatggcttcttctacttcttctggtacgtgtccccgattgtatttcccttgcacttgtatcactcttttttcacggtattctaaggtaaaatatggtttatctggttcttcttttcttcggataaaaacaatcgttgtttttccttttgtatgttgttcaaggtaatgttggctaccaacacaatggtgcaatacctgcccttcctccacaatttcttgcaacgaatgtggggcgagaaaaagtaagtcgtcaatttcggtttctaatgctttcagttgtttttttcgttcttggtattgctgttcttcaagctctctttcaagtaaattcaacgtatttgtggcattgtcatgggctagttgcaagtttttagggaaaagcacatcatcagtaaatggtgtattcagttcctctagcatgtgtaaatagtccatatagtagctaaaacgctcgccttttcgcataaaccaatgttgaaacttggttaagttcacttctttaggtaattgcttaatttgtgaataatgtaaataattttcaataccttctattctcgcaacttttcgctccttcaaagttttttctagcataagcatatgaaacgttgggttggtggtttttagtcgctgtttattggcttttagccagttcttcgtaataattcgcatatctacttttttatgccatgtgccaaaaacatttcgttcgtcattaaaaagtatttcgtttgctagagtagttgcgcctatcttttgcaaaaactcaatttcattgcggtatttataaatatgcgccagttcttggcgactaattacaggtaacttgaggtatttcaattccgaattggtcgttagattttcttgccagttatttggataaaaaacagtgttcgtgtaagcactactcatgtaaccataatttgctaacaagccctcatgccaatgtccgttctcataatgggctttaacatgggtatcgtttgaaaaccgttcaaggtttgacggctcatagataagggtttctgttccatctgtaatcgtctgccaataactatgggtttgaatttcaattcgttttgcacgaacgagaatgattccaaaggagtaaaattcgttggaaacgataatcgtgagtatttcgttaatcgtgtttttatggtgggggaattcttgcgagaactcgcaagaattgtctcctttnngtn

SEQ ID NO: 344 - DNA, 482 bp; double-stranded, linear
taaagagtcaaacagaacgcttttttagctgcttctttattgctatactacagagggaaaaaacgaaaaggagtatgaaaaatgttttttaaagaaattcatcatgtggcaatcaatgcctcaaattatcaagcaactaaaaatttttatgtcgaaaagttgggctttgaagttcttcgcgaaaatcatcgtcccgaaaaaaacgatattaaattagatttaaaattaggcagccaagaattggaaatttttatttctgatcaatttcccgctcgcccctcttatcctgaagctttaggattacgtcatttagcttttaaagttgaacatattgaagaagtgattgcytttttaaatgagcaaggaattggaaacagaaccgctacgagtagatgattttacgggtaaaaaatgaccttctttttgatccagatggactaccyttagaacytccwggaataataaataaagggagagnaanc

SEQ ID NO: 345 - DNA, 22960 bp; double-stranded, linear
acagttcggtccctatccgtcgcgggcgttggaaatttgagaggagctgtccttagtacgagaggaccgggatggacttaccgctggtgtaccagttgttctgccaagggcattgctgggtagctatgtagggaagggataaacgctgaaagcatctaagtgtgaagcccacctcaagatgagatttcccatttctttaagaaagtaagacccctgagagatgattaggtagataggttggaagtggaaggctagtgatagttggagcggaccaatactaatcggtcgaggacttaaccaaagaatggataagtaaaagcaacttggttattttgattcaaacttcaatccagttttgagtgaatgaagattcaactcaataagaaacaacacccagtgtggtggcgatagcgagaaggatacacctgttcccatgccgaacacagaagttaagcttcttagcgccgattgtagtgaagggtttccctttgtgagagtaggacgtcgccacgcgaattgttgtttttggaggtttagctcagctgggagagcacctgccttacaagcagggggtcagcggttcgatcccgttaacctccattttttgagccgttagctcagttggtagagcatctgacttttaatcagagggtcacaggttcgagccctgtacggctcatattcatatttcatttgcgggtgtggcggaattggcagacgcactagatttaggatctagcgccgcaaggcgtgggggttcaagtcccttcacccgcatatttagccggcttagctcagttggtagagcatctgatttgtaatcagagggtcgagggttcaagtcctttagccggcaccattttgcggaaatagctcagtggtagagcaccaccttgccaaggtgggggtcgcgggttcgaaccccgttttccgcttagccaattcattacgccggggtggcggaactggcagacgcacaggacttaaaatcctgcggtgagtgatcaccgtaccggttcgattccggtcctcggcattgttttatatttagcacccatagctcaactggatagagtgtttgactacgaatcaaaaggttaggggttcgactccctttgggtgcatagttgagtgattgactaagttttaaaaaggtgcacgtgagtttctttttaattcgatagtctttttttattactttaacttcatagcccgggaagtagctcagcttggtagagcacttggtttgggaccaaggggtcgcaggttcgaatcctgtcttcccgattgtgaaaaacagtactgatcatcagtactgttttttttttttgtttaaaatttaagtatcgaagtaggtgtatttttttgtgatgtgtaattcttatcgaaattgcgactaaaaatacaggaataaaggacattgagaatatattcgatggctagttgagaggaaaaggttgagactttgaaatctgcatgttcaacgttaggaatgggcaaaatcactgtggcgtatttagctaattggctgttcaagtctgaagtaatggcaataatcggggtgcctccttctgcaaaaatccgtgcttcatttacgatttctgcagtgttaccactgtaagagacgaggatggctacgtcatttttggtggcattgatggctaaataaaattgttcagcttgataagggattaaatggataaatagctgaatgcgtaataactttgtttgaaaatccgttaagcgaatgtaggagttactgacacccactgctaaaatattttcagcggttaaaagtaaatcaatgcttttatttaacatggcctcggttaataactgttgggtggattgaacagtttcagtcgttaactgcgcaattttcttggcaattagtaaatcagaatcttgcgctaaaaaaggcatattcgcatcaacattccggattgcttggtagtgaatttctaagtcgcgggacaagcggattttaaattctttgaaaccgctagtctctgtttttttacacaaacgaacaatcgtggaagttgaagagttggtggcttctgctagttcataaatcgacatatgcaggactcgttcagtatgagataaaataaaatcaataattagcccttcgttatatgtatagcgttctttttgttctaaacattcgattagattcaatgggttcacctctctgtggtactttgtttcgctttcagtataccttaagcgtatgaattatgaaacatagttacagaattagttagtcgtatttacataagaaagcggtttctttatgatgaggatatcacaaaggattaaggagagaagtgaaatggataagttaacaaactgggtggagcaagccgtagtgcctaaagtttcaaggattacaagtttacgttattttcaagccttaagaaatggtttttttgcgattatgccgttaacaattattggatcgatttttatgttgattacagattttccagtagcagggtatggcgattttatggctggaattttcggtgcaggttgggcggatatgatttcacccgcttatcgagcaactttcaacatgatgggaattatttttgccgggacgatgtcctataaattggcggaaagttacgaaatggatcgtttaacttcattaattttaggaattgttgcttacgtagtcgttttaccgaaaacggtgaccactgaatcaggcgagttgtgacgaaagttttatcgtttgattggttaggaacgcaaggggtgattacggccattattatgtcaattctttcggttgagttgactcgtttctgtattaagaaaaaattagtcatcaaaatgcctgacagcgtgccttctatggtgagccaagcttttagtgcattgattcctgggatttttgtggtagcggtggctttattgattaatgggattgggctttcgtttgcggattccttcccacaattaatttatgcggtgattcaagcgccactgcaaggtttaatcggaaccccttttgcaattattattgtggctggcttaaatggactgttctggtggttcgggattcatccaactgtcatcaattccatgctatatcctattttatatgcgaatgcagacaaaaaccaaagcttagcggaattaggacaattaactgctcaaagtggcaactttggcacggtccaaatgctcgatcaatttgctacaattggaggcgctggttgcacgattggcttggctattgcaatggccatcgtcggacattcatctagaatgaaagccatgtcgaaaatttcgtttgttccagcatttttcaacattaatgaacccttgatttttggactcccagttatttttaaccctttattattgattccgattgcggtcgcgccgattgtatcggtcttgattgcctttctgtcaatgaaaattgggttcatgccaatgtttacaaacattcaagcaccatggctacgccctttctgttttcgggctttttagtgggaaaatggcaaggtgcagtgacgcaagttttagctgttgccgctagtgtcgttatttattatccatttgtaaaagccttagatcgacaatatcaaaaagaagaagcccatgaagtaccagaaacattgtagagaaagaggagtgaaggaaatgcatgttgagaatgatgaaaatatttgctgtgaagtggaaaaaggaatggaaaaaatgtatcatccgatggtgcccgagttggttcaaacctcttccttttattttccaacttacgaagaatttatggcagcgagtatagatgaaaaaaataattatgtttacacacgtggcaccaaccccacaacagaaattttagagaaaaaaattgctcgtttggaacgtggagaaaaatgtaaagtttttgcctcaggaatgggcgctatttcggcaacgctgtttacgttgctccaacaaggtgatcatgttttaatggtcaatacaatttatggagaatctgtttcgtttgtgcaatatttagagaaatttggcgtatccttgaccaaagtagacgttgcagaaacagaagaactttttcaatttgttcaggaaaacaccaaagtcatttactttgaaagtccgtcctcacaaaagtttgaactgctagatttagaaaaaataactgcgttagcacaaaaaattggcgcatacactgtcattgataacacgtgggcgtcaccgttatttcagcatcctttatgccataatgtggacctggtgattcattcttgttccaaatatattggtggtcattcggatattgtagcgggggctgtcattggcaaagcagcgcttgtagatcaaatttttgaacatggtcatcaagcattaggcgcagtcaatagtcccttcaattcttggttagcgttacgaggtattcgtaccatgcccgttcggttggcgcatcagtctcaagccatccaaacggtgctgttggctttgcaaaaggatccgcgaattagtcgcttatatcatccttttgtaggaaatcaacaacaacaagcgttagcagaaaaatatttgacaggttatggctcattgtttgcgattgatttaaaagataccgattttgaacgtttgaaaacatttgtgaacgcattgacgctggtcacaattggggtcagttggggtggctttgaaagtttggccttgcctgtattcaaaggcaataacttggcggctgttcagaaaagaggcttgtcgccagcgcacattcgcatgtacgttggtttggaagagccaacatctattatcgaagatattcaacaagccttggatcaagcctatggcgaagaatcgcttttgtgagacattaagataatcagctgaacaaaagcaactccttcggaaataagccgaaattctccaaaaattaaagaacaattttcggaaatttcttcttatttcttggagctaaacacttttgtctcagcctctgtgattcaataacatattttcatttttaggaggggaacttaagtcagtttgactgaggttgctcctcctgttttgcatttttttattaaagtcaaagcgttcctctttatttaataggcaaagttcgatataataatggtcaatattagtcaagagagaagaaggatggaagactatgagtaatcaaaatacgtcagatttaatcgaggcttatttaaaaaagattttagaagaaagtaataaaattgaaatccgtcgggcggaaatggctaatttatttaattgcgttccttcacaaattaactatgtaattaatacacgttttaccatccaacgaggctacgcagttgaaagtaaacgtggtggaggcggctatattcgcattgtcaaagtacaaatttcagataacgatcaattactaaaacaaatggatcaattgattggcgcaaccttaacagaaaaagatgcgctaacatttattcaaacattgtatgaagaagaagtgattacgaaaaaggaaggcaatttaatgctagctgctttaagtaaaagcacattgaatggtctggggaatcacgaagattttctaagagctcaaataatgcgttcatttttagagcgcttgagctatgaggaggaataactatggatgaactatttacagaaagtgcgaaagccgtactggcgattgcccaagaagaagcgaagtattttcgtcaccaatccgtcggttctgaacatttattattagcactcgttttagaaccaaatgggattgccggaaaaacattacgacaattgaatactgacacagaagacatccgtgaagaaattgagcatttaagtggctatggcaccatgcaaagtccaatgggaaataacaacttatacttaccttattcaccaagagccaaacaaatctttgcctatgctggagatgaagcgaagcscttaggggctcaaaagattggtaccgagcatttattattaggcttgttaagagacgaagaaattttagcgtctagaattttagtgaatttaggattaagcttatccaaaatgcgtcaattattattgaaaaaaatgggcgtttccgaacccaatggcgcacaacgtcgtcggaatggtcaaaataaaaatgcgccacaagggacgccaacattggattctttagcaagagatttaaccaagttagcacgagaacaaagcttggatccagtagttggtcgcggtaccgaagtccgtcgtttgattcaaattttgagtcgccgtaccaaaaacaatcctgtcttagtcggtgaaccaggtgttgggaaaacagcgatagcagaagggttagcccagaaaattgtcaaccgagaagtccctgaagatatgcaaggcaaacgtttaatgatgctagacatgggtgccttggttgctggaaccaaatatcgaggtgagttcgaagatcgcttgaaaaaagttgtcgatgaaatctatcaagatggacaagtcattttatttattgacgaattgcataccttgatcggtgctggcggtgcagaaggggcgattgatgcttcaaatattttaaaacctgctttagcacgtggcgagttgcaaacaattggtgcgacaactctggatgaataccaaaaatatattgaaaaagatgccgctttggaacgtcgttttgcccgtattcaagtagcagaaccaaccccagaagaagcagaagaaattctaaaaggcttgcgttcccgctatgaaaaacatcatggcgtagaaattacagatgaagctctacatgcagcggttcaattatcgattcgctatttaaatgaccgccaattaccagataaagcaattgatttaatggacgaatctgcagcaaaagttcgtttagataaggcagatcaaccttcagaaattaatgaattgcgtaccgaaatttctcaattaattacggaaaaagaagaggccattcaaaaccaatcatttgaaagtgctgctcggattcgtcaaaaagaaaaacaagtgatggaaaaactagaagaattgattgcagtgaaagaaaaaagtctgtctggttacagtacacaagtaacagaagaagacgtggctggggttgtttcacaatggacaggcgttcctttgcagcagctagagaagaaagaaagcgaacgattgatggaattagaaaccattttacatcaacgggtcgttggccaaaatgaagcagttgaagctgtttcacgcgctatccgtcgtgcgcgtagtggcttgaaagacccagcaagaccgattggttccttcatgttcttaggaccaacaggggttgggaaaacagaacttgccaaagccttagccgaagcgatgtttggcagcgaagaagctttgattcgcgtggacatgtctgagtttatggaaaaatacagtactagccgtttaatcggttctcctccaggttatgtcggctacgaagaaggcggtcaactaactgaaaaaattcgtcaacgtccttattccgttattttgctagatgaagtagaaaaagcccatccagatgtctttaatattttattacaagtcttagatgatggccatttaacggatgccaaaggacgaaaagtcgattttcgtaacacgattttaatcatgacctccaatttaggggcaacagcgattcgtgaagaaaaacatgttggcttcaatgtgaaagacatttctaaaaatcatgaattaatgcaaaaacgaatcatggaagaattgaaaaaagccttccgtccagaattcttaaaccgaattgatgaaacggttgtattccattccttgaaacaagaggaaattcatgaaatcgtaaaaattatgagtcaatctgtcgtgaaacggatggctgaacaagaggttaaagtgaaaatcacaccagctgcaattgaagttattggtaaagtcgggtttgatccagaatatggcgcacgtccaattcgtcgggccttgcaaaaagaagtggaagatcgtttaagtgaagcccttctttctggtcaaattcagttaggggataaagtaactttaggcgctagcaaaggcaaaattacgttaaatgtgcgggcaccaaaagcaccaaagacagaagcgaaagaattacaaactgtatagatgagatgcaaaggaggtcgggacagaagtgtttaactccgagaaataagaaggaatttccgaaaattgttctttaatttttggagaatttcggcttatttccgaaggggttgcttctgttctcgccgtgtatcagtttttgagcgtggagcaaaaatccaaagtgatttttgtcccacgctcctttttctattttccagtggcgatttctttttgagaattgccagattgatttttctgtgctacgttaataaggaggggtgatggaatggaacaatctttttttcgagaattactacattatcaacgtccaaaggataatccttttcgactagtgtttgctggcttggttatgttcagcattctttttttgggctatatcaatcatcaattattgatttcaagctttggctcgttaggtatttttacttttttatattatcagccgctaccattaaaacagttaatgactcgtttatctgtggtcggtagttacctttttttaggaaatttgttaggcatgttatcgacccatattgcatggcttattcccattgttgttgcactggttggttttggtggccgctttttctttgaagtctacgatatttcaaaaccaggggccttctttggtgtgatggtgacagcgatgggtgccagtacgagcattccgctagcaaaaattccgttcatgagtggctgtatgttattaggcattggcttttccattttgtttgcactagtgttgcattttacagagaaggaaatcagtgtcccgctagctaagcgatcattacgggaacgaatttatcagcatccagaagcgccattagatagcatatattatagctttgttttattttttgctgtatatatcagcgaaagtttacatttacaaaatccgtattggttagtcgtttcctgtgcatccattctacaaggagacaatttacgtgcgattaagcagcgaaatattcagcgaatttttggcacaacgattggattggttatttccgcttttctgcttaatttagctttgacaacttttgaatcgattgtcgtgattacaatcttatttgtgaccgttgagtattttattcgtcgtaattatggattggcgcaatttttcacaacgcctatggctctgatgctttcattgctcgttcgtcagcagtacgtgataacattgattcaattccgctttttggggattgttttaggcagcttgttagggcttagcagcagcgtggctattcaccgttgtagtaacgttttatgaacgaaaatatcacttgaacgagtgangaagaacagatgaccagtaattaaaaaaagagcatttggtaggtaagcggatggcgcttttctaccaaaattttttcggaaacattgtgaaaaatgtacgtttaatacagataggctcttttaaagtttgtgaacgtatgatactattaaacggtcataaagaaggaggctatatttatgattgaactgattgcaactgcagaatctgttgagcaggctgtagaattactcgcaacaggtgtggatacattatatattggagaagaaacattcgggttacgtttgcccgtatcttttacacgagatgaacaacgcgagattgtgaaacgtgcacatgaaatgggcaaacaagtgctagttgcagtaaatggcattatgcaccctgaaaaaatgaaattagtcccagagtatctgacatttttaaaagaaatcaacgtcgataaaattactttgggtgatccgggtattgtgtttattatgcaacgagatggattagaaattccttacgtttatgatggcgaaaccttggtaacgagctcacgtcaaatcaatttttggagtaaacgaggagccatcggagctgtcctagctcgggaagtaccttttgaagaaatggtcgcaatggaagaaaacttagcagttccagctgaaattcttgtctatggggcgacctgtattcatcaatcgaaacgcccattaattcaaaattactacaattacacaaagaacgacaaaggggttacgaaagacgaagggctgtttatttctgaacccaaaaaaccagaaacccactattccatttatgaagatagtcatggtacgcatatttttgccaataacgatgtgaacttgatgaatgagttaacaaacttgtatgaccatcactatcgtacatggaagctcgatggcctttacacgccaggtgaaaattttgtcgcgattgctcgcttatttgctgaagcgaaagcagcacttgaagcgggaacttggtcagaagatcaagcagctcatgcaacagctgaaattgaaaaattacatccaacaggtcgtggcttagacaatggtttctttgatttaagtgccgatgcaataaaataaattgattcatttaaggggaagaagaacatgaaagtaatgacagaacgaacattgaagcgtcccgaggtgttggctccagccgggacgctagaaaaactaaaagtcgcaattcgttacggtgccgatgccgtttatatcggagggaatgcctacggtctgcgtaccgcgcaggaaatttcacgccagaagaaatggcggaaggcgtactttgcccgcgaacataatgcgaaagtttatgtcgctgccaatatggtcactcatgaaggaaaccaggaaggggcaggagcgtttttcagagaattgcgagacatcggaatttcagctgtgattgtttccgatccagctttaatcgaaatttgtgcgacagaagcaccaggtttacccatccatttatcgacacaagcttcagcaaccaactatgaaacattagaattttggaaaaatgaaggcttagaacgtgtggttttagcgcgcgaagtttcaatggaggaagttgcagcgattcgtgaaaatacggacattgaaattgaagcctttattcatggagcaatgtgtatttcatattcaggacgttgtactttatccaaccatatgtcgatgcgggatgccaatcgtggcggttgctctcaatcttgtcgttggaaatacgagttatttgatatgccttttgggacagaacgtcggagcaaaaccagcgaaggggaagttgaagaagagttttcaatgagcgccgtagatatgtctatgattgaacatattccagaattaattgaaaatggtgtcgatagttttaaaattgaaggccgcatgaaatccattcactatgtttcgacagtcgctaatgtgtataaaaaagccgtcgattcttacatggaagaccctgaaaactatgtctgccaacaagagtggattgatgaattatggaaagtagcacaacgtgaattagcaactggtttttattacaatacaccaagtgaaaatgaacaattattcggcgaacgtcgtaaaattccgcaatataaatttgttggtgaagtgattgcgtacaatgaaaagacgcaagtcgcaacgattcgtcaacggaaccttttcagtgtcggcgatgaaattgaattttatggtcctgggtttacccatttccaccaaaccgttaaagagatgtataatgaagacggtgaagcgatcgatcgggcacctaatcccatgatgttattaacaatggaagtgacgcaacctgttgcagtcggcgatatgattcgtaagaaaaaataaaccagccaaaaggaggagtaattatgagtgtccgcgtgaataatttattaaaattaccgtctttgcgagaagcaacggtactttctggtaaaaaccaattggacacatctgttgcttctctttcttttttagaagtctctgatatgtctttgttttcggaaaaacttcacaaaacaaatgaataccatgctggcgaaattttgattggttcattttgtgccattcgtcatgatgtggtgaagcaatgcgaaacgattcggcatctccatgaattaggcgaagtaggcctaatcttgtactacgttgggattatcgtaccgaaagttgcagaggaagtgattcaattagcggattctttaggtttcattttaatccaaatgcctaaaaatgatcccacattacgctacaacgaagtcatttatgaagtcatgaaattgttagtcaataaaaataaaatggcttcttttgcaacggacctcttggaaaaagtttcccttttgcctgaacaaaaccgcagtgtggaaatgaccttgaaaatcctatccgattttttaaaagtcaatattgcgttaaccacatataccaatgaaatcatcagcaccatcaattggccgcgaagcacgaaattgcccttaaccaagttactttatcaatcacaagagaaagtagcgctgggagaaacgacctacttcattacctcgcaaaaacttcctcagaaagatggacaaacattgaagctttacttcattcgagaagaagagcagttaacctcttttgagatgaatcaagcggtggaagttgttcagatggctctgaatttatgggggaaaaactatgacgaagtcagtgagtatgccttagtccaagcaatcattaacgatgaaagtgataagatgtaccaattagccaaaaaattaatgattgatatttcttctgtcgaaacgatgtggcttttgcccatttggcaacaaggacaagaaatccacgctattcagcaagatttgaaagatttcctacgttactattaccaaacaacgattgtccagcaaacagaaaattatctgattgttctcttaggtaattatttacacaaacagcctgaagccacgattagtaaagaatacttgcaagccacagactatcaggactatttaggtgaaatcatcctttgtccgaaagttcgtaacacgactgaagtgcgtgtcagctaccaaaccgctaatcaagtcgcgccgtttttaaagcgtgtctatccacaaagaaaagtgttatcaatcgcggaaattcgtacagttcaacaaatgatgacgtgtctccaagcaggagaagaagcaatccaacaacgcttagcagttatccaacctctcttaaaagaatcagagcagttaatgacattaggaacgtttttactagatgcaagtagtgattttaatgaatgcggcgaacgcctatttgttcataaaaatacggtcaaatatcgtatcagtaaaattaatgaagcgctcggctatgatatgactaacgccgccgaagcctatgaagtctatttggcgatgatcttatatcgcttggtcacgaatgaatgaaaaaagcagacagaggtcgggacagaagtgtttaactccgagaaccacgtaggtactgttcaacactctcaaaggctcaaatacatcgagtaatcgcagatgtcatctatttgctttgcaaatagtgtttctcagcaataagaaggaatttccgaaaattgtcataaaacacaacgaggtacgagttgatgttgcatgatacctacccggtgttctttaatttttggagaccaagtaggtattgttcatcatcgaatcactacgttcttcgtgattctcaacaatttcggcttattgttttctcgccaaaggctcgtcacagttttatccttgtaagttccgaaggaccttcaccaagtaggtacgatgatttcatctgttcgtgcttcacagtgaaacatcgcaactcttagagctgtagctcttttgaaggctgtactgtgacgagacgcatgtcgagaaaacatcttagaagttgttgagatcgaagcaacgcgtagtgttgcctctgtttccgccgtttatcaatttttaagsctgggacaaaaatccaaagtgatttttgtcccaggttcttgtctatttttattttaagccaaaacttcctcgatattttttttaatttgaaaaagacctatgactgatttttcgttataattgaaaaaataattaaggaggaatgagaatgaaattaaaaaacgagcaacaacaatcgtggcttagcttagcatttgtttgggcgggcgcaatgattagcgtgccaggattaattattggaggaacgttagttgcaggcatgcctttatgggaagctttgttaacaggatttattggttacggtattattgttattttaatgattttacaaggaattcaaagttccgacttacaagaaccttctgtcaaagtcgcttctcaagtgtttggcattcaaggttcgcaaaagatcatttctattattctagcgattgcttgcttaggttggtttggtttgcaagccaatgtcagcggcggcgccttcacaaactttttaaaaatttacggcattgatttacctgtgtcgctttcttccttaatctggggaattatcatgcttatttcggctctttatggcataaaaatattgaaaattctgaattattttgcggttcctgtgttagttctggtttgtctttatggcttggtggcttcgttaagaaacaacggttgggcggctgttagtcaatatacccctcaaacagcaggaagctttatgtcaggtctttcaatgactgtcggttcttttgcattaggcgcagtaattgctggagattactctcaatatgtttcttctcgtaaagatgtggtcaaagcggccaccttagggattttaccgacaggcttgttgatgattggcgttggtgcggtcttgaccattgcatcgaacaccgcagatatcacggaagtttttatgaatctcggttttccagttttaggaattattgcgctaattttagcaacttggaccacgaatgccgtgaatgctttttctggcggactggccttgattaatgtctttgatattccaaaagaaaaagaaaaagtcgctgtcggtgcggccggcgcgattggaaccttattagcagttgtggggattttaaattactttacgccgattatgtccgtcctttctgcgatggtgccaccagtggctggtgtaatgattgctgcctattggttgattaacaaaggcgatcgaaccaaatggcagccaacgcctggcgtgaataaattaggtgttttttcatggctaattggtgctgcagtggggggcattccggtgattatgagtttctttcccaatgcccctcaattgcctaaccaaccgctaattggcattgttttatcgtttgttatttattatttcggtgcaaaacgtcaacagacgaacaccgaatcattagaaatggaatgaagaagaggagtgtcggagaatgcgttatttagatgcagaagcaattgagaatatagccacaggagcagcttttttagggacaggaggtggcggtgatccctacattggtaaaatgatggctttgtccgccatcgaagaaaacggacctgtcaaactggtttctccagaagaaattgccgcggaggattttttcctacccgccgcaatgatgggtgccccatctgtcgcaattgaaaaatttcccaaaggcgacgaattcgtccgtgtctttgagaagttaggaaaatatttagaccaagaaacgattgcgggaacctttccaatggaagctgggtgcgtcaattcaatgattccaattgttgttgcagcgaagctaggcattcccttggtggattgcgatggtatgggtcgggcctttccagaattgcctatggtaacgttccatttgaatgggatgtcagcgacccctatggcaattaccgatgaaaaaggaaatattggcattatggaaacgattgataatacttggacagaacgtcttgctcgtgttcaaacggttgaaatgggcgccagtgctttagtgagcatttatcccgcgacaggcaaacaattacaagactatgggattcacaacatcgtgacattatcagaagaaattggcaaagtgattcgaggtacctatgcagatgaacaagaaaaacgccaagcattagtagaagttacggatggctttgaattgttccaaggaaaaattctagatgtggaacgagaagtaaaaggtggcttcaatttgggacgtgtcaaattgagtggcttaaacagtgacgctggttcagaagcagtcgtccattttcaaaatgaaaatttaattgccgagaaagatggtcaggtgattgcgatgacgcctgatttgatttgtatggtagatttagaaactttaacgcctgtgacaacagaaagcttgaaatacggcaaacgtgtccaagtaatgggcttgaaagcgaatgccgcttggcgaacgaaaaaaggtatcgaaacagtgggtcctcggtatttcggctacgaaatggattatcaaccactagaaaacttagtagcaaaggaggacaaataaatgtataaaatcggtatcgatgtcggcggcacaaatacagatgctgttattttagatcatcaattaaacttgattcattcagtgaaagttccaacaaccgatgatattcaaacagggattgccggtgccttaaataaagtcttggcagaatcagcagtggacccaaccaaagtcacacatgcaatgttgggcacgacccaatgtacgaatgccattgttgaacgaaaaaaattagcaaaagttggggtccttcgtttgggctatccagcaaccgcttcggtcttgccttacacagcttggcccaaggatttagtggccactctttcagaaacatatgctttagcacatggcggctacgaatatgatggacaaccattgactgcactggacgaagaagaattacgtgggattttggcctcttggcgaggagaagtagaggcaatcgcagtaattggcgttttttcttctttaaaaaatgaccaagaattgtttgttcaagcacttgcgaaggaagtgttaggggcagatgttcctgtatcttgctcctcaatgattgggtctgtcggtttaattgaacgggaaaatgcgacaattttgaatgctgcgttgcacaaagtaattaaagtgaccagcgaaggctttgaacaagccttagaacaagaaaaaattcatcacgcccaagtgtacttatgtcaaaatgatggtacgttaatgtcgttaacgtatgccaaacagtttcctattttaaccattgcttgtggaccaaccaatagtattcgtggcgcttcatacttagctggcttgaaagatgcggttgttttagatgttggtggcacaacgtccgacattggcgtgttagtggatggctttccaagagaatcttcactggccgttgatgttggcggggtacggaccaattttagaatgccagatatcgtgtcaatcggtgtcggcggcggcagtctagtgcgtgaacaaccagatggttctgtgacagttggccccgatagtgtcggctaccgtattacacaagaggcccttgtttttggcggcacacaattaacgaccactgatatcgcggttcgcttaggccatgcccaagtcggtgatcctagcaaagtggctcatttagaccaagcgtttgcggaaaaagtgtaccaaaaaattggcgaattggtcagtgaagcgattgatcgcatgaagaccagttccgcagacgtgacggtcgttttagttggtggtgggagtattatcatccccgaagaattgacaggcgttaaagcgctaattcgcaacaaaaacggagcagtggcgaatgccatcggtgcctctatcgctcagattagcggacaatacgaacaaatttatgtttattcaaaaatccaacgagacgcggcgttgactgatgcccaagaaaaagccgtccaacaagctgaacttgcgggtgcagtccctggcacaatcgagttagtcgaggtggaagaaacaccactcgcctatcatccagaaaatgcaacccgcttacgagtaaaagtggttgggaatatgtattgaggaccagtgcaaagcaaaagttataagaagagttatttgaaatatgaggtcgggctagggctgtcgattgaagttttatcctgaagagtacagaagaagctatatctgtctcgccgtttattttaaaattcagagttagagtaagtcyaaatgacttaccttcctaagttcatttttttgtgttgacatatttttttagaaaaggncaaaatgttaacatggtatgttgttggggtgttatgaaaaaaggagagaaaataatgagtattttaaaagaacatttaaaaagaaattgtgatgcacgaatggttggtgttttatcgttaagcataagagaagcatatcgctacttaatggagctaacagaaagagaatctatttttcaacgagcagaaatgaaaaaagtttagggacacgttcggcatggattggttgatgttggtttaaaacaagtgttaacttcatcagcaatcccacatgaaatagctgacaaagctagtagtcgatatgtcaatggtcatacgtacttaatgattgaaaccaaaggcgcaattttaacgccagcgaaagttttatcagaagcttcagttcctaaaaaggcattatttagaaatcgtgggagcttattaaataagcagtataatttatttgacaaaccagaagatttaaatgagtattatgatgccaatcaaccgccattcttattactaacttatggcggatcgaatcatcaattacgttttgttcgattagggttaccagatattggagttggtcgttggattgaccaaattgatattacgcaggcaccagttcttttaaaaaatccagaggaagttcgtaaggacctacatttgacttttacgtcaaccgctgacgaactgataaggagaggactagaaaatgaacgagaggttgatttttaatccaaagcaattaacttcggctcgcattgcacgaggattaacaatgaaagaattagccgaaaaagcagagctatctaggcaaatgatttcgaattacgaatcgggaaaaacaattcctaaagcagatagcatattaaaactaatttctgttttacaatttccccgtagtttcttttcagcagatacatttgaattgtattcaggcgcaactttttttagaagccgaagtgcggcgacgaagaaagtaagagatatgcaaaaagagcggttaaaatatgtgcaagaagtgtataaagtattagcaacatatgtgaactttcccaaagtttgtttaccagaattaattgaaaagagtatttatgaaatcacagaagaagaaattgtgaaaaaggctgaggaattacggaaaatttggggcttagacttgatttcgccagtccctaatctcattcagttggctgaacaaaatggtgtgattatttcagaagccaacatgtccaatccaacactagatgcggtctcgcgttggatgattggtcggccgtttattatgctcacagataatcatgaatctgctgtccgtcgtcgttttaacgtggcgcatgaactaggacatattttattacacaacggtgttgaaagtattcatgagtattcgcaaacagaattaaagaacattattgagtatcaagcaaatctatttgctgcgcattttctccttccttcagcggctttttctgattcgctcttgtctatttcgttagaatactatattgatttgaaaaagtattggaaagtttctcttcaatcaatgattcaaaaaatatacacattagcgttaattaatgatgatcaacgtctctatttaaataaaagaattgctaaaaataaatggaaaacgaaagagccttacgatgaacaactgactatcgaacagccagaagttttccaaaaagtttaccacatgattttagagcaccaagtcattcctgcaagtcaactaaatcaagcttttaaattacctaaagaagaaatagaaaagatattaggaacagctattcaaacggagcaggacaaaacagaaattgttcttgaattattacgttctaacaagtaatcaaaaagaaggaggaataactatggctaaattattcgcctaccaaattggtcaaaaccctcgtattcaaacggaccttttggtagatcctcagctgtttgaagatgagcatggctgtatgggtgcagtgggcttcgggttagcagattgtgttcaaaccggaatgtttacagatattgaagtgataaaacggtatcttcacgaagcaacctacgtttttattaatggtgactttgaccgactaagttatttagaaattgggattgcactttccttaggcaaaacactttacgtcattacaatgaacccaaacgtaacgaaagaagatttaggaattcccttcgacaatgctacgattgaattcctttcccccagtgcttttacggaacgaatccatgaaacagaagcagcagaaaactaaacaaaagtaagtaatacgactgtctttttttgctattttttgcgataataagggagaaagttcaaattgaaagggagccagaataaatgaaaacctatgattatattgttattggtggcggtagtggcgggattgcttctgctaaccgcgcaggaatgcacggagctaacgtccttttaattgagggcaacgaaattggtgggacctgtgtcaacgttggttgtgtgcctaaaaaagtcatgtggcaagccagcagcatgatggaaatgatggaaagagatacagcaggctacgggtttgatgttgaaatcaaaaattttagctttaaacaattagttgaaaatcgtgaaaaatatattgacttcttacatggtgcgtataatcgtggtttagacagtaacaacattgaacgtatccatggttacgctacgtttactggggagcaaacaattgaagtcaatgggacagaatatacggcgccgcacattttaatcgcgacaggtggtcgtccgaaaaaactaggtattccaggagaagaatatgccttagattcaaacggcttctttgcgttagaagaaatgccaaaacgtgtggtctttgtcggtgcgggttacatcgcagccgaattagcaggaaccttacatggcttaggcgcagaaacacattgggccttccgtcatgaacgaccattacgaagctttgatgacatgctttctgaaaaagtcgtagaacgctatcaagaaatgggcatgcaaattcatccgaatgcaacaccagctaaaattgaaaaaacggcgcagaatgagtacgttattacatttgaaaatggtgaatcaatcacgacagatgccgtgattttcgggacaggccgtcagccgaacacggatcaattaggcttagaaaatacgaaagtagcccttgatgaaaaaggctacgtcaaagtagataaattccaaaataccacgcaaaatggcatctacgcagtcggcgatgtcattggtaaaatcgacttaacgccagtcgcgattgccgctggtcggcgcctgtctgaacgcttatttaacggacaaaccgatttatatctggattataacttggtgccaacggtggtctttacccatccaccagttgcgacaattggcttgacggaaaaagcagcgcttgaagaatatggtgaagaccaagtgaaaatctatcgctctagctttacaccaatgtattttgctttaggagaataccgtcaaaaatgcgacatgaaattaatctgtgtcggcaaagaagaaaaaattgtcggtttgcatggcatcggcatcggtgttgacgaaatgctacaaggctttgcagtcgctattaaaatgggcgcgaccaaagctgattttgataatactgttgcgattcatccaacaggctcagaagaatttgtaacaatgcgataaaaggcgaataaaccccaaaaaagagcgttgctgatgcaacgctcttttttgaatacacgagttatactatttgattcgtaaaaagtaattttttatatcataccaataaccacttttccatcttttaactactgacttttccaagaaatatgctatgattaaaaaaatcagcaaaacagagggtagggagttagaggatggataaaattagaatcaacaacttgaaatttttcacaaaaaatggtgttttggcagaagaaaaacgtctaggacagcaagtagaaatcgaccttgaaatgcagttgtcgttagctgaggcagggcgaacagatgatgtcactcaaactgtcaattatgccgaagtgaatgaattgattgcccaacgagtaaacaatcactcgtacgatttaatcgaaggtttagcgagtgctattttagatgatatttccgcagattatcaagaacaattgaacaaaattatcattaaaattagaaaatatagtgtgccgatgcccgggctttttgacaatattgaaattgaaatggagcgagaagtatagatgattggctatgtagcattaggtagtaacgtcggcgatccatacgcaaatttagtgaaagcccgcaattatttaaacgaagacccgcagattcaggtcgtggcttcttcaaaactttatgaaacggatccttacggctatacagaccaagatgattttttgaacgccgtattgaagattgatactagctataccgctgaagagttattggctgttacccaagggattgagcaagcaatgaaacgtaaaaaattaattcactggggtccgcggattattgatattgatattttattattaggggggcagtcagtcacgttgccccacttacaagttcctcatcaagaattaacaaaacggtcatttgttttgattcccttaagtgatgtttacgcagaggaacaactattgggcgcgccaatagctacgtggattcagcgcagtggcaatcaagaagaagtgcgagtaagcgaaaaggaatggtagagatggagcagga

SEQ ID NO: 346 - DNA, 2966 bp; double-stranded, linear
ataaaggaagatgccttcaccgattccaccagctaaaacaggagtgacgatatwgaaaaggctatgtttccaaccgrgacctaacagtgttccaacaagggtcccaacgcccattgctaaaatcattcctaatgccatcgggacaatcatgcgcattaaaccttggactaaaattttgcggttcattccaaggatacttccacagaccaaacatgcaatatagaaatagagaaagtttgcttgtttcattaaaatatctgttgagtctaagacattttggttgagtaaattgaaaaagaccataattgatggtactaataaagataaaattgctggaccgccaaaatgtttcaaaataggaatatttccaccaattgttccaagtaaccaacccattgttaaaattacggcaaaaccacctaacatattgactggtagttgttctaatagagccgtaacaagaataatgctagctgttacaagataaacaggtaacgtaaccgaaccaatcctcgttttggttaatttgttgcgccaatctgtttcattagcagctgttgcgggcaatttcttttccatgctatttcctcctataactttaatctatattcatcataatgtaaacgttttctgtagagtagattatttaattaatttaactaaagaaaagttttttaaccaaatcttcctatgctatactttatttgaagagaaaagagggatggaatgaagcgtggcgggaaattatggtgtttcttatcagtgatttttattgcaacattaattattatgattactttcttttacggagtaacgacggttcaaacaattaaagaagttcgtaaaaaccaagagcaagcacttttagccgtcggggaacagttggctattgaaccgaatgttattgaagccttaaagaatgatcactattcagatgaattggaagcgtatacggttcgtttaggtgaaatccatcagttggattttatcgtgattatgaatatgcaggggattcgtttaacacatcctgatcgccaaaaaataggtaagcattttgaaggggcgatgaagtgcgagcattaaaaggggaggaacatttgtctgttagtcaagggagtttaggagaatcattacgaggttttgtcccagtctatgatcaaggaaaacaaattggggttgtggcaatgggcataaaatgacctcgctttcacaattgattgaacgaacmaaaaatgattacacagtgagtgtccttttaagtgttggttttggctttatatagccatcgtggtttcntattatttaaaaaacaacttcacgatttagagccaagagaaattgctcgtctattagaagagcgaaacgccatgcttgaggaaacgaaagacgcaatccttgtgattgataccgatcaaaatattttattagcaaatattgaggcgactaaaatgtatcataatataacaaatagtgaagaaaatttactaggaaagaaactttcagcattggttttatctcctgaaaaattagtcgtacattcaaaaacagagcaattctatcgtcaaaatggccaggattatttcgtctcaatcgccccgattaatgtccgtaaaaaaacaattgggcatgttatctttctgaaaaatgcgacagaaacgtttattgtcgcagaacagcttgtcagcacaacaacatatgcttcggcattacaaagtcaatcacacgaatttatgaataagatgcatgtcatttatggcttagtcgatttagaagattatgaggcgctaaaacattatctagccgatttattgaaaccagaaaaggaatttgcacagcgcttagctattttggtcagaaatcctattctagcaggttttttaagtggggaaagaatcaagtttgcagaaattaaaacacaattagctattgaaatttatccagaaattccaccaaataaacgagatgaagatacgcaaaatttgattgctatctaccgttatattcatcgtttcctgatggagcaaacgttgccagaagagatcattgaaaccattgattatcagccaggaagtttgacgacgacttattcgtttgcttatccaaaagaacaactggaacgctttgagcaagagtttttcacttcttatttggcaagattattagagaatgcggaagcgacattgacttgggaaaaccaacaaaacaattggcttgtccttcgcataaatgttcattacgaaggagcagaggaaaatgaacctattgattattgaagacgatcctatggttgcatatatacatcaaaaatatcttgaaaaattaattcaccaaccgactatttttacggttgcaacaattgctgaaggtctactactaacgaaagaaaaacaaccagcacttgttttattagatgttcatttaaaagatggcaatggcttgacctatctggcaacaattagagatgaaaaaattgatacagaagttatcctgattacggctgccaacgagttggaaaatgttaaacgaagcttacatttaggcgttttagactatttagttaaacccttttcttttgagcgatttcaacaaagtatcgaaaactatcagaaaaaaactgctcaattcacgctggaaacgaaggagctttcgcaaacaaaagtggaccaattatttcattattcacagacaaacgcacgtaaaaatgaacaagctcttcaaaacatgtccttagaaaaaggactaacacmagcamcattacaattattgttaaaaaaaatagacgaatttaccgactattttacgattcaagaattatcagaagcgagtcagctttcacatgtttctgttcgcaaatatgtgttgtttctaggaaaaaaataaccttttagaaagtaaaaatagctatttaaaagtggggcgtccctatcaatcgttcngagaatttagtattttttaatttttaggaa

SEQ ID NO: 347 - DNA, 1580 bp; double-stranded, linear
aaattatttaaaattcagactcattagtagatcagattaatatctaactttaatgctcaaaagtgctgatgatgaataagccatcatgacagaatttagcggcatcataaaaattattcagatcaaacgtcaactatgattatagcagaaaaacaatgggttcaaaattgagataagaaaccagctagactgtcracgtaaaatgataggctaaaaaaagtgatgtgtgcttgmtacratttttatacagtatttcrtgatgtrataaayaaattktctattaaaatatgttnactaaaaagacaaactttttgggggcactacatataccttgttggtcttttntatattccaattgttattaggtatgtagcaggacatttaaggtatattttgatttgtgttctgggtcagcgcaccaaaaacaaaaatgaaacgtgtgtcagaggaagtatgtgtggttttccaataaaaacagctgatggtccaattttaaagaataatatagcacaggagaatatgaatgaaaaaaggaaagttaccattaatgatatagggagaaatwtagtgtatttarggaatttgagtaacggtaaatagttgatgaatatatacttttttagtrgaaaaaaaacactgataggaggtataatattgaaaaagagaatatgtatcactactggagttgcaatgttattaggattatcaccgatattaacaacaggggctacagtatacgcaaatgaagagagtaactacgtataagtaaattctacaacaaaagagctagagcaacggatggaggcgctagccaatcaatacaaaggagtttctctatttgaaaccgaattcaataaagaaaatatgactcctgttcaattagaattatataacaaagttttagatctacaatatgatattgctttacaaaatggaagtgcaaaagggatgtctagagagcaatataaacaatatctatcaaacgcgatacaaggttttataatacaacctagaaatactggacatggtttgatttctgttgacgtcttagaaacagttttagatactgcgcttaatgttgtattaattatcggaagttttgggtcaatgtctgcaatggttaaagaattgggtcaagaaggcgcaaaaaactaattacaagataaagcagttggattaattattagtgtgattctaagttctggaaagcaagctgcaaaattattagattctattgacaaaatacccaataatggctacattgaattaacttaatagagtttacgaaaggattgaaaaagatgtaccttgtaatagggtcaattctaataatctttatagtctcagtttttatctctactataggggctttgaatgaaaaaataaaaaataaattctacttatttgttaaattttcgtttaatatttctattgcttgtatttttttaggtggtatatcttttctttatgcttactttgtttttgatgcgtttaaaaattttaaaattatcttgatatccatatttttatttgtaatctcttacaaaggttatatggataaaaaatatttcccangaaga

SEQ ID NO: 348 - DNA, 632 bp; double-stranded, linear
aagatatggtaaaaattaaggctaaatcttcgcatctttttgcatatcagctgtagaaacaaattgtagatttgtttttttaccatcattaagctttatttctttttcytcaattatcaargaattactatcactttctaaattaacatttatattatctttgatttgtatttcattcttattatttttttcttttatgaatacttttatttcactactcttggaataaaactccaaagtttgttctatatattttatttcttttccattcatattactagaaatttcatttgccatattatgaatcttttcttttctcgtctccaaatatgttttaggaaagataaaaaaaactaatgaatgaactaatataattattattccaagaacagaaaatatttgtatgaacatttttggaaatatctttaattttttcattttctctccaatttatatcctacatttcttatagtagttatacagtctaattgtaatttttttctaagttcttttatatatacatctattactcgatcataaggagkttcytcgctatctttccatacataatcaataatttgcattcttgttaacacttgtccaataataaccaataaacatttaatactcca

SEQ ID NO: 349 - DNA, 1868 bp; double-stranded, linear
agtgccttatgccagagtttcatccmytggccaaaactkggaacggcaaattcaagagttaaaaaaattaggagcgaaaaaaatatttgtagagaaaaaatctggcgcaagtattgaacaacgactaatttttacagaagctatctattttgtgagagaatccgatatttttatggtagaagccattgaccgattaggcagaaattacgatgaaattattcagacggttaatttattgaaaaataaaaatgttcgactcataattacaagccttcctattatggctgaagtggttggtaatccattatttgatcgttttattaaagatttgatagtccagattttggcaatgattgcggaacaagaaagaacagaatctaagcgacgactagaacaaggaattaaaattgcaaaaatgaacggtgtttatcaaggacgtcctgaattatatagtccaacagcaaaagatctccaaaaaagagctgtctatagaaatattatagaagagttacaaaaaggcactgctatttcaaagattgcaaaaaaatatggaattaatcgacaaacagtttatagaataaaaaaagactatgagtcaaatcaagcagattcttaatgaatcataaaagaaataagagggcttatttggtgaaaamcagaaaggagtagttattctgcaaattattaaagatacaaaaaacacgtagaaaaagaaaataagccaatggttatttttgatatgatgtcagtaaaagtggaaaaattattattagagttgtcagaagaagtatttcgagtgtgtcctaaaacaaagaaagaatttagaaaaatggtttcaagatatagctttagaaatggagagaataagatggttgttctaaaaaaatatgattactgggaaatataaattactacgtggaataaggcaaatatggttgcttatgttgattgtgaccaattggctagaagagagttaggaaaatataatcatcttatgtatagtaattgtaaaaaatataaattaattaagagcgtttgcgtagaaataagcgcagaaaaaaataaaaaaaggtgaaaccttgataaaatagtaataggcaacaactaactcctcaatattaatataatagtgtcaattaaaatgcataaattaatccctaaattgttagttattaccttcataataaatagaattgtgaaatttattgtctaaggtgaatagttgtgagaagagagtacgattatcagaaaattgaaaaacaagtgtttaccaatggctgtgaactagaatccaaaatacgtactacgtgaacaatgtgtagtatgtattttggtgttttcttaataactaattttgaataatcattcaattcttttatcaataattgaacgtaagactttttctcttaaatccaatgaattaatcttgttattttgttcatattcatgtactaacaaatcacaaatataaagttgtgaaatttttccagctaaagaaccaccatttaaaaattcttcgattgctgtttgtaaaactaaatctgcagattttcctatcggtgaatgaatataattcgttatagcaagtatttttgctccattattttttgcaatttttaatgagtcataagtatcttttgtttttccagataaagaaaagataataactaaatctctatctgttaacaaagaagcaacttgagcttgataatgaggatctaatacagctttagcttgtattcctaccctcaaaaacatactttccaaatcaagactagtattccactagatcctacaccaaaaatatatangctgcttgctgattaataagttgggatggctttggtnaattgcctccattaattaaa

SEQ ID NO: 350 - DNA, 3274 bp; double-stranded, linear
ttctaatcttgaaaaaaacagacatttttcctgatgtctgaattattaaccaaaatactttgaaagtcaaactatttttcttattttttgagaaaaagtgctggaaaccgcatgaaataatagtttgataatcaaaataaactcggaggtacagtatgaaaagagtggtcataaccggcatgggtgccgtaacaccattaggcaataccgtaaaagaattttggcataatctagtggatggcaagctaggaattggcaaaattactaaatttgattctgaagatactggggtggctttggctggtgaagtgaaagagtttgacccaagtgctgttttagaacgcaaagagcaaaaaagaatggacttattttctcaatatggcttggtcgctgctttagaagcgtgggaaatgagtggtttaacagaagcaacgattgacccgactcgtttaggtgtgattgtcggtagtgggattggcgggatgactaccttacaagaccaagtacgggtaatggataaaaaaggcgcaaaacgcgtaacaccatttttcgtgcccatggtaattgctaatatggcagcgggaaatatttcgattcgtctaggtgcaaaaggaccttctcaaactatcgtgactgcttgtgcttctgcgacgaatgcgattggtgaagcttttcgcacgattaaatatggtttagcggacatgatggtaactggggggacagaagccacagtatgtgaaattgggattgcaggctttgcagcattgaatgctttaaatacaacagaagatgcgactcgggcttcgattccttttgataaagaacgaaaaggttttgtgatgggtgaaggcgcaggaatgctggttttagaagaactcgagcatgcacagaaacgtggcgcaactatctacggcgaaattgttggatatggcagcaactgtgatgctagccacatgaccgctcctttaaaagacggtagtggcgcggcagctgcgatggaaatggcgattgcagaagcagggattacaccggaacaaattgggtatatcaatgctcatggtacgtcaaccccagcgaatgacgctgcggaaacaacggccatcaaacgtgtctttggtgagcgagcatcgcaaattccaatttcaagtacaaagagtatgactggacatttattgggcgcggctggcggtatcgaagcgatcgcttgtgtgcaaacattgcaagaaggaaaagctcatccgacagtaggctaccaagttgctgatccagattgtgatttagattatgtcacagaaggtgcacgtgacattacagcggactatacaattagtaattcgtttggctttggtggccataatggtgtaatttgcttgaagaaatgggaggaaaactagtatgaaaaaagtaatgactgcaacagaaattatggaaatgattcctaatcgctatccgatttgttatattgattatgtggatgaaattattccaaatgaaaagattattgcaacaaaaaatgtgacaattaacgaagaatttttccaaggacatttccctggaaatccaacaatgccaggcgttttgattattgaagcattggcacaagtaggttcgattttaatcttaaaaatggatcaatttgaaggtgaaacagcctatattggcggtatcaacaaagccaaattccgtcaaaaagtggtccctggtgatgtcttgaaattacattttgaaatcgtcaaattacgtgactttgtcggcatcggcaaagcgactgcttacgtggaagataaaaaggtctgcgaatgtgaattgacgtttattgtgggacgataagaatcaatcaattttggatacgttagtttccctaagaaaaggaataagtcacaatggcttattcctttttaaatttatataaataacactaacgcaaaaaaacatgctataatcataaaaagcttatgtgaaggtggtaagcttatgagtaaaacaatttacaggagggtttttcttttggatatttcagtagagttttcgggacataaattggcgaatgtgttaatgaacgcatcaggcattcattgtatgacaattaaggaaatggacgagttagcggcttctcaagcaggtgcttttgtcgctaagacggcaacacctaatcctcgtcagggcaatgaggagcctcggtattttgatacaccattaggaagtattaactcaatgggcttgcctaatttagggattgattattatttagattatcagattgcacgtcaaaaggaatttcctgaggagttacgctttttatctgtatctggtatgaattatgaggaaaatatcgctattttaaaaaaagtgcaagaaagtgaatacacaggagtgacagaatttaatttgtcttgtcccaatttgcctggtaaaccgcaaattgcttatgattttgaattaacagaaaagcttttaacagaagttttccaattttttactaaaccattaggtgtaaaattacccccattttttgatattgcacattttgacgcaatggctgaaattttaaataaattccctttagtatacgtgaatagtattaatagcatcggtaatggtytatatattgacagtgacaaggamgaagtggtcattaaaccaaaaggaggcttcggtggactgggcggcgaatatgtcaaaccaacagcgttagccaatgttcgtgcgtttgcgcaacgtttgaaaccagaatcaaattattggaacgggcggtattacatgtggaaaagatgtttttgagcatcttttatgtggtgcgacattagtacaagtcggcacacaattgcatcaagaaggtccacaagtttttgagcgtctagccaaagaattacaagaaatcatggcagcaaaaggttatgaaagtattgaagaatttcgtgggaaattgaaagagatgtaacaaaaaaaccgtcaagaaattttcttgacggttttttgttatttcacagccttaacattttccataaaggcttccaaatattcaggttgtgttaattgttggttacaggtgtcgctatcatggcaaatgtaattgccttttttcgtgtaggttccgtcgccgcctgatttggtggtagctaggaacatagacacattcgtgattgtttgacagatggagcaaacacctttaacaatggtgggtgaaagggtgccgtggacgccgattaatttattttctcgataagctaagataaatattttctgagtcccagcgtcgttccaaccgacatag

SEQ ID NO: 351 - DNA, 4760 bp; double-stranded, linear
tnggaaacccagacttattaacttttangattttccacttngcattcgtagaacctttactcaaccaatctaatcgagtctttcaataagcaaattaaaagatacagccgtagaaaagagcagtttcaaaatgaagaatcactagaacgctttctagtcagcatttttgatacatacaatcaaaaatttctaaacagaagccataaaggttttcaacaggtaaccgatacattagtttcaatgtttactgagtaactaattattttgcaggaggacaatttatttacacaaaattattgacgctcccgttaacttttgaatccctaattgactagctgcataaaatagtaaatattttatcggattttgcgctaaataaataataatactagattttcttaaaaagtcacttccaggaatacgtatattttctaaattaaaacttaaaataaccactaacacagcaactattggtaacgtaaaataattttgtgcatcataaaaaacacctaattgttgcgcaaatttcacttcctttagtcctacataagaaaaaataacaatacctaaaactaagaataaattatttaaaggcttttcaaatacatagtttgctaaaaaatagcctataatcacataacaaatcgtagaratcatcgaaaagatatagaaccataaaaaggcacttgtttaatccattcaatgtcaaagtaccacttaccataagtagaagtaaatactcctatcagaaagctaacaattccaattgttaataatactttctcaccaaaataacttcggatgtaataaataataaatacactcattactaatgcgattaaataccaagaaacacctattctggggacatagcctaataatatgctcagtataaatgatatttttcctcttaaatccatttcccctttaacaaaattcataatagatacgataaagaagggaatgtaaaagatcaaccacgaaagatatacttttaagattctttttatataattgaatagtatttttttatctttttctttttctctaaaagaaatttttttaaacaaaaaatatccagatactatgaaaaaaaacggaacagaaaagcgggctaatattttcaaatcactacccaaaatagatttagagggaaaggtatgaattccaactacacttaatgcagcaataaatttgaaggcatccaatacatcattgtttttagtcatttttcccctctctattctcccatttttcttcagatttcatgatagataattcttgcaataatgttttaatgcgattttcgtgttttgaaatcaacacagaatttttaatttccatgattaacaggacaatcaccgcaactgataataagaagtttgatgttgtttcaaacccaaaggccattgctaaccattctgccacatgcgggnaaatagcaaaantaattaagacmattgagattaatamccaaatcaaagcattttttaggagaaaaatatttttattaatccctcgaataatgtataagaaaaagccaattgcaaataaaaataaagctagccataacacggttggtagcattagtctccctccttcataaaggcagcaatcagaattgctgagccgacttccagcatatacttcacagaagccaaggcacgaatcgaagaaacaccaccaagccgttccatcatattgacaggtctttcaacaatcacaaagcgttttttaattaagtgaacaatcgattctggctcgggataatttgtcggataacgctttgcaaaaaaagcaatcactttccgatttcccgctcgataaccagaagtcacatcataaattgttttaccagaagccattcgaatgcaaaaagataacaaacgaataccaaaacggcgcattttcgtactttgaaaagacgcttcgtttccaggaatgaaacgagagccaatcgaaaaatcacatttaccctctgctaatggttccagtaaaataggtaaactattgatatcatgttgaccatcaccatcaaactgaaccgcaacatcatactcattttctaaggcatatttatagccggtctgtaccgccccgccaatacctaaattcaacactaaatgaatggcattaatttggttggcttctaaaatttgtttggttccatctgtcgagccatcattaattaccacataatccaattcatgttgaaaatgcgtaacttcctgtttaaatgtttcaatggaagcaatcgtccgcaaaatgttttcttcctcattgtaagcaggaatgattaaaagtaccttcataaagagaaacacctttccactttttctctaacaaaacccctcacttacacaaaacaatttattgttgaacattttctaacatttgtgctaaggcttcttgccaagtaggaattttaaagcctaacgcttctgttttacttaaatccatgacagaatattgtggtctttgcgccttttgtggaaattgagttgaatccactggcaatacttccacttcagtatcttttaaaatttctttagcaaactgatnaccagctacagctgttttcattagacaaatgataaacaccaaatggcgctttttctgcaataacaaatgccataaattcggctaacgttcttgtccaagttgggcggccaaactgatcgtccactacctttagttggtctcttgtttccgctaatttttgcatggtaaagacaaagttatgaccgtattgaccaaatacccatgatgttcgaataatataatagtcgtccaggatttcttggaccgcttgttcacctaataacttcgtccgaccatactcatttaaaggattcggttgatcatcaatcgcatagacgccttcttttttagttccatcaaaaatataatctgtacttacgtaaacaagtgtcgcccccactgctttagcacttctgcaacatgacgtgtgccatctacattcactttttcatctaattccttgccttcgtcttctgctttatcaacagctgtataagcagcacaatgataaatgacgcttggttgaatttctttcacttttgccaacgtactatccgcatcagtaatatctaattctgtggaatccgttgaaacatactcaattccttgttcgtctaataggtgacgtaattctgtgcccaattggccatttccaccagtaattaaaatcatttttttcgctccttcttgaaaaaaaggcagggcaaagtagcttttgtactttgccatcgcctttcgactgttatctcacatgtcagaaaaaattactgaccattttgtgcatattttgcttcaacagcttctttatctgcacgccaccagtcttcattttctgtataccacttgattgtttctgccaagccttcacggaaattcgtgaattctggttcccaacctaattcttcgcgtaatctggttgagtcaatcgcataacgtaagtcatgtcctgcacgatcgttgacatgctcataggcatcaacaggttgtcccattaattctaaaattaattccatcactgttttattgtcttcttcaccatcggctccaattaaatatgtttcgccaatttgcccttttgttaaaattgcccaaacagccgaagaatggtcgtttgtatgaatccagtcacgaacatttttaccagcaccataaagttttggtgtaatgccacttaagacattggtaatttgacgaggaataaatttttcaatatgttgatatggcccatagttatttgaacaatttgaaattgttgcttgtaagttgaaagaacgaacccacgctttgactaacaagtcagatcctgcttttgttgaagaataaggacttgaaggattgtaaggcgtttcggcagtgaatttttccccttcgccttctccatgtcctggtaaatcttctcttaaaggtaaatcgccataaacttcatcagtcgatacatggtggtaacgaacattgtttttacggcaagcttcgatcaatgtgtacgtcccaatcagattggtttgtacaaatgggaatgggtcgtttaatgagttgtcgttatgcgattcagcagcatagtgaacaaccgcatctgtttcagcgactaaacgattaactaattcagcatcagcgatatctcctacgactaattccacgcgatcacttggtagaccttcaagatttttttcatttcctgcatacgttaatttatctaatacagttacatgaacttctggatgattctttacaacataatgaacaaaatttgagccgataaaaccagctccacctgttacgatgatttttttcataattgaaactctcctacttttttcttaaatttcgccatagataaacggattttccgcttcaaattcttttaaggttggatgtttttgatccttttctgacgtaatcgctttttctggcgcaattggccaatcaatagctaacgctggatcgttaaaagcaataccgccgtctgctgccgcattgtagtaattgtcacacttgtacataaagttcacgttcggtgtcaaagtgacaaaaccatgggcaaaaccttttggtactaaaagctgacggtgattatgttctgataaaatgtagccttcccattgaccataggttggactccctttacgaatatcaacaatcacatctaataccgcacctgttacaacgcgaattagttttgtttgcgcmttcgcctttttgaaaatgcaatccacgcaaga

SEQ ID NO: 352 - DNA, 1028 bp; double-stranded, linear
aaccgggaaagntctaaagattctttcaacttacaggaatttttttaggcttttcttggcagtttcnatgaaaatgccaagtaaacctagaagggatggtaactgattaattgaaaaggtagggaaagagcctggatgttgaataaagtcgacctgaaaaaagggttaagtacagaagaagttgccaagcagaaagagttaggccttcaaaataattatgaggaaaatgtagcaaaatctacaaaagatattatttttgataacgtcatgacgttattcaactttttaaactttgcaatcgctgtttgtttactatttgtcggagcgtattccaatctggctttcttagcgattattattgtgaacatgtcaatcgggattttccaagaaattcatgcccgtaatttagttcaaaaattatctattgtggcaaaagaaaatgttcatgttgttcgaaatggcgtacaacaagaaattgatacaaaagaactagttatggaagatattgttattatctctgcaggggaacaagttccttctgatatggaagttattgacggtaaagtcgaagcgaatgaagcgttgttaacaggtgaatcagatttaattgaaaaggaaatcggcgataccttgctttctggaagtttcattgttagcggacaagcctatgcccgtgttatccacgttggtgccgaaaactatgctgtgaaaatcacccaagaagctaaagtgcataaaccaattcaatcagagttagtcaattcgattcgtaaagtctctaaatttacaagttgggtgattattcctctagggattatttatttgttgaagctttttggctaagagatgctggcattaaaacatctgttgttgcttcttcagctgctttgttagggatgttaccaaaaggattagtactattaattagtattgcgctgacaacaggtgtcattaagttagccaaaaaacgtattctagtacaagatatgtactcaattgaaacattggcccatgtggacactttgntt

SEQ ID NO: 353 - DNA, 2749 bp; double-stranded, linear
gcggtggcttaggactcgctatgctactagagagacctcagcaaaaaaaaaacagccgattttatcaaatgagtcctgaggaacgcctggcttctcttcttaatgaaggccagatttctgctgatacaaaaaaagaatttgaaaatacggctttatcttcgcagattgccaatcatatgattgaaaatcaaatcagtgaaacagaagtgccgatgggcgttggcttacatttaacagtggacgaaactgattatttggtaccaatggcgacagaagagccctcagttattgcggctttgagtaatggtgcaaaaatagcacaaggatttaaaacagtgaatcaacaacgcttaatgcgtggacaaatcgttttttacgatgttgcagatcccgagtcattgattgataaactacaagtaagagaagcggaagtttttcaacaagcagagttaagttatccatctatcgttaaacggggcggcggcttaagagatttgcaatatcgtacttttgatgaatcatttgtatctgtcgactttttagtagatgttaaggatgcaatgggggcaaatatcgttaacgctatgttggaaggtgtggccgagttgttccgtgaatggtttgcggagcaaaagattttattcagtattttaagtaattatgccacggagtcggttgttacgatgaaaacggctattccagtttcacgtttaagtaaggggagcaatggccgggaaattgctgaaaaaattgttttagcttcacgctatgcttcattagatccttatcgggcagtcacgcataacaaaggaatcatgaatggcattgaagctgtagttttagctacaggaaatgatacacgcgctgttagcgcttcttgtcatgcttttgcggtgaaggaaggtcgctaccaaggcttgactagttggacgctggatggcgaacaactaattggtgaaatttcagttccgcttgctttagccacggttggcggtgccacaaaagtcttacctaaatctcaagcagctgctgatttgttagcagtgacggatgcaaaagaactaagtcgagtagtagcggctgttggtttggcacaaaatttagcggcgttacgggccttagtctctgaaggaattcaaaaaggacacatggctctacaagcacgttctttagcgatgacggtcggagctactggtaaagaagttgaggcagtcgctcaacaattaaaacgtcaaaaaacgatgaaccaagaccgagccatggctattttaaatgatttaagaaacawtaaaaaacagttcagcagaaattattctgctgaactattttttttcacattaggtagccgtttcaggccacgaattggttttacttttaagacatctaagaagaaagtgaaaacagggattcctacaataagtccccatacaccaaaaagacgctcactaactaataaaatgacaaacgtataaaagattggtaactctgttttactagacatgaatttaggatttagcacgtaagattcaaataaatggacgattgtaattaaagctaagatataaatcacatcgttcaagccaccttgggaataagcgatgaaacttagcggaatgcaggaaataatcacaccagcaactgggactaagctcaaaatgaagatcataatggctaaactaggtagctgagtaaagccgattatcgccaaggccaaggtagtaatgactgtattcaccacagcaatgaaaaactgagcttccattacgacaccaaatgtgttgacgaacttgttggcaaaataatagatatcctgmnaaaaccmatcmaaatcactttttaaaawtaacttrgaaaaatcagccatttgcttcttctcaatcataaagaagaaacttaaaataaaggacatgacaaatgataagccgacagcgccaatatcttgaatgtagcgtaaaatcattgaagcaccattctggagttgagagagtaagttagatttttccaagtattgatcaataaattgcaatacttgatttgtatctgtatgtggactttgataaaaatcaactacagaattaatcatttgagtcgtttggttaactagaacgggaacatatttagtaatcgctaaatagattagaaaaacaaccaatgcataggttaagagaacgatgacaatcgtcgggattttcatatagcgttgaacaaaatggaccaaacgaacagctaaataggtaaagataaatgttaaaagaattgttgtaatcatacttctggataaataaagcacaaaaatawtcaaagcaaggacgcaaaaacgtcgcaaacgttcattttggataaattttggttacaaactcataggggaaactccttctttactggatantcaatcctgttaagaataacataaccataccgatggcagctaggccgcaaacaataatatggcggcgtttgtacatcactacaatggcgatgaactctcgaataaacgcgttaggtaaaaaataaaaagcggtttttgcaccaatgccatcagcttttaagccagccattcgagcgaaaagacccgcccggaaaaggtgataattgtttgtagtaaaaatggcttgaaattagcatttccaaaatcctcaatcattgtttctttggaaaaacgcatattttctagtgtgttttttgaatgagcttctactaaaatatcatcatcaggaataccttgtgtcaaagcatacattttcatcgc

SEQ ID NO: 354 - DNA, 793 bp; double-stranded, linear
ggacgcgattgatttttacgaaggaatgtataaaaacncggcaacgaattycactcaaattgactggcataactatcagcgggcaaattggcgcgaggtagaaacaaaaggcgacacgttgacattgcattttgccaacgcgggcggtgctgggggctcatacacacaattcacgaaagttggtacgaatactgttgttgtatcatttgatggcaatgctgcttatcccgataacccaagtagcgttttactcgtgcaaaatagtgattataaagttttaaggactttgaatcagtaataggggaaatatatcgtttacttaaacataggcaaaggcgggttgcttacctttttataagtaacctacctttgcctatgtgctattttttgggatagaggtgctcagagtaggggatgtttttatgggaaatttttatgctagatctctgtttgactaggctcaaatagatctgaatcaatcgttgaagtgatatctgtttatataaagataggctaaatcgtcaattttttacaaatcgtcgttcatgttaaaataaatggagaaatgttttagtawtcatagtaagtattttatcgtagaataaaagatatactaacaannggagcgatgaaaatgctaaaagaagaaagattaaaggcgatagtctctctagtagatcaaaaaggggcaatcaaagttactgaaattatggaacgattaaatgtttcggatattgactgttcgtagagattntgacagaatttggaagccagcggggcgttttnaaacgag

SEQ ID NO: 355 - DNA, 20860 bp; double-stranded, linear
cagttggcagtgtttcgctacatgacaaagatattccgttacagacaaaaatttattatgaagtgaaatcttccgaacgtccagctaactatggcggaattaccaaagaatggggcatgaatgatgtcttggacacgacccatgatcgtttcacagggaaatggcacgctattacgaattatgaccttaaagtaggggataaaacgttaaaagcaggaacagatatttctgcctacattcttttagaaaacaaagacaataaagacttaacgtttacgatgaatcaagcactattggccgccttaaatgaaggaagcaataaagtaggcaaacaagcttggtctgtgtatctggaagtcgaacggattaaaacaggtgacgtagaaaacacgcaaacagaaaactacaacaaagagctgatgcgttctaatacsgtggtgacrcatacgcctgatgatccaaaaccaaccaaagccgttcataacaaraaaggggaagayattaatcatggaaaagtggctcgtggtgatgttctttcttatgaaatgacttgggacttaaaagggtacgataaggactttgcctttgatacagtcgatcttgcgacaggcgtttctttcttcgatgattacgatgaaacgaaggtgacaccaatcaaagacttacttcgtgtcaaagattctaaaggggaagacattacgaaccagttcacgatctcttgggatgatgccaaaggcacggtgacgatttctgccaaagacccacaagcctttattttggcgcatggtgggcaagaattacgtgtaactttaccaacaaaagttaaagccaatgtttctggtgatgtgtataatttagcggaacaaaatacatttggtcaacgaattaaaaccaataccgttgtcaaccatattccaaaagtgaaccctaaaaaagacgtggttattaaagtcggtgataaacaaagtcaaaatggtgccacaatcaaattaggggagaaattcttctatgaatttacaagtagtgacattcctgcagaatacgctggtattgtggaagaatggtcgattagcgataaactagacgtcaaacatgacaatttagtggccanggtctgtgtttgccaattctamktttgtyttagcagacggaaccaaagtgaataaaggggacgacatttcgaaactattcacgatgacctttgaacaaggggtagtgaaaatcacggccagtcaagcctttttggatgcgatgaatctaaaagaaaacaaaaacgttgcgcactcatggaaagcgttcattggtgtagaacgaattgcggcaggagacgtttacaacacgattgaagaatctttcaataatgaaacgatcaagactaatacggtagtgacgcatacgccagaaaaaccacaaacaccaccagaaaaaacagtgatcgtgccaccaacaccaaaaacaccacaagcaccagtagagccattagtggtagaaaaggcaagtgtagagccagaattgccacaaacaggcgaaaamcaaatgtcttattaacggtagctggagtttagctgcnatgcttggcttagcagcttaggctttaaacgtagaaaagaaacaaaataattgaagacgamargaaggacgaactgattgtccttctttttttagttatggaggggaaacattggaagcagtagtagtngaagagaggcaaaggggatgaaagaaattgccatccaagaaaaagatttgaccttacagtggagaggaaacacaggtaagttagttaaagttcgattraaraatacacgtgcaatggaaatgtggtacaacaaacaaattaccgaagaaaacattcaagagatcaccacgttgaatatyattaaaaatggaaaatctttggcattagaagtatatccagaaaaaagtatctatgtgaaaccaaatttaggcagaatcaatgtgcctgtcttttttatcaaaacacctattaacagaggagtatttgaagagattttcggcgaaacgttaaaagcataagtaaaggagaaagaaaagccaatgtatgtatcttttgttctaagttgtttgcttggattttctgcctacagtctattaaataggctaaattcgttggaatttgtggatgtttggttagacaaagaaacacaaaaaatcacactaaaacgctgtttttatgatacgtctttcaagaaacaaacactaaaagagttagaacgagtatatttccaattaaaagaaataatcaacgtgcaaataaacaagcggtctttaaatacgaatgacatacgtaatgtacgagaactagaggaaaaacaacaagaaataaaacgattcatgttagacgttttagaagatgcttattggaaagaattagcaaatatgccagaagaccaacgacacttagacgattgggatttcttttgaaattggttactgaaaggaagcgatggattacaatttgtttgatttttaaccagccatgctaagtttttccgtttcggttcctttggtttttttgttagcgataataaaaaaatgatgcctgacacaaaaatataggagggaaaaaatgattattttatcaggactttttattttagggataggaatagttggaggttatcagctagccacgttacctaaattaattgaaatgaaacagcacaaagcaatacagaaccatttcaatgttaaaggaaatgagtacacctattatcaagaagacagtgaaaattacattttatccttggaagatacagaatatcgaattaaattttccaagaacaccccgttaaaagtggtattcactgaaattttagaacctatgtaagggtgagtttatgtatatctcttttgatttagaagcaacacaagcagaaaaaatagctytaccwgtccatcaacgattttcgctygttcaaggtcttttgytacttgaacaagccaatcaagaagttttggccacaaaacaaggaggcacgatagcctattttttatatacaggaaaagaacaagaactacctattttagaagcggaacttttattaccggtcaaacaaaaggatatgttagacgtattrcttgaaccagtcacaaatgatccaacgcttgatccaatagaagtaaaaaacttcttacagttagttaatcaatcgttgccaaagaagcaacgagctaaaagtaacaaaaaargtacagaaaagaaggmaactaytgatacaaaaccagtgaagaaaaagtttttttgtccgttagtcttatcacacttrttggattgattctacttatgagtggttttttattagggaaaaccaattctacaccttaycaagaaaaagaattagaggtraaaaaagaactcaataccttaacagaacaagtcaatgakcaaaataaagtagaaacatttactcgattctttctaactaattactattcaggaaaaacagatgccaaaaccagacaagcagttttaaaaaagtttgtaaaaaaagaaaycttatctgattttttatcggagaaaagccgagcgagaagtatgtttccctgggaagtaaagaagaaagacaaacaatggacgatagygttcattgttgtattaatcaatgaaaaagmcgagcaatcgacaaagaaaattacgtttacagctgaagaaacaaaagaacaaytggtcgtaatggaacgaccgacagaagaagattttgaacttacaaattaaaattaaaatggaggaaataatgatgaaaaaaattctttttgctagtttatttagtgccacactactatttgggggaagtgaaatttctgcttttgcacaagaaattatccctgatgatactacgacaccgcccattgaagtaccaacagaaccaagtacaccagaaaagccaacagatccaacaccgccaattgagccacctgtagaccctgtagagccacctattacaccaacggagccaacagaaccgacagagccgacaacaccaacagaacctacaactcctacagagccaagtgaaccagaacaaccaacggagccaagtaaaccagtagaacctgaaaaaccagttacaccaagcaaaccagcagaacccgaaaaaactgtgacaccaactaaaccaacagaatctgaaaaaccagtacaaccagcagaaccaagcaagccaatcgacgttgttgtaacgccaacaggggaattaaatcacgctggaaatggtacacaacagccaacagtccctattgaaacaagtaatttggcagaaatcacgcacgtgcctagtgtaacaacacctattacaactacagacggagaaaacattgtagctgtagaaaaaggtgttccacttacacaaacagcagaagggttaaaacctattcaatcragttacaaagtattgcctagcggaaatgtagaagtaaaaggtaaggacggtaaaatgaaggttttaccatacacaggtgaagaaatgaatatctttttatctgccgtagcggtatcttgtctgtagtatctgggtttgtcatctttaaaaaacgcaaagctaaagtataagctagcgtatagataggagcgtaccatgaataaraaaagaattrtctttgggcttctctcttttttcttgcctatatttttagtctttggaggcttacttttttttcttttattattaacgagtacgtcagatacttcaaaaaatgattgtattcagccaagtataaataatccaactgatgcgacagatacacctaaatcgatcgagcagtttgtaaaaagccataaagatgcttaccttttatcatggaaagcaggtggctttttaccgtctgctagtatttctcaaacgatggtagaaaatgggtttaattttactaatccatcggggacgtcattttggcaggcrcacaatatgggcggtgttaaaacgtcaaaaaaagaagattttcctgtaactttagcaacattcggccaagattctgttgatatttctggtacaaagccagggtcaaacgtcggtgatggcactggtggggcatatacctggtttaaagactacaatgctggaattgttggaaaagcagaatttatggcacaccagacactgtatacaggtgctatcaataatactgacggattaagtactttatcagctatttattcaggaggatgggctacagaccctacttacctcatgaagttacaggccacatataatagcttaggcaagcagtttcaatggttggaccaagaagcaatacagaaatatggtaacgcgccgtttaaaaagagcgaacttgtcctaaatattcccggaaaatccccaatcacaaacgaaaaatatggtaaaaattctgattgcgttgttacttcagatacatccgatcaagttacaggacaaaatactgccccatcattagaagtaccaagtgcgtataaaggaaagttaacacttccgcctatcgattcgaatgattacgctggaaataactatccttttggacaatgtacgtggtacgcctataatcgtatggcgcaaattggcaaaccaattgaatggttttcaggtgatggcggaaatggcgcaggttgggctaattctgctcgtgcgaaagggtacacagtagtaaaagtaaaaccaagtgttggttgggcagctagtatgcaaggtggcataggaggttctgcaccgccctatgggcatgtggcagttgtagagtatgtcaattctgacggcagtattcttgtgagtgaagcaaatgttattaatcaaggctctggtacgcgttcatggcgagtattagacagagcaacggttgaacaaattgattttattcaaggaaagggagcgtagcaatgagggagcgtttaaagcaagcacaaccactagtgatcgttcttttacttgttttactgaccactttaggaggcggttatttcaatgagaaaaaagaaaatgcacaaataaaaaatcaaaaagagaaagagcagcaagtcctaaagaaaactttagaagaaaaaaacggacaactgaatgatttatcgagaaaaattgaacaattattggatgaaaaagaagatcctgttaatgagccattaacaaaagcagtgaatgccttattttcacttktgtttgactatgattctagcaataaagaacaaacagtcgctaaaagaaaagaaaaagcaactgtttatgcgacagagcaagggctatccggggtattcccaagggatkcagataaagttgttcctagtgttgtgaccgtttctcaattagataaggcacctgaaatttatcgaaccacacaaaargatacaggaaaagaaaaaacagcattggtccggctagaatattcagttcgaatcgcaggaagccaarcgcaacgtggaaattttatttacaaggtaactttcaatgaagaaagcaagaaatttacaaccattgagaatttaggtgaggaaaatcagtaaaaaagtacgaattacaacrcttattagtttaatgcttgttttaggggggataagcctctttttatttatggtaaaacaaaatgaaaaggcaatgctcaatcaggaaaaggagcgagcggccgtagttttagcagacaatgaaacacgtgtcttatttttttacaaagatacgtgtgctgattgtcaaaaggtctatccgayggtttacgaagaggaccagggcgaaaacaacattgtatttatcaatttaaatcaacckaaaaaccgtcactatataaagacctatacgttggaaaaagtaccaacgtttgttacaccgaaaagaagatacgtaggaacagatacgaaaaaaattcagcaattaattgctgaaaataacgacgaaagaagtgaagattaatgcacgaaaatcatgtgaatgaaaaggagacagccgtagaaaatacggaacgtattgctaaaaattatgcgtatgaacgcccagcgattcaaacggcgctatttatcttatggcgggtgcataataagcagtatcaaacmggcgctcggatattttacgacgaattagaaaaggccaccaagacgtctaagaccgcttataaagaagcattagcttttttagaaggtgcaggcatggtggtaaacgaggttgtcgtagaaagtaaagtcccccaatcgttaattcaacgttacgggattttaaaagatgagtaacaaaaaggctgtattcaatccrcaagcagggaagcaagccyagaaagaaaaagtgaggaaagagacacgtgtttcttcattggttcaaataatccgagcaatcttcaggaagaaagagaaagaaccagaaaattctcgaaccattcgtttttcgccacgttcggcgaaaagtatttactcaatggtgtttttccttttatttttcttgataagcttatttttattaatgagttttggacgattaaacacgcttacaaggcttgcgatgcaaaagcaagtaaatcgtgaggaaattattgaaagcgtgaataaaggcgtagctgcaagtgatcaattgaaatatgacggaatgaaacttgtggatcgattatttacagtgtcctcaaaattagaaggaaaagagtactgggaagcgcaaataaccccttatttagctgctggattgcgtgcagaagatttaggtcttgataagacaaatgatgaccgcgttgcacgaaatgtacgctttattcgattagaaacagttgattataaagaatcactttacagcttgtactatgatgtccgttttactgaagggaaagaatggcgccaagtgcaagtgattttgcctgttagttatgcagaaaatgaactgaagttrcttgatagaccaacgttaatgaatttagcgaagacaagtgagagtaacaaagttgyktatgacgagcaacgttttatacctaaaggaaaagaagtaaatgaagaagaaacaaaaaaactaacggaatttaccaatcgtttctttgaattatatgtaaaaaatgatgaaaagttaggactaattgccaatgtaaaaggactagaacatgcgacgctagaaaaagtagatattacaagtctaagagaaacaggacaaggggtctatgatgttcgaggaacctaccaattcagttatgaagggaaaagtccgctaacgtctaacttctcattacaaattgaagcaacaaaagatagttattttattaaaaaaatgaatggagtgtaagaatatgtttgatttatctggtttagcaaataatatttcctcacaggtgattataytattggtgattttaggactggtatccttagttgtagcggttgcaacacaaggggccgcacgaggaattgcgacagtctgcttaatcttaattttaatcgcgttggttttagtgttaaaagatgctgaaaaaattggtacctggttgaaagacttaattttcaaaccaaatgccggctttattttcccaataaaaggttggcgattttgatggaatataattacacacgagaatttaaacaacctcacaagatttacagtatcaaaggggtagcattgccttttgcgccaaacggcattcgattggaacaaatttttgtaggtattggtatccttattctcttattgatattcgcgattatttcatttgtcgctaaaatcaatttttttaccacaattattgctaatttttggttgattcttatagtaggagtgggcgtccttgtgtggacgctcttttctttaaaatgggataataagagctttcttgattatctaattggtcgaggaaacttcttgtatcaaaagaaaaaaagatatgaacatgggctacttgtccaattccataaagaaaaagtccaatacaaagttagaaaataacagtaaagtgtttacaaagagattgtgagggatgaaggtggataaaagaattgaagctgtgacaaaatttttagagtctttaggaactgtagaagattacaccgaggatgtagctgttaagtatagaaacttgattctgaaatcgtatgaattatacgagaataagtataacgatactgttgacgacagtttatgtatagaagtttggtcaaacgggacttatgtkgttacaaacgaggatttatcttttgattgtgagagcgaagaagatttacaaaagctaaaagaattgtttgttaacacgtcattttatataaccattaatgaattaaataaagtaggtcataaggctactttatccgtcaaagctaaagcaaaaaatttaaggaaactggggcagttaattaaagaatacagaagttgtaattgcaaatatttaaaggataaagtaaccgaaataattggtgatgatgggcgtgtttatttagataggataagtgaacggatggactaagaaaaacatgctataatggttagaaaccataaagaagccttatttacaaaagtagtarcaaaaaatacaactacatgagtaggaggtaaatatcttgattaataacgttacattagttggacgattaaccaaagacccagatttaaggtatacgcaaagtggaacagccgtaggtcaatttacgttggccattaatcgcaactttaccaatgctaacaatgaaagggaagcagattttatcaactgtgttatttggcggaaagctgcagagtcattagcaaattatgcaacaaaagggactctgatcggtttaactggtcgcattcaaacaagaaactatgagaatcaacaaggccagcgtatttatgtaactgaggttgtcacagaaagcttccaactattagaatcaagagaagtaaacgagcaacgaaaagaacaggctacaggtaaagctacgtttgataaacagtcaatggataaacctgatcctctggatccattttcgccagaaaatagcatagtggatatttctgataatgacctgccgttttaatgatttataagtgaataaacaacaaargacgagtgaacagatcactcgtcttttttttgtacaagtgtaaaaaaatagtgattgcaaagaaaggagttgataaggtgccattaaaaagtaaagagccgcgcttagactttccaattgaagccattacgaataattttctttttacaacctctaacgacgtgtgggtaggttataaacttgcacaccaagtatttcctttgaataatttagactttttcaaggaatacatagaggacggaaaaggcgtattcgagcaagacacgttcgactaccattttatgaatattccagaatactttgatctcgacgaacagattgaagcgacaatcgataacctggtaaagggaagctttgcggatttaggagaaacctatttccgacaagcgggtgatattctaaaagacgaagtccaaatgaataaatatagtacgtatttgttcattcgttttaccgcacctatacaagttgctaatcctatggagtatatagaattgttcaaggaagttggacgtaaggcaatcaatgctttaacaggggttcatgtaccagttagccaactttatcgcgcatatcaaggattagaaaacaagatttacaaagacttatcaaattttaaaaatgtggaacgcatggatccaagaaccataggtcgattgttttattatttctttcaccgtgcaaatacccgtttacctgaacgaacgttacttccggaagaaatgacggaggggattattgaaaataacacgggatatatgactattgaacaattggataaaacacattaccttgcttttttaccgttgatcagtttgccaacgagtatgtttggaagtgcgattatacaaaacttgcaggatagtttgagtaccacgattgaaacccatgtcaaggttacatttcgccacccagataaagataaacgcgatgtacacaaacgtcgtaaaagaatctatgaacaggacaaagagcaaacacaagttgacggtattttagacgaagacgaagtgattttatttggggaagagcgattgcacgaactaagtaaaaagatacgtagtaaagaacgacgattgtgtcgtatgacgacaacgtttgtactttcagccgatagtaaacaagcattagaagagaaaataaaagaactcgaatttgttttggacggtacagactacaagttgtatcgtccgctagtcgaccaattaacattgtttaatcagtgtttaattggcgctaagagtcaatttaaaagctatgagcatgttgtttcaacaggttatgtagcggaccttggaatggatttagaaaaagaaattggtaaccgctatggcatgcctctaggtcgtgtcataactgctaaaaaattcaagtccgtacaacaggcactttctttatcaagcaaaatcgtatggtttttcccaaacttgactaaaaaagccatagaaggcgcacaatatacaaatgggaatacgctaatcattggcccrcctgggcaaggaaagtcagtacttgttaagtacattttcttgtggttaacgtttttaggacaaaaaatactttatattgatcctaaaaatgaaaccgtcctttttttcaaacgagcattagataagttcggacatattccagaatttaaagctttgtatcaacgcattaactttgtttcgctatcaagtgaagaaagrtatcgaggaatgttagatccattgctatttctgccaagagaagaagctattcaaaccgcacgaaacgtgttagaaaattttggtgaagttacgacagacagtcacactgcaagtgayaagaagacgctrattttagattctgtcaatgcggtgatgaaaggtaaaggraaaaaacacctaacgaaagtaatcgaggttattcgcgaaaaagaccctaaattagcmaatttaatctctggccacaatgttgggttaggyaaaattcttttagggaacgattacagcgaacctattcgctttgaaaatcaaatcaatgtcttaggtacccaggggcttaaaatccctacacaagcggaaatagacagcggacgattaaacaatgaacaaatcgcaggcatgtcwattatggaagttattatgaaaatgacaacgatcttctctacagataaaactgaagatgctgcgattattttcgatgaagcgaaaggatttgaagacacggcccaaggacgttttctaattgaaggaagtttacgycaaggacgtgcgaacatgaccgatatataccttgtcacacaagcgtttatggattatgataaagaagataaaaaagaactattgtcttataaatttgcgttccggccaaaccaaaaagaagcacagaaaaaagttttagaattttttggtatggatacgaacccagcaaatattcagttaattaatgaactaaaatcagggacttgtttattccaagaccatcgagggcgtagccagcctattgcaattgatgttttattcgatagttggttaatggccgtttcgtctactaataaagaggatgaagctactcaaatggcgttggcaatggaacaaggatcataaaaaaggagaagtgagcatgaaaaaagtactaccttttattgccttagtcggcttgttattgttgtcaggttgtggaacagatatgaaaaagatattgactgccgatggtggtaaatggaaagtggaagaaacacgtgcaacttacactttttttgatgacggtaaattttcagctaatgactcagaggatagtgttagtgggacatacacttatgatgaaaaaaataaaaaaataacctttgacmttactagcagraactctttcattatggaaaaagtrgawtmcaargwtamcaagattacaggggaaattggcgaaaaacaaagaacacttataaaacaaaaaacagaataaagaggtgatactttggataaaaagtcactgataaaagcagccttactacttttagtcggctgtttttttgtgtttacacaaactacatcggtcaatgccgcacctaaacctgatgaaaataaggttattgttacggagccaactactaatgtagatacaatatatgatacttacaaagacaatgcttttgagttaatgactaaagaaaaagaaaaggattctgcttttggggttaaagaagcaattactaacgcttctgcagcagtcaaaacatttgtatgggctggggtaaaaggactcggagagtttaatgcagttatggtaaaaacactatttagtatggatattataactgctattaagcaaccgattatgaacctaacgtctagcatagcaactaatatgttaggaattgcgggaacgattggtattgcctttgtctttgttattttaggtgtaaaatttattggacaacaacgatacaaacggttttttggtatttttttaatgacgattcttatttttacgggtctttccgtcctaaaagatgccaacacgtccaattctttgtttgatatgatgtttagtgtagataaagaagttgagaccgcatttgtaaatattaatccggtcttaggtgatgttagtgtaccaatgacagagaaagggaaagataagaacggaaatgaagtagagcaaaaattatctgcagatcaacgagcaaaaagtgcaggaaatttaattgcttcacgtgttttttacaccaatgtgtatgaaccttacttgctcatgaactatggaacaagtgatgttaataaaatccgtaagaaaacagtraagtataaagayaaagaatatgatcgaatcaacttattgttagacaacgatatgaatagcgaagaaaataataagttaatggaagaagttgtaaattacgaaagtaaagacttaaaaaaccgttcaattatgtattataacaactggaccaatactttttatggcttgttttatctggtagttaacttcattcaaacagtggtgtatttcctgttaagtttcttacgattaattattgckgtcattcaattgttcctattgccgttgttaccgttattgttgttcgcaggactctttttaactgaaacsaacgtctttgcgaattactttaaaacctttggcatgactatttttatgaagggaatggttggttttgcgactattttctttgcaagtttcttatcactagggtttcaattaagcaatcagacagaaaacgtgtggcagaagatattaacgatacttatttatcttcttacaccgcttggcttgtatgtcttccggaaattctttgctaatcttgtcacgggacgtgtttcactttctgatggtgtcgggtttatcggaaatccttttggcacagaagctaatatgcgtagagcggcaaaagaacaaaarcaagagaataaggagcscaggaaacaggcacaagaagaacgtaaagcagctattaaaaaacgtcaagaagaagcaaggaaacatggtaaagcagaaactggcttaaaacaacggccattaaataaagaacaagaaaaacgtagtgcrctacgccgtgarttgaagccaagrcctcaacataaagcgccaaatgctatcgaaaaagcacaagaaggattaagacaagcgcacgaaaaaggacgtatgcaagaacagaaatctgaagaacaactcaaacggcagcaacatgaatcagctcgycaaaaagaatatgaaaaagatcgattgaaaaaacaggaatcacttaaaaaaattaatgatcaaagcgacgaatcaaccaatttaacagctttaagaaatcaaaatcggcgtactggacagcgaagtaaaaaacgcgaaacaggtcatcaaacacttatgaaacgacaaggagaaaaagtacttcaaccaacaaataaaccaaaagatatgaaaaarcaagtggttgctcgtagtccaagacgaacaggacaaccaacgactcgtcaaaatatccaaccaaaagtagcggcccaaatggtcaaacggagtggtggaacgttgggaagtaatcctgcctatcgacgtccagaagtacgwaaaaaaatggatcaagtgaagcaagtaacgcaagttgatgtacctcaaacgcattctacaccacaacgtgtacaayccaaggtaaatgagccaatcacacgtatgaatagacataatacgccaatcattaagaaagaaaagaaaactaaacaaycaccagttgttcgcagagaacgcaagaaacctggtacacagaagataacaaacaaacctaaaggagtgagacaacctcgtgcaaggaaataatttgtttaacaatggsttgctacaaccaaagaaaccgccaatagggcaagaacaacaaaaaatgactcgctaccaccaactccgactagtctttggattagtcggagttcttttatatccttttgcgattttaggcagtattccattattaattggtctagcggttgataaaaaagacaaggctgcaaatgtatttgatatggattatgagagttttttgaaacgaaatagtattgtytttcttagtttttcagctgtgttatttgtaataaatgtctttgcatttatcctctggattcccagagggtatctgtctgcgtatcttcttttccccttaaatcttcttcatacagcactgcgttttaattgggagacaatagtcgctttacttattgggtcaagtggaatgggagccatttttttggcattttcttcatttgtggcaaaacgaaaagtgatttcaaaggaagacgaacggaagaaaataaccgaatcaaaagcctacaaagaccgagaaaaaaataaatttgaagagtcgcaacgcttcacagatgaacaagaagaagcgtatgaagaagcagtagaaacggttgatattgacaagtataaagaattatccaatcaattattgcttggtacaagtgagttcgggttgccgtatatcatcaacttttcagagttcaatcagcatgttcttgttcccgcaacgacaggttcaggaaagacaacattactacaattaatcgttcaacacgccgtaaaattcaacctccctgtcattctcattgatgggaaaggcgcacgcgatacgctagaaagtatgcgagagattgcacggtattatgataaagaagtacatgccttcacagacgatggcgacatgcgatataacccagtagaacacggaaatgacgtgtcgattcgagataagttggtgtctttagcagaaacggaaagtgttttctattccagtgccgcgaaactattgttagaaaataccgtccaactgattgatttattttctacacgtgacgacgtgaatcgaaagttagaagacattcaaaaatacttattacctcggaatgttttgcgtttgtttgcggataaaatcgaaggaaaaaatccaacgctctatgagatagaagtagaagtcaagcaagcaaaaccaaaaaagaaatcaaagaaaaatgaaacgaaagtcccgattattgatgaagaaatggacgaagtaagtgaagcaaccacaccaacaaacgacgaggtaacgagtgaagatttagaactagaagaaggtgacattcctcctgtagagacagaaatcattgtcttaaacccaaacactttacagctagacgatttttattatttgttaaaacgaaatcttttttatttgtcaaaaaaagaaaaaataatgtttgaacgtttgtttacacgttacgaacacaaagactcacccttttatttatatgccacttctgaatcattacaaaccaatatcaacatgttattagacagtgagttaggccatttatttgatacaacaaatgcaaaaagtgttcttgatgtccaacaaattgtccgtgaccgttcacttgtttatgtgtcattcaatggattaatttacaaagaatatatccgtacattggcgcaaatgttagtcggtgatgtgaattattttgcgtccgaaatgtatcgaaaaaatgtcaaacgtgaagtcattgtgatctttgacgaacctgcttcttatttaaatgaacagtttattgatatggtaaacaaaggacgaggagcgggtgttcatggaattttcacaccgcaaacgatggcagatattgcgaagttaggtgacaaattaatggagcaattagtcggaaatgtaaacaccgtattcattggaaagactaacgaaaagggcgancggagtattggagtgaaacaatgggaacgtatcaagatatagatgtaacgtccgtcactgaacaagaagatggctattcagacgtcggaaaatcagattggtcaggtgatcgaggcacaaaacgcaacgtcgatcgcttcaaagtgaacccaaatgtaataaaaagtttgcgtacaggagagtttattatttacagaaccgcagaaaatgtgaatgtcccgccacagaaagtttatgtgcgaaatgcactagaatggttgagaactcacaatggaatttgaaaaatatgaacacttaaattattgaaaaaaacggcctaaaggtatgcctaatagtatgcctaaaggtatgcttaaaagtatacctaaaggtgtgcctaattaagaaaggtggaacccgtcctcggcgcttggtatcaaaggctttctccgcctgcaaaattcctgaccattttagcgcaacgtggggtgaatacccctcttatasgctaaaatggtcaggaattttgcaactacgaaaaaaataccaagcgccgaggacaaacagaatagagaaaaaaataatgagtaaagtaataaaaaataaagaaaaaagtttaaaagatgaagttcaaaagatcaacccctaccccagtcttggggtctcataactatctctttccgttctctttcaacctcttttgaaagagaaaacttacaactcccccttacgcctgcgccccctcaccaaatcttgatggggctgtcgccaagaccagaaacccaaaagagtggttctgtttgataactagtggactattgatgattgatttaaagtaacaaccccctaaatcccccaacaaaacttgggggacttaagatccaaaaaagaacttctccacagcattacgaaattcttttttattgatayaaataggcgttgcctatttgttccttaaaaaattccagtaaataactacagaactcaaataggaggcttccatgcataaactaaaagaaattgaaatactagaagaagaaatacaatcacgaatactcgaccatcgttatgcggacagttgggaacaagcgactcaaatttcagcagatattaaaaaaaaagaagcggaactcgctaggctaaaaaagaaggttagcaaatgaatccattactttataactactttattgatgaaacgtcttctaaaaaaaatatgataaaagtattgagtttattacatgaattaagaatcatttctcgttcacaactgttattgttacttaacataaatgcgaatgttgctgaaagaacgatgaatcaaatattaaaatatcttaaagacaacaacttgattgacaaaataaaaaaaggtaatcaagcttgttatttcctgacaaaggaaggtcaccagagtattggtggctattatactttgccaaaggtaccagaatataatttgcaacaccatttacaaataaatgattatttaatcaaaatgctggaactgacaaaggatagaaaaaatttgaaatttgttctgtccgaacgaaggcaagtctttgaaaccaaagaccttgccaacaatcgaaatcgaaaaaaatattttgttgctgattttattttccgttttagaagtaaagaaaataaagaagtcaattggtcatttgaaattgagttgacgatgaaaactaggcggcgatatcgggagggcattttcccaaagtacattgcagaattaaaacgtctgccgtatgctcgactaatttatgtgacacctagtccgttaatcgaagaagaactagaacgatttaaagggtattttatacgaaaagaaggtgaagataatgcagaagtatttgatcgcctgcatattttttcagccgaagaatttgaacaggaaattaaacgattattagcagaagatcaatttattaattgggagtgagttttatgagaagaatagagaaagaattcaacaaaaagctagccggttacgaaagagagttaaaaaaattaggctgtctggatgatgaaacaggacttattcccataagcaaaagacgatggcatgtcatttggtggcgacctgatacacctgcaaaaacaatcgtgagatcctatcgattaacgctagataatgaaaacttatgtattttaggagatgtagaaatcactatttatcatgatggaacatatggtatttctaaagaaggtgtccctatttttattaatgacttattgtctttaaaaaaattatttaccattttctatggaacaccttttaacttaaattttgaaaaaattcgctgtgttagttttaacaggtattgtattactattcctgaaatttatgttgaaaaattcgaagtattaataaactactcgatgattttaaatagctgcctacatgaaatacaaaagcacgtagaatatgattaaaaagcttttcttcttccagaagaacaccaatgaattggtgaaggtcaagggcattccggtcaaaaattccttttctgatgtcagaacagtgtcacgcagcctttttcgttttcaggccgttccttttgccgtgtgtaacgtgctgttcactgtttgttacagtaccatagccagtcgaaaaaacaagggtatataaacgagcaagctcgcccttgttttttctttatgtctacggtcctttctcggcacagcgaacgacacgaacacactggcgaaaatgaacaacctaatcgaaaacgaaaaaggggggagactacaccgtttgacgaaaagaaatttttgaccgtccagcttcacttcctcaaacgcctaacaaaaatggttgttcaaaaatcaaaaccgaaaggagctgaaaacatgaataccccacatttaacattcaaactggaacatgccagaaaagaacaccagaaattaagtgaagccattatcacaaatgacacagtgacgttactacttaattatggttgtttgaaaaatgcgaatgaccgtttatatcaactagaatattttctaaatcataaagaatggaaggactgaaagtatatgagaaacagaattgaagaactaaaagaacaagcaagaacagaattaaacgaatggggattgattattgacggttgctttgagggcgactttgaaacatggataggctgttatgcacgaccaaaagacaaaccgacagcccttgacccaatcaacgaagaagaagccaaagaacaagcaaaatatgcggtcaatggtttccctcaagattttacagaatggtacgagtgggaaattaacaatggaaaacttaaaaatttactataaaanagaaccttttgctaacgacaaaagatttctaaaaaggtacttacacttgaattaattgtractcaagtataacttacctaacgacctttgacaagtgaaaatttgctcccatcttaaattttaagaggggaagcttacaagaaatgaggaaacgttatggactttcaaaatatacaaactgtaaaagaattaagatacgcactgaaacaatacaaacaaacactcgcaactacgatttttgatgatacacaaggctatatcagtgtcgcctttaaaaaagaagtgatagaaaaagacggaaaaaacgttcagttttatgtttttatcctaattatgaggtcgctctttatccagtcgaaacgttactggcttaccttgaaaagtta

SEQ ID NO: 356 - DNA, 3182 bp; double-stranded, linear
tttaactcttttccagaataaagaacctgagtctctcctaattctattccctcaaattcttcataaggatcgctatatgcccaaccgaaaaaatccaaaaacggcgttccgttcttgacgggagaggtatcatgcttaaaatgttcaatattatgcgttgcccaatcgctattacctaaagctaaaagagttagacagtcttgaacagtatcaaaatctatctcccctgtttcaaaagcgtatttaatattcatataagggttcaaataataagcacggtccagtaatttttctcctacgttttcgacataagcctctaccattttaattgctacttccttggttaactccttacgaacagccttttcttctttgtaggtttgttgttcttctgatacatctaaatactcatctaccttcaaaggattcgcttgttgacgaacaataagtgtttctgatgaaaattcatttaatatcggtagccctgctatttgtgaatatgttttactagctaaatcagctttcataccaattttatttacgatattttgccaaaggcaatcgttttcctcttttgtatagcttctgtctgtatctataactaaccgataccttagaccaaaatctgaaacattattttttatcgtaggatagagaatataactaattccttttagggattcagcaatcttttttataaaattttttaaatctctatcctctagctcgtcataatcgatagcgattaattcttttcttaatagattatcgtttgagcgtttacctatcagttcaccagcgagaaaataacttgcttttcgcttaatcggttctattgattctttggtagcgtgttctcctagagttactttctctggtaggtactccacaagatattgaaaaggggaaacgccctctactatcttcatttttttactaaatcccttacttacatagatactcaattttwaatcacatcctctatacacattcattaaacatttcagcaagtgcatttactttttttgatactaaatattgcaaggttaccatttgatcaatgcatctcgatgtttcataagccaatattttatcagaatttttctggccattttcatagtctattntcncnctcggaaaagatgcgaaaacctcckgtaaaaagaacagtaaatgtttaatatctcttaattcgtcggttattgtatctttatcaaattctggatacattactcgcactctcctttattaaatttataaaaatgttcatcaaaattcatgaataacacggtgaaagcaccgataaacagtgctagttttaagattgtaggtagaacagatgcaccgccgcctaaaagaaatgcgactaatagtaaattaattttcgttttcattttgattttcctctcattctttggtaaaatgaaagacaaaagacggctatatttagcctttttggtgcctttaacacgttcactttggtcggttagtgtgttaaggctttttcttttgctctcattcatcataattgctccttaatttgtcgctactggcattttaagcgttgtttgatataaaacaccttgaccattcaaaatgctcttaatcgtgtcataatccattttaagagtaagcaatgtagctacttgttgctctcgtttgttcactgcttcgatctcttctgacgttaaaaaatctaatatcgttgattttttacttacctctcgagcttctcttaattgcttagcattaaaacctaatgctgtcttataaacaaggtctgtataatgcttgtagtaatgcggggaaagccctaactccttgataacatccgtcattgacttacgcacacttttttccttttgtcgttccatacgtctagcgtagagtccgtttttcatgtcatagaactgtcgcaccagcgctttcttaaatcgtcgaactggttcggtattatctagataagtgataagcaaggtcgcttgttcctcgtttaattgatagaatttagctttttgcccactctccattgctcggatttcaaatccgaccttgccaaactcttctaggtctttttgatacttttttattagtttagaaacactttctcttttaatttgtgaatactttgcaataacctcatcggtcgtataaggttcttcctcgatatactgtgaatgtaaaaatactaattcgttcatctatcacacctccatttcttttaagcttgggaactgactttctaaccatggaatcaacacagacaaattatgtcgtgcttgttcttcagtaagattagctatcctattttgcataatcatcaaatcggcataaagcttggcgtttcgtttttcatgttctctacactcttttaaaatcgtttctgcttcttctacgatctcactaatggaaaaattcttgtacttttttggtacccatattaatttgagcattgttgcctcctcaagttaaatctgtagtaacggacgattgactatgtgctatctcggattctctattggcgggtggatwtttattattcattttcgagaagccaagatcttagttgatgcttactccagcaggttttacgatcagataaacgccttcctgtkggtagtcctttcgctatcaattcatctaaataagcttcggaacagttgtctaagaaacgtcttactccaacgcgtgtatagatgaggtcgctgtctacttcactgtctcgtctagctcgctcaatcgcttctagcgtggtttcatacacttgtttactgattgcattcaattgctttttatcaagcgtatggcacacctcaacaactacaggcggtgtttgcagttgctccattgtcatgctgtcatacctccttataaattttttcatttaccagccagtcaactaattttttgtagactgttttacgcacagacaagattttttcattttctatctgtcctagcgttttagatgaaataccaatttcatgagatgccttttctaaagtaatattttttctcgctcggcgctcacgtagcttggctatcatctctaaatctagctcaaacatattctcacctcttccgatttcccgttttttgggattkgataccytgattawaattcccaaaaaawgggaagtcaagttatttctcatttttgggaattaaatttgatttctgcc

SEQ ID NO: 357 - DNA, 508 bp; double-stranded, linear
anatannataaatgtaataattaaccacattattccggtraattgaacggctaaataaatattataammmmcaaatcctaaagtgaagagaaaaagtaaaamataacagttacttcttttaaaatgtgctttccatgattcaaatgctcgtttaacggtgattgcttgataattcatgccctcttccaaaatgaaatcagtcatcatttggagtgctggaccaacaccaaaaataatccctccagctaaactaaataaaacaaacagtaaatttagtttgattactgtccaggaaaggtaaaacaaccgttgaatccctgtactttccatcttcctcttcctttctattatgtaaaaggctaagccaaaagcgctcagctaatgcctcagcctcctgtgattatttttgagattggatatattcgtctaattgtgtttgcatttctttttgaactttatcccagccagctgtttttaggtcatccattaattttgggaagtgtttctt

SEQ ID NO: 358 - DNA, 902 bp; double-stranded, linear
cagtcacgaattgatttaaatccacatttgtggaattaacaaattccacgaccatcagcataagtcgttgggtagttggccagacgactttcagaccaatgatccttgaycaatcgcaggnccwtagacagaaattggtttaatcgtagaccaacttgacgatcggcattaaaggcatggttgttttgattaatatcgaagtttctgccgccgatmamaccaaggatacgaccagtagcgttatccattaaaatattgccagtttcaatcattgtattcccattgacatctgcagtgccatcatcaagcaaataaccataatttgcgacagcggtttgcatcgtgttgtaaatattctgatcaatggttgattggattgtatagccttgcgactggatttcgcgacgtgcttgttcttcatattgatctaaaccaacttgatctaaatcatcacgattaactttagcttttttcatatctaaatccatgacaatctcaactgctttatctaacaccgtatagtatagatagccttctgtattgacattggcctgttcagttggtaaaaagtcttttttcaagtcgtaagctttggcttcttcatattccttttgcgaaatagctttttctcggtacatactgaaaagaacaaaatcttttctcttcattcctaaagacaaatcgtctttcaaggcaccagtgttagtatagggcgtgtaaacaatgggactttggggaagtcctgcgataaaggccgcttgaggaagattcaagtccttggcacttttaccaaagagtcctttggctgcttcttccacgccygcaatattttcacctttgttattacgaccaaaaggggagacatttagataagttgtcacgatttcgtccttagaaaagta

SEQ ID NO: 359 - DNA, 3989 bp; double-stranded, linear
tttttgttgttctttaatttttattcgttggttgcttgccatctgtccaccaaagcttaattaaggcctgtgtgccatcattttcaaaccctttatctgcaaggctttcatataattctgtcgctttttgcgtcgctggcaatggaaggtcaagtttttttgcttcatctaacgcaatctttaaatctttgataaaatgtttaacaaaaaagcctggcgtataatcttcttttaaaatacgcggaccataattacttaatgaccagtttgcagcactaccaccaccgactgtttccagaactttttctaaagttaatcctgtcgcatttgcataaacgagcatttcagtcaaaccggtcattgtgcctgcaatcattaactggattcgccatcttagtatgttgcccttttccagctgagccgtgtagcataaacgttttaccaaatgktttggaaaatkggtaagacggngkcataactttcytggatcggccaccaaccataattggttaaagtaccatttttagcacctaagtcaccaccagaaactggcgcatccaacgcatgagcacccacttctgctgcttttttggcaatcttttcagccaaggtcggcgtacttgtggttaaatctactactattttacctgtaagatctgcttgaaaaatccctgtttcattaaaatacacgccttcaacatctgaaggaaagccaaccattgtaaaaatgatatcactcgcttccgcaattgcttttggcgtatcataccaaactgctccttcagcaactaaatcatctgttttactttttgttcgattgtaaacattgacagataaattgtttttcatcatgttacgaataattgattttcccatgacacccgttccaataaagccgattttagacatagtagcttcctccgttcttaaaataaaaaactttcctccttcagtataaacgaaggaggaaagttttgcagtttattttcttaaagatgtaaattttactttaattttttttattgagtccgcattttctttttccatttgaagttgatcaaagtaaatcaatgtatcttgataaaattcaatcattttgttgccaaagtttgtagaagaaatttcaaataatttttcatctaaaatagtttggtccattttaatatttgcttgtatatagtcaatcaatgttgtggcaaaatcactgtctgtcttaaaagttttgcctaagctttcatgatcaaataaattatttaaataggcgttcccttctgcaacacattgaacgccagcggccatcgcttctgtataagttaagccttgtgtttccgacgttgaggcgctgacaaaatagtcagcagctttataataaatggcgacttcttcatttggcacttcacccgtaaattgaacgtattcactgacttctagttcttctgctaattcttttaaatcctctagatagggaccatttccaactattactaaacgagtttgtggtaatttttcaataacttgtggtaacccttgaataattgcttgaatatttttttcataagaaattcgacttaacgataacaacataatctgttgctcttcaatacctagttgttgacgcattccagcgatcatttcctcagtaatatcgggacgtaaaaacttatcaatttcgatccctgttggaataattctcattggtgcggttactccataatcccgtaatttttcaattacacgttcactgggacaaacaacacctgtcgtatgatttgtaaacactcttgaaaagaatttaacatgtgatggacggacaacttttcctttagcaatataatgtaagtaatcttcatacatcgtatgatacgtatggatgacaggaattttcatttttttcccaaccattttccctaaaatacccgcaccaaattcagtatgtgtatgaattaaatctaattccaattctttggcaattaaataggcgtaccacatgccgcgaaccactactcggcgatctttaaaagatacgaatggcacactaggcattcgtatgacatcttcttcaaaatcagtcgcgttaggatcggttgtcgtaaaaatatacacttcatggccgtgcttttctaattcatcttttaaggtcttaatagaagtcgctaccccactcacttgcgggaaatacgtatcagtaaaaaaaccaattttcactctcattacctccatttcatctaacaataactgccttcaatatttgttaagataagactgtttcgtagacttcttttaactcgtaaccaatttgcttgatacttctttgctctgctacttgatagcctgcttctctagtgctaggtattttcccttctaataagccttcaatatattttttaaattcttcaatagaatgacccatataacaattttcattagctactagccagccttgataaactggaatatcacgcactaaaacttgttgctgactagctaatgcttctaagacaacaattccttccgtttcttcacgcgaagggaaaaagaagagattcgctgccgcataggccccttcgatgacatctcctttaatataacctgggaaaataacattttctggatgatcttctttaactaattgtcgaatattttttgggatagaatacattggtgtatcaccaaaccaaataaattgatactctggtaactgtcgcgcaacttcaataaaatcagtgattcctttacgttcaaaaaataatcccacacaaataattacttttttctcttcatctattttaaaatattctcggaatttttgttccttttcttctgaaggataaaagcgtgataaatcaataccatttgagatcgccgaaataggcactttaatgccatatccttctagcaatgttttagaatacggtgttggtgtaattaaatgatccgctttggaatacaaactgataagatatttttttactaatggtgccagttgattagacccaataaaggaattacgaaaatcttcttctgtcgaatgggcatgataaataactttttttcctagtttgcgtgcttttctgaccatacgatggctatttacgccatatgtattaatatgcaatatatcatagtcactgcaatcagcatctaatgtatattctattccaacttcagagagcgctcgtttctggtgatctaatgctcgaccaatacctgatttggctaagattttctcaccttcaaaatataacaatattttcaaacccgctcctccttttctgctttactaactataataaacacattataccatagctaaaatttgatgtattcattcttcggtaggatccttttaatcttataaatgtttttaaagtcccttcttcaagcttatcaaaaaatagtgaataaaacaaaaaaagcaaaaaccaagttggtttttgcttttgctcaactccggcagtaggactcgaacctacgacatcatgattaacagtcatgcgctactaccaactgagctatgccggaataatcgcgtggcgacgtcctactctcacaaagggaaacccttcactacaatcggcgctaagaagcttaacttctgtgttcggcatgggaacaggtgtatccttctcgctatcgccaccacactgggtgttgtttcttattgagttgaatcttcattcactcaaaactggattgaagtttgaatcaaaataaccaagttgcttttacttatccattctttggttaagtcctcgaccgattagtattggtccgctccaactatcactagccttccacttccaacctatctacctgatcatctctcaggggtcttactttcttaaaagaaatrggaaatctcatcttgargtgggcttcacacttagatgctttcagcgtttawcccttccctacaaagctacccagcaatgcccttggcagaacaactgggtacaccagcggnaagtccatcccnggtcctctcgtac

SEQ ID NO: 360 - DNA, 3287 bp; double-stranded, linear
cctncctaatatatcttcnatcactgtaactttactkgtaatatcagatattgaaaatttattttcytgtaaagttttcattttattagatagagaaatcattttatttaatatattttccatctcatcaaaaatagcagtgtcaactttacctttcattaagcttcctaatttctcaaaaatattatcttttccaccaataacttcaactgctttattgatgtcatatatattatttacaagttttgcactatttatatcttctgaagcactagctagacgtttcaatccatttgacacttctatcaaaccatcgataacttgtacatatgtcgatgcagtaaaagtacctattattcctttgaataaagatgaaatttttccaatactggatttcgccatatagcttaaacttcttctaaactctcaagcttatttttaacacttgtaatatcttcaggaacctttttattcaattggttaattgattcagaaactagcattaattctcctgctagtagtgctacagctgccaaaccagcgattgctgcagggaatgtagcaatacttaaaccacctattactccaactaaaagacccattgcaccaattgctataccgatattagcaacctttttagctattgttgcaatatctgaaggtactttttcatttaattgtgatagtgcttcgcttgcaatcattaattctagtgataggagtgctacactagctaatcctgatatagccatcattggattagcagatgaaaaagcgcctgcaataacaactaatcctgccatagccccgattgcaattgataaactccctagtttcttagcgacaattccaatattgtttggtactttctcattgagttggttcatcgcttcacttgcaatcattaaatctactgagattaatgcaatacttgcaatcccttttaaattatcagtaaaatttaatttactagctataaaagccagacccccaattgcactgatagccagactcatgctcgctgtttttttagctagccctgtaaaatcattyggtattttttcatctagttgtttcattgcttctgcgccttcttcaagcacttttattgctccgaataataacgcaaggttaccagcattttttaaaaaaccagtcccaatagattttaaactctctaatggttttacgatttctgatgctcctccacctttaccgaatttaggcaattttattttaccgaatactccaaaaactttggataatatagaaagccctttggcactaatagctataaactttaaagctaccccaaattcaaataatcgtggaataaatgcacctaggcctttcaaagtatctcccttacctaaaaattcaaatataggtttcaatagattgaataatccaacagcatcatcttttacaccctttattcctttacctagtccctcaaaaaatgaagcataatcaatagtgcttaaaaatttcactacttkgtcaaaaaaacgaaatatatcatctgaatgttcttctgcaaaagctcctattttttttaaattatcttcgaaagcagcaccaatttttccaaatacacctgcaattcctcccaggcctttatccttcgccatcttatcaaatgtatcgataatcgaggtcactccacgtgttatagctgaattcataatagacataccagttcgaacgccaccaacagaatttctagcttgttcttcaaatgatttgaatccttctgccccgtttttattcatctccacaattctatccataaattgatccatagagatatttccatttcttaaagcttctcccaattgatcagatgttaaaccaaaactcttcccgatttgatccacttgggcaggcattgctgttagtagcgagcgccattctatcatgtctggtttacctttagaataagattgagatatttgctcaagtgcgcttgattgtatttctcgtgacatgccacccgctaaaattgcattatttaatgccaagaatatatccgcagatttctgtacatctttattatttgctgtaaacctttgtactgaagcaacagcatcatctaaagttgtaggcaagccatttagcccttttacaagtttgcttttggcgatatcggcttggtcggctgaaatattcatatttgacattactttttcaaagttatttaaagtatctaatcttgaaatagaaccatcgatagaatttgtaatcatactagttgccttatcaacagcctttacagctagtcctacaccaagcatttgatttagtttggatgttaaaggattgaatgctcctaatattttattgcttgcattgttagctagcccgctcaacttatctagatttgatgaaacatttatcttgtaggtccgttcactcatacttcgaagactattttgtaattttcgactctcttctccagtttctcctagaccacgactatcaatttgtaacatagccttgcgattattcaatcgactaatctcattgtctagtttacgaagttgtgcttctgaaccttgcaactgagttgttactatttgtaaatttgctttcctagattgtagttgtttaatttgtkgatttaaggtkgatattttttctttkgcatctttagtatttacatctgccttaatggttgctttctgtgcttgcaatttttttatatcaacattaatattttttatttcttcttttgctttttttagtttcgtagtattccactcgatagcagggcgttgaccttttagtttagctattcgtcgatctaaactatctagttctttttctatatctttaatattgtccttaatacgaatggagatattttcaacggccaattattccacctcctccagctcatcttgcgatataaattgaacaacaaatggttgtggttgcttaggttttggtgcattttcttgtgacgacttccaatccataaagttttgataactttgctcattagcataatggccatatgctacaatcaattcagaaacgccccaaccactcaatacatggctgggacgttgtcctaagatttttgctacaaaatgagccatatacgaataatgattaaacttagcaaaatacgttyctgcgctgttgtaatgaaacaccattgtttaaactgtcacgcacgattatccgaaaaaagcatctgcttctttgaacacttctgggtgatttctgttaatgcagtaaangttcaatcactgaaatggaagcagkatcgattactctcanca

SEQ ID NO: 361 - DNA, 1104 bp; double-stranded, linear
caaaattaggccttatcggaccatgtttttctacattcattggttgaaatagcattaattttagtcgtgakcgaattgtcttatcgttttatcgaacatccactgacacgattgtcttataaggatgtctggactcaattcactgagttcttacggaaaccgtgggaccttcgtgaaaaagggacaatggcctttatgacagtgattagcgtgattgcagtattcggtttaattgtggctccagcaaacgctaaaagtgcgcaacaagagcaactagaaaaaaatattgcgaaaaatcagcaaaaaattgaagaacgtaaaaaagaagtccaagaaagtggcacgaaaaatagtagcacgtccacagaaagtagtacaaaaccgagtgaaagccaagacgttctacccacacaactcacaccagagcaagtaaaaaaagcgcagaatttagaaatcacaactattggtgattctgttattctagatggtgctagcgggttacaagatattttccctaaaatgattatcgatggggaagtgggccgtcaattgtatagtagcatttcactaattggtgaactagacaaaaagaaaatgcttaaaaatactgttttagtgagtttaggtacgaatggtccttttacagaggcacaatttgatgaatttatgaaagcgttaggtaatcgaaaagtttattggattaatgttcgcgtcccaactagaagatggcaaaatcaagtgaatagtttacttagtcaaatggacaaaaaatacgataacttaacggtcattgactggtttaattatagtaacgcccatgatgattggttttatgatgaccgagttcatccaaatgtggcaggtggcgagcaatacacacactttatcgcggagaaaattttacagtagcaagaaacttccagctcagatgaaaggggctgggaagttttttgttatagggaaaagcaaatataggtaatttaatgattttcttggaaaacctaagcttttttttttagatatcngggtatacnggttttttggttaccagntccccgnaagggatttagccaggtaattggccggtaccttacctaaaagatg

SEQ ID NO: 362 - DNA, 5273 bp; double-stranded, linear
gattncgtgaagcggttgacatatgattgcatcttcatttataatagattcatgaaaggttattcatgtaaacggaataatcgctattntatagggagtgaaggtgtttaaatgcaaaagagttataaactagaaggacttgattgtgcaagttgtgcagacaaaattgaaaaatctgtccaaaaaattcacggagtagaaaaagcgcgtgtggacttcatggctgaaaagatgacactggaagttgaatcaggacatgatttagaagtcgaaaatgaagcgcgtgcagtgattggtaagttagaatcagatgtcaaagttatttctttaaaagatgtcaaagaagaagagggacgtaatccaaataagaatcgcttaattcgtatcattattgcatttgttttattttttagcacttattatcattaaaccaagtnataattgggttgctttggcatcttatttagtcgtttatgtcttaattggtggcgacattgtcaaacgagcggtaacgaatatttttcgtggggaagtgtttgatgaaaatttcttaatgtctgtggcaacgatcggggcattctttattggggaatatcccgaagctgtggcagtaatgtgttctaccaagtcggcgaatggttccaaartgctgcggktgatcaatccagaaaatcmattgccaaattaatggatattcgtccagattcagcaaatcttttagtaaatggacaaataaaagcggtcgctccagatacaattgaaattgggcaacaaatattagtgaaaccaggtgaaaaagttccattagatggtcaaattattgatggatcaagtatggtagatacctctgcgttgactggtgaatccgttccaagaacggtcaaagtcggcgatgaaatcttaggtggttttatcaataaaaatggggccttgaccattaatgttacgaaaaaatttggggatycaacagttagcaaaattttagatttagttgaaaatgctagcagtaaaaaagcccctgcagaaaactttatttctaaatttgctcgttactatacaccagttgtcgttgtttwagcyatcctawtggcagtgattccaccatttattttccctgatacttctattaatgaatgggtttatcgagcattaacgttcttggttatttcttgtccatgtgccttagtcatttctgttcctttaagtttcttcggtggaattggcggagcagcaaactaggtgttttaattaaaggaagtaactatttagaaattttagcgaatacggaaacaattgtttttgataaaactggtacgctaacaaaaggaaattttgtggttcaaaacataactagtgttgtcttacccgaagaagagttgttgcgtttaacagcaacagcagaacaattatccactcatccaattgctatttctattaaagaaagctatggcaaagaaactgttccagcaacagcaattgaagaggttgccggacacggtatcaaagccacaattgaaggtaaaacagttttagtcggtaatgcgaagttaatgaaacaatttggtatcgaagcaccagaagtgaaggaagcgggaactttaatttttgtcgctattgataatcaatttgcaggctatttagtgattgcggatcaattgaaaccagacgccatttcagcaataaaagaattaaaggctgaaggggtcaaacaaactgttatgctgactggagacaatcaacaagttgcagaagctattgcaaaagaagttggtgttgacaaagtttatgcagaacttttaccagatggtaaagtggatcgtttagaagagttgttaaaagcatcttcacctaaaaacaaagttgcctttgttggtgatggtatgaatgatgcacctgttttagcccgggctgatgttgggattgccatgggtggtttaggaagtgacgcggcaattgaagctgctgatgtggtgattatgaatgatgaaccaagtcgtatcgcctctgcgattaaattatcaagaaaaacattgagaattgttaaacaaaacattatctttgcgattgctgttaaaatcattgtcttggcactaggtgcattaggcttggcttcaatgcaagcagcagtgtttgctgatgttggtgtaactattatcgctgttttaaatgctatgcgttgtttacgtgtagaaaagatgaaagataataactaagccttaaaaagtacagctgagacgaacgtttttagctgattatcaggttttgagcgtgggacaaaaatcactttgactttttgttccacgctttttctcctacacaatttctattcgttcttaaattgccagagttcttgtaaagaaatctttaaatttttcgctttgtggcatataataagaaagaatttgtacgaaaattgcgcttcgcttttttttcatggtacaataagcaagaatggattgatttacaggagggaacctcaacatggcatcaaatgaaaaaacacgatataaagcaatcattgcagaccatacgtatacaattattggccaagagtcaaaacaacatatggatttagtcacaaaaattgtcaacgaacaactggcggaaattaaacatctttctccgcaaactgatacggaacaagcttctgttttattagcaattaatgcaatttcagatcaactaaaaaaacaagaatatgctttaaaattggaaaaacaagtagcagatttaaaacagaaaaccattcgtttggctgaattagagaatcgtgtgcgccgaatggaaattatcgaagaagaagcacgagatgttttgaaaaagaatggacaagaagatgtagaaattcataatcatgtggaagcccaacaaattttgaatgaaaatcgaaaacagcagattcaaaataaaggtgtttcggagtagttcctgaaaggatgacaagatgttaacaatacttattttattacttttagcctttggattttatacaggagctaaacgaggcttgattttacaagtgctctattcggtaggttacttaatttcatattttgttgctcgtacctattacaaagaggtcgcttctcatttagaattgtatattccatatccatcggttacgccaacgtcaaagcttgtcttttttaatcaagagatttctttagacttggacaaagccttttattcagcggttgcgtttctattattgctgtttgcaggctggttggtcgttcgttttttagctatctttttacatggattaacatttattccagttttgaaacaggtaaatggactattaggtggcgtattaagtgttcttgtgttatacgtgggtctttttctagtgttagctacggcgtcaatgattccgtcagatattgtccaaaatcagtttcggtcaagtggcttggcacgaggcattgtaaaaaataccccaattctaacaaaacaagcatatgaattatgggttgaaccaattacgaaataaagctgaatgggactgagatagagataagaagtaagtgagcaaagcgaaacttcttatgttatgtctcagtcttttcaacaaatgaaaaagttagaaaagtaggtggaaaaatgaatcagcgtattctatcaacattagggtttgataaagtaaaacaacagttgttgcaatttattgtgacagctcaggggacaaacgaagtttcggaattattaccaattgctgatgaaaataaaattcaatcatggctaaatgaaacacaggatggtttaaaagttcaacgattacgtggtggaatccccattcctaaattagaaaatatccaaccacacatgaaacggattgaaattggtgcggatttaaatggcatagaattagcacaagtaggccgtgtcttgtcgactacttcagaactgactcgtttttttgatgagttaagtgaaaatgaagttgattttgaacgtttatatatgtggcgagagcaactagaagttttgcctgaattaaatcgccaactcaaacaagccattgatgatgatggctacgtcacagatgaagcttcgccagccttaaaggcaattcggcaaaatattcgtcgtagtgagcagaccattcgagaagaactagatagtattattcgtgggaaaaacgcacgttatctgagtgatgcccttgttactatgcgaaatgaacgctacgtaattccagtcaaacaagaatataaaaatatttttggtggcgtggttcacgaccaaagtgcttcaggacaaaccttatttattgaacctaaacaaattttagaaatgaataatcgtttgcgacaacaacaaattgccgaaagaaatgagattactcgcatcttggcagaactgtcggctgagttggttccttatcgccgagaaattacgcataatgcttatgtcattggtaaacttgattttattaatgctaaggcgcgactaggaaaagaactaaaagcagttgttccagaaattagtcmagcaaatcmtgtagtttttaaacaagcccggcacccactattaaatccagaaaaagctgtagccaatgacattgtgattggagaagaatatcaagcaattgtgattacagggcctaataccggcgggaaaaccattactctgaaaacgttaggtcttttacaattaatgggtcaagctggattwcctattccagttgaagaagagagtaaaatggggatttttacagaagtatttgcggatatcggggatgaacaatcgattgaacaaagtttaagtactttctcttcacatatgacgaatatcgtgtctgtcttaaagaaagtcgatcatcaaagtttagtactatttgatgaattaggtgctgggacagatccgcaagaaggggccgctttagcgattgccattttagattcattgggcgctaaaggagcctatgtgatggcaacaacccattatcctgaattaaaagtgtatggctataatcgagctggaacaatcaatgccagtatggaatttgatgtagatactttgagtccaacctatcgtttattaattggcgtgcctggccgaagtaatgcttttgaaatttcgaaacgtcttggattagacaacagtattattgaggctgcaaaacaaataatggacggtgaaagtcaagatttaaacgaaatgattgaagacttggaaaaccgtcgcaaaatggccgaaactgaatatttagaagctcgccactatgtcgatgaatcggccgctttgcataaggwactgaaagaagccta

SEQ ID NO: 363 - DNA, 13932 bp; double-stranded, linear
ggtttaaggcttccactttcccaatgttgcttgtaggtttgctttaaggctcgatttctgctgatgtttgttgctctttgagttgtttaaatgtgaagatttctcggttgaataggttgargtcttgatgggttaggttcattttattccctctttttagtatcttctagttactcttaataattttatttttcaatagccattgtaaaaataacacaaggactacaattggccaaagcgtgattgggaaaaagagccctacaaaaatgcctggtacaagaatcgtccctaaaatctgtgttgttaaactcgtagcaaaaattgcgacaacaaaaagcgagtcaattgttgggaaaaattgcgcgaccgcaaacccgattaaaatagctgaaaaaacgacgggaaaaatatcgccacctatccaacctgtctgtaaacaaacttgtaaaaatactagtttcattatcgcagcgattaccaagatataccaggcttgttgactaccaaaactaggaactaaatgcataaaagattgtcctgaaaatagtaatcttggcattaaaataacaaagagaaaaatacaggctgcaccaaaggttaccagtatgctttgcttttcttcaaaaggttggcatagtttagccagagcagcttgcaaccattgataggcgttaccaatcacaaaagcagttaataaagcgggtaaaatcagccataacgaagccatttcaatttttccagttcctaacttcgtaataaacgatgggtgtcccaccaatttcattaaaaaggtaaacaccaccaacccgttcacaataaataacccgttcatcacttgtttcagtttctttttatctacaggagcgagcatcgtatcgtagcgctgaacaaactgttgcggatgtagcaagcgctggatttttgtccaaaatacttgctgttcttgctcgtcataatgaaaataaaggtaccgtaacttatcagattgccagactgacaacgaaataatcgctcccagcaatgcggcttcaggaccgacaccagccccgaaaattaaaattaccaaggcggccaataaatttctaaacacacctgaataatcgaccgattgtttcgccttcaattctgtcagagcctcatgcgccgtttgtggtatttgcccgaagcgtttcttcagataactcaataccaacgctcctagcacacacaagacaaaataatagagaattggccatttcatttgcgctggcaacacctcccagagcagagtcgttagctctccttcaatgattaaaaatgctcctgaaattcccgcgatgatactacttaaaaataacccactgacgataattgtccacatttttctgttacgcatacttcctccaaatgatagttgtttcttttatagtagcagatagttagtggnttgtgtttgaagattttgggaaggattatttttttgaaaaattgaggttatgaaaagattccattttttattgatcaaattatccttcttgtataatcgtttcttttagctatatatattccattaaattaaaaaccgccacttatattgcttcttaagttcccacaaacaacgccacttccagcgccaacaagtccacttccttatcaaagtccaacagcactagctgttcaattttctccaatcgctgtaataaagtattacgatgaataaagagttttttggctgtttgagacaagtttcgttttgattgaaaatagacattcagtgtatggacaaagtcggtatgttgctgttgatcacttttctgcaatggttgaagatatttttttctgagggttgcttgtccttcttctaaaaaataacgttgcaatgtctgtctaaaatgaaaattcgagtaggaagcaatcctcatttcaggtttttctgcaacgaattggcgttgaaaggctaaaacgtcaatcgcttgttgataagattcatgaatctgggtcagaccttgaatcttaggtcctattgttaggaaaagttccacatcttcttgtactttcattaactgatttatgctactttgtgctaggcgttgcatcattttcagataatcgccttctttttcaggtggattttcaactaataagacaaaggaactgtcaatttcaatacaaacaattttttgtttgtcccctaaaataacttggtttaactggttacctaaaatagacattctttcttgcctttggcgttcatttaaggttaatgaaattagcaaaatcgcatagggcttatctattgccaagcgataatattgttgaaattgttggaaaacagcttggtccctcttttcatgcgcaaacagcttaaaaaataattcgtttcgttgttggtattcttcaaatttccgtgagtattccaattgcaattgtaaaagtaagtaatgagctgtgattttaaaatgagccacatcgactggccgtaatggggccaaggtgttccagacgagtaaataatataaaataacatttttctttttaattggataaatttcaattggcaccacttggttctggagtttcaactgtaaatgaatcggttcttgataaaagcgtaataatggatgactttgttccagcaattgtttttggaactctgaggtttcttgtctatcttctaaaatgctagaaatacgaattggatttttaggcaagtcaaaaaaattaactccttcaaagtggtcattcaataacaagacaggattttgaatggtttctgctagatcctgcagcaaatgaaaactgctacttcccgtttctaagatttggtaaattttattatgcaatgcggtttcttgcgcattcatgtcaaattgttctaacgtgacacgacttttcaacacgtcagcaatttgcgaaaaggtgtaattgtaaggaattgctaaaataggaacgttcatttcatctgctaatttgattaggtctggtggaacttcttcaaaataacgttgggttttaaatcccaaggcagcacaatggtgtttggctagttctttcaaaaaatttttctgtaatttccgatcatctttaaatatgtaccctgtcgttaacagcagctcacctgctgttagccaatctaaaatatcaggattttctaaaatattgacttttaaaatcggttggtcctgatttttatgtcctgccactaaggtaatgccaggcaattcttctaacgttaataaatcactcacttttaacatcatttatcctcccaatgtacaaattgtccattcaaacttgtaaatcaatgtcatttttagcaattgtttagtgtgctggattcttttattatgaagtcgtgaaagcgctattaaaaaggaggtcgttggaatgacaaaaattttagcttatgaccaaacgattttatcgaaactccctcatcaaacattgactagtttgcaatgttttacgcacgctattaattatggtcatgtagacacccaagaaattctcttgaccatttcaacgcatcccgaacatatagcacctaacacgattatactcgatgaaaaaaaacttagccatttcgctgatttacctgtccaaattgagcccctgtttatccggttaggccgacgacaattaacactagccgatgcccaaatttggcaaccaacgccactttatttaacacccagtaaaacaaaaatagctatttttttaacgtatattcagcaaactcgtttcaatccttggcaagcgctttttcctgcttcgtcgtcaacctttctttttgattcttatagtcggacccagattcaaaaagaaatgattcattttcaacaggcttgggagcaaaaatcttttaaaatagctcttgattgtttaacgaagattttgggattggggattggtttaacccccactggcgatgattttatcacaggattacttgctagtttttctgcattacagcaacttccctcgaatttccaacagctggctgtgctagccaaggaacgaacgaatgcggtcagttatgcggaaatccatgaagcagtgaacgagcggttttctcagctagttcagcgtgtttttttatcaattgaaagtggaaatacaaacgaaatggctcaagcggtttcagctttagaggaggtgggctcaacttcaggaagcgacatactttgcggcattatttttggtttaaaactattttgtgaggagaataatcatgacaattcaaacagtaattaaagagaacgcctattttgattcagttactttaatgaccatttcaacacgagccaatgaactggctggagttaaaactgcaatgattgggatgggaaccgacatgaatcttgaagtgattcggaatgttggtttatatacacccgccttggatcatgttacaacaggtgatttattaattgttttagatcttgatgaccaagcgaactcagaagaaattttacagcaagtcgacgagttatttacgaagaaaaagaaaaccgcttcttctgaagtaacctataagacgttagattcagcccttcatgaagagcctgatgccaacttagttgtaatttctgtcaatggaaaatttgctgcacgagaagcgcataaagctttagatcagcaaaaacacgtcatgctctttagtgataacgtgacggttgacgaggaattagcgttaaaacaaaaagcacacgaaaaagaactgtttgtgatgggccctgattgtggaacagcgattattaatggcgtcgggttatgttttgctaacgaagtacgttcaggagatattggaattgtcggcgcttctggtacaggcagccaagaagttagtgtccaaatccataaatatggttatgggatttcacaattaattggtactggtggccgtgatttgtctgctgaaattggtgggctgatgatgcttgacggtctggatactttaatggttgacgaacaaactaaggcaattttgcttatttctaaaccgcctgctccagaagtaacagagaaaattttaaaaaaattagctgtttcaactaaaccagttgttatttattttatcggcagtgaacaaacggaacgaaaaatagacaacgtcacttttgctacttcttctctggatgcagttcaaaaggtgattcaatttagtcaaacacaggaagcggaaaccagcctctatcaaaatccgacaggcgcaacgttaacagccatccaacagcaacaagccccttctcaaaaatttgttcgtgggttgttctgtggtggcactctttgtgatgaacttttatatgctttaacagaagtctctgatgatgtttatagtaatattcataaaatttctgaacggcaattagcaaatcctgaccacagccaagcacatacattgattgatttcggtgatgatcgtttcacagaaggccgcccacatccaatgatcgatccgacttctcggattactcgcattcttcaagaagccaaagatcctgaagtggcggttttagcgttagattttgaattaggttatggttctcacgaaaatcccgttggcgtgttagcggaggcgttaaaggaagccaaagcaatagcgaaagcagatggtcgtgagttagccattattggctatgttttagggmccgaagaagatccacaagatattcatgacagcggaaanttttagaagatttagaggttctcgttgtcgacagcagtcatcaactttgcgaagccaccaaaacttttgtaaaaggagcgaacgaacatgagcagaaatgatctttttaaacagcctttagatacgatcaatgtaggcattgactttattcatgaagatatgaaaaaacaagggattccttcacatcaagtaaattgggcaccgccagccaatggcgacccagagctattaaaattattggatcagttaaaaaatccaacactttatgaaaaaatccaacaagccaacgaagaagcggttacccgcattattcaatcaaaacctattttagtaggatttgataaagcaattaatgtcatgcccgatatgactgaaacgaccattttacatgctgggccacccattacttatgaaaatatgtgcggaccgatgaaaggtgccgttcaaggagcgcttgtttttgaaggattagcaaaagatctagctgatgccgatcgggttgctcgttctggcgcgattacgttttctccttgtcatgaacatgatgccgttggttccatggctggcgtgacttctccgaatatgtacgttcatattatcaaaaatgaaacgtacggcaacacggcttttactaatttaagtgaacaattggcgaaagttttacgatttggtgcaaatgatcaatccgtcgtggatcgcctgatttggatgcgcgatgttttaggtccattacttcatgatgccatgactttttgtccagaaggcattgatttacgcttaatgctttcgcaagccttgcatatgggcgatgagtgccataatcgcaatgtagccggaagtacgttgttagtccaagcattaacaccttacatggttcaaactgatttttctcgtgaacaattaaaagaagtatttgaatttcttggcagttctgactatttttctggtccgacttggatgggtgccgctaaatgtgcgttagatgctggtcataatgtggagaatagtacaattgtcaccaccatgtgtcgcaatggggtcgaatttggaattcgtgtcagtgggattggtggaaatcactggtttacggggcctgcccaacgggtgattggtccgatgtttgctggttacacacaagaagatgctggtttggatatgggcgatagtgctattacagaaacgtatggtgttggcggatttgctatggcagctgcaccagcaattgtcccattagttggcggaacagtggcagaagcattgaattattcaaaagaaatgctggaaattactacgaaagaaaatcccaatgtcacgattcctgttttagattttatggggattcctacaggcatcgatgtcttaaaagtcttagaaacagggatgctgcctgtcattaatactgctattgctcataaagaaccagggattggtatgattggcgctggattgactaatccgccagcgaatgtctttaacgaggcattaaaagctttagtagctacaataaactaatttcaaaaacttagtaaaatgtcatttttttggagcgatcatatgaaaaataaattgatcaattacgaagccgttttagctcttgttgtaaaaatctttttgggaatgttcctgtattggatcatgaatgactttcgacatgtgtctaacttttttccttacaatgacgtagttaccaaagtgaatcagcagggattttacaaatttatctattttgttatgaacttcacggaaggggaattttacggtggactttttacaacgcttttcttactaatcggcggtctgattgcttggcaactttatcggaaaaattcaaaatggcagggatttgcaattgctggtggttctggtgcttggccttgggtacttgcttctcagctactttccctctttttaactatttatgtttttgattttacacgcttttttacaaaagaagtgttgtggttaccaacgtttattgtggttgtcggcacgccgccagctttaacgctcgtttatggtcctggctggaaaaaattaggaacgatttctctgttgagtgcgcttttcacctttccgtttgccaattggctgaatgcgcaattgatgccccttttaaatgtacctgggacagtttccaacgttaccacaatggcttttgttggctggattgtttcagccatctgtcatcaacttccttggatggttccttctgttgcaccaatcgctcagaagcggcaaaaacaacctaaaattgaaaatacgcaaacctttcaatggtcaatacgacgcacttttgctgacttctccgaagcttggttttatggaaatgagttagttggaggtttggtaattctaggcgttttaacagattggtttgtcaatattaatcatattacaaatggttctggcttggttcctgacattttaatgagacaaatgattgcttcggctgttggtgtttttctttatcgaaaacatttcgctgaagaaggttggtatccaacgtttatgccactggtcagtattgttcctggtgtgattttaatgacgggtggtggcttttggctttctctggccatcgccgttttagcaggaatcagtgcggctcctgtcggtaactatattgctaaacgattacctccgtttgttcctggtgctgtcggctttgtatcaggaatggctgttgtaaccattttattgtcagccgttttgcatacatttgatatttttgtatagtgaataaaaagaagcgaatgacgattcgcttctttttttaattgaccaatcccctttttatccgtattcttaagcaaaaggaggttttgccatgtactccatgttaaaacgtgtgataacggaaaaagatttgcttcggcaaattcgtttgttggaacagttgttaaatgttccccagctgacagccaagcgtttagccgcgcaaatccaaacgacagagcgaaccgttttttcggatttacagtatattcgcagtcaattacccgccgactggtccattgaaaccgatagcagtggtattcggttacgcaatcaggggaatgcgcaaaccaatgagctttggtcattatttttacctcaatccattagtattcagctattaaaagagctactatttacgaaagagttagtgacaacttcttttttgagcactagtggtgtttcttatgaaactttgaagcgacatatcaaaaaaatgaatcaggccttacgtgattttcatttaacgattcaactaaccacgatgaccattcagctaatcggggcagaaagcaatattcggattttttatcatcgtttgttggtgccttttactcataataattatttttttgacgattattcgattcatgaggagcattatttccaatttttgaaacaagtttacagtagtgagttgacggtggaaacggaagaaatttttggcgcttgttggttttttattaacacgattcgcaacaaagccaattgccgagtgagtcaattttcttttgactcaaaagatgtcttgtttcaactttatcaaccgtccttggcaaagctttatgcttctgaaggtatctatttgcaaggagaagaaagttttttcgccttcttttgtttcttagaaagctggaattacgataatgtctatggcgaaacgttggcttctgcgctccacactcattacagtcagctgcgaaaatcattacagcagtttgtcactaatttgtccactgaagaagcccggcctgatttaatccaaacaaatttattggataatctgttattgttattcattaaatataccgagtccccaacactttctgagcaatttcaattggaatatcaagaattaatgaccgaacaagccgcggaggaccttgcgttatcaaagagcaaccaagaacttttggagattttatctcgctacaccacgattgaagaaccgacttattttcttagtttggcttctttgttagaaaaacaagccatttattccattcaggcgcaaacgatgactgcctatttcctctttcaaggggaacctgcttggaaagcttttttacaacaagaattagctgcttatttaggtactcgtgtgaaattacaagctattgaatatgtggaactaagccagttgacgttaaatgaagccgacataatcatttccaattttcccttggatcatcttgatcttcctgtcttttatctctctttaattccaacaaaaaatgaactccgccgactagcagagctcactcttcattcttatttttaaaggaactagcgaggacattcgctagttttttggctttctttcgtcatgaatcgtttggttatatatttttccccttcaacaaggaaaaacagactcacaacatggacgaaaatcattgctaattgaaggccatttaaagaagttgtgccaattaattgctgcgctactggccagtaaactactagcgcttgtagtaaaaagaggattcctaatgaagcaaacaacactttattttggaaaaagcctgtgcttaacgacggatcaaccaacttacgacagttgatcatatacgctgcttgcgctaagacgatactttgtaagaggaacgtttgctgtaaggcttggccctcaaattgtaacgccatgaggtaacctggtaccataatgagtaccgacacatagacgattctaaaaatactgtactttgttaaaatgccttcattgacatctcttggtggtcgtttcatggtatcagcactcgctttttcaaaacctaatgcataagacaaagtaatcgtagttaccatgtttacccataatatctggacaggtgtcagcggtagaggatgattcattaaaagcgcccagacaacaattaaaccttgtgctaaagaggttggcaagaagaaggtaatcgtctttttcaagttatcaaaaatgcggcgtccttctttcacggctttagcaatcgtatggaaattatcatctgccaaaaccatatctgcggcttgtttggttacttcacttcctttaattcccatggcaattccgacatcagctttctttagtgctggcgcatcgttcacgccatcgccggtcatcccgacaatttcaccattgttttgtaaagccgtgacaattcgtaatttatgttctggcgtcgttcgtgcaaatacatcgactttttgaacgtgctgagctaattcttcatctgacatagcatcaatttctaatccttcaaggacttttttcgtatgctttaaaccaacttgctcgccaatggcttgcgctgtatctttatggtctccggtaatcattttgacggaaatacctgcttcttgagattctttgacggcttgaatggcactttcttttggcggatcgatgatgcctgccagtccagcaaacgtcaatcctgacaatgtttcatgtgtcagttcctgttgtgacgtaactgtcttataagcgaaacctaatacccgttgtcctttttgcgctaattgcgcagcttgtgcttgccaagcacctttttgattatcagataacgtagaaagttgtaacaatacttctggcgcacctttgacataaataattgaaccttctgcttgcggatggcgagtggccatgtatttataacttgaactaaacggaattttcttttctacagggcgtaaagacagttgatcctgatcaacatattgtagcaaagataactcggtaggattcccctgcaagtcggcgattttttgttggtcttgtaatttcaattcttgacagttggccataatctctttgacaatggtcatttcttcagtcactacatccattaccgtcatttcatttttagttagcgttcctgttttatctgaacagataactgtcattgagcctaatgtttcaacggaaggcatgcctttaataatcgcattttctctagccatctcatgaacacccatcgataaaatcatcgttaacacagcaggtaagccttctggaatcattgctacaattaatgcaatcatcgcagaaaataagaggctccattccatgccatgacgaaaagtggtaaagaaaatcagaaacacgatcaagaccataatcccttggaaaatttgcttgtttaattggtgcattttccgcacgagcggcgttgttttttgatctactgactgcaacgcgtgattaatttttccaacttcagtggaatctcctgtttctactacaacgcccaaggctgagcccgcttggacaagagttcctgaaaaagccaaattcttttgatcgcctgttggcaattcctcattcaaggaaccggtaattttctccacggcttctgattcgcctgtcaaaattgattcttcaatcatcagattatgaacatcaaataagcgcaaatctgctggaactacatcgccagcttgtaacgtgactacatctcccagaaccaatgtttcagaagaaacggttgttttttgtccatcaattagaacgactgcctcttggcccatcatctgttttaatccgtctaatgattcttctgctttacgctcttgccaataaccgacaaagccattgacaagcaccactagaaaaatgatacttccttcgaccacttcgcctgtggcaaattttagaattgcggcagcgagtaagaccaccattagtaaatctgtaaaatgtttggctagcttttgccacgttttcagttgttgtttttcttcaattttatttggaccattcgtttgtaaacgttgctgacgttcttcgctagaaagacccgtttgcttcgtcttagtctgctcgattacttttgttgaggaaagttgataccatttcatttcgtgtacctcctatttacttgatacctttattatagagaggattttcttcacaaaatggtcgataatttcagtggcccctgaaaaaaatggggccaagattattaaagaaaggaacaacccgcattttagcgggttgttcctttcttttaaatattttcttgttcgaccaccaattgacttttgccaattaacgctttaacatcaataatttcaccatttttacgtcggtctgctaactcaactgaggtggtaaacaacaagtcactagaagagttcaacgctgtttcaatggaatcttggactacgccgacgataaagccaacgccgacgacttgcatggcaatgtcattggaaatgccaaacaaactacatgcaagcggaattaacaacaaggaaccaccagcaattcctgaagccccacaagcagaaacagcagcgatgatgctcaacaataatgctaaatagattggtacggacatgcctaatgtgtggactgccgccaatgtcataatagtaatcgtanatgctgcgccgcccatattaatcgttgcgcctagcggaatagagaccgcataagattcttcatttaaatccattgctttcgccaattccatattaatgggaatattggccgcagaactgcgtgtaaagaatgcgggaatcgcactttcctttaatacaaaaaagactaacggatacggattttgccgaatattccaaaaaacaatcgctggataaacgactaaagcaaccacggccatcgtaccaattaacaataatagtaactgaccatacttggctaaccctgcaatgcctgttgttgccaccgaatgaaacaccaaacctagaattccaattggcgcaatgccgataatcatttgaacgaccgtggtaatccctgttgaaagattggcaatcacatccttggtagcgaccgaactttggcgtaacccaataccgattaatgaggaccaaaataaaacagataaataattgccttcaatcatcgcttgaatcggattttggacaacgcttgttaacacattgcttaaaacatcactaagttgcgttggggctgcttgcgcttcctgcgccgcctccaagacaatcttaacgggaaacagatagcttgccgtcacggcaacaacagctgccaaaaatgtcgctaacagatacacaactaaaattgatccaacatatgttttcgccccagccttttgttgggctagcgacgcaataattaagacaaaaactaaaatcggcgcaattgcttttaaggcgcccacaaacaattcaccaagaacgctgatgaaggtccattctggcaccaagaaacccaaggtggttccaatcacaatccctatcatgattttttgaattaacgataatttccgaatcgctttgaccattcacttcacgctccttta

SEQ ID NO: 364 - DNA, 9509 bp; double-stranded, linear
ctgaattggttattgtttcgattttagaagagaaagagattaatgttaccaatcgttagataaaanttattggcaagaacagttggcgaaattagagaaacanacggaaaaatatcaacaagaagcgttagcgaatggcatcgataaagtaagtgtaattgtcaatgaagggaacccaggagaattaattattaataagcttattcctttgaataaaccagatttgttaattattggctccaagtcaactagcaaattaaaaagcttttttggtagccaagcagcttatatggctcgatatgcaccaatttctgtaatgattattcgctaacaaaattgaaacagttaaaaaagccgccacgatttactattcgtggtggcctttttatagtaatttttgtttatataaataaacagccaaacttagttgtagcgaactatcaggaaattctaaagttaagtgaagaatctcttctattttttttaagcggtaaataattgtattacgatgtacatacatatttgtggcagtcaacgaaatatttttattcgattgaaagtaggtgttgatggtttctagtagggaactttcatgtttttgatcttctttttctaatggttcaatcaatcgttgatatattttttgtttggcttgtttggtcagggtttcgatcattaaacgataaaaaaagaggtcgtcataattcaaaatagttcgttgttgtaattcttgacttgcttgtgctaagtggaatgtttcttgtgctaatttataagaatcacacagattggtgatttttttgacagttggcccaatcgctaatttaaatgataattttggattcagtttcattagttgctctagtaaattcttggcaagatgagtggtttgtgcaaggtaggtggcttcctcttgcgctggattttctagtaataaaataaagccagtttgtgtaggaaaggcagtaattttttgtcgatatccttctaaaatatgattcaattgatggccaatgctattcatttgaatagtcggattaaacagttgttccaattgttcaatggctacaagcaagagactaaatgtatctttttcatttaattgcagataattactaaattcttgccaagcttgaggattggtatttttttcttggataaggtcttgaaacagcgccccgatcttttgcctcgttgttaaattttccgaagattctaattgaagttgtggtaaaaggtagtgagcacagacctccacagataataaatcaatcgtctgtaattttttggtagtttgccaaatcactaagtaagataagctgagatttttctttttgatgggtaaaattcgcaaagataactgatggttcgctaaggaaaattcaacagtcaatggttctttataaaataataggagctcattgttctgggcttttaaagctgtctcaaactgttttttgagagtcgcgttatttaaaatactggtgattcttgttggcgcatcaggtaaatcaaaatgattcataatctgaaaacgctcgtctaaaagcattacaggcgcttgaatcgcggcacttaatacttccagtaattgggtactttttccgccagctttgataattgtataaaatttattatgcatatgaacagaatgttggctaatcgtttcgtcaggttgattgactcggcgattgaccaatgaaataatttgagaaaagttgtaattataagggattgagagaattggtaatccgacgtcattcgctaattggatcatctcttgtggaacttcattgaaataacgttggactttaaagcctagagcagcgcagttcatatttgctagttcttgaataagacgtttttgcaagcaaggctgatctttgaaaatatagccggtagttaataaaatttctcctggcgttaaccagtcaaaagcatcaggattttctaaaatatttgcttgtagaattggcgcatctaaattggtctcgtgcgtcaataaggttaaaccaggtagttcttctgcatggagtagatcattgaccgtcatcattagcaaggcctccttttgtatgaattatctaaaaattaagtgtatttattgtaagatgttacaaaactattttagggaaaataaggtatccttatactaatagaaaaaagttccaagtcatcacgtgattggtagtcacaagtgaccaaataagaacaatcagcgcttacaacctatagaaacgcatcgtttaaagatatagcaatagtatacttaatttttaatgcttttactattgtttcagctactttaaatttctcaagtatttctataatctgtaagttttttgagactcttatcagatatgcttctttttctatattttatcagaaaattctggtaactttgaaggttatagtttgtaaaatggagggatcggtatgaagaaattaaaaatgttaggatgcgtcgggttgcttttagctttaacggcttgtcaggcgggaacgggaaactcggctgatagtaacaaagcagcggaacaaaaaattgcaattagttctgaagcggctatttcgacaatggaaccacacacagcgggggatacgacctcgactttagtcatgaatcaagtttatgaaggactctatgttttaggtaaagaagatgaattagagttgggggtcgctgccgaagaaccagcgatttctgaagatgaaaccgtttatacatttaagattagagaagatgccaaatggtcgaatgatgatccagtaacagcaaacgactttgtttatgcatggcaacaagttgcttcccctaaatcaggatcgattcatcaagctttattttttgatgtcattaaaaatgctaaggaaattgctttagaaggcgcagatgtgaatactcttggggttaaggcgctagatgataaaacgttagaaataactttagaacggcccaccccttatttgaaatcattactttcgtttcctgttttgtttccacaaaatgaaaaatatatcaaagaacaaggggataaatatgctactgatgcagaacatttgatttataatggtccttttaaattgaaagaatgggataatgcctcttctgatgactggacctacgaaaaaaatgatacgtattgggatgctgaaaaagttaaattaacagaagcgaaagtttcagtaattaagagcccaacgacagcggtgaatttgtttgactcgaatgaattggatgtagtgaataagctaagtggtgaatttattcctggttatgttgataatccagcctttctttcaattcctcaattcgtcacatactttttaaaaatgaacagcgttcgtgatggaaaagaaaatccggctttagcgaacaacaatattcgtaaagcgttggcacaagcttttgataaagaaagttttgtaaaagaagtcttgcaagatcaatcaacggctacagatcaagtaattccgccgggacaaacgattgcgccagatggaacagatttcacaaaactagctgctaagaaaaataactacttaacctacgatacagcgaaagcaaaagaattctgggaaaaagggaaaaaagaaattgggctggataaaatcaaattagaatttttaacagatgatacagacagcgccaaaaaagctgctgagtttttccaatttcaattggaagaaaatctagatggattagaagtgaatgttactcaagttccttttactattcgtgttgatcgtgatcaaacgagagactatgatttagaattatctggttggggaaccgattatcgtgatccattaacagttatgcgcatctttacttcggatagtaccttgggcggcgtaacgttcaagagtgatacgtatgatcaattaattcaagaaactagaacaacacatgcggctgatcaagaggctcgtttaaatgactttgctcaagcacaagatattttggtgaatcaggaaacggttttagcaccaatctacaatcgaagcatttctgtattagctaatcaaaaaatcaaggatctgtattggcattcatttggacccacgtacagtttaaaatgggcttatgttaactaattgaatgaaggtaggaaggggtttgtcatgcttttagaaaactgtaaattagaaacaggattttctactgtgaatcagcgaattgttgcgacagaaacagctagctatgatattcgaattgaaaacgaggtctgtactgcggtcgcaccgcagttaaggcctttagagaacgaaacagttatcgatgtgaatcagcaactcgttttacctgcgctaagagaaatgcatattcatattgataaaacgtattttgggggaccttggaaggcatgtcgtccactaacgaaaggaattttaacacgtattgaagaagaaacttggctgttacctgaacaattaccaactagtttagaacgtgcttgccaagttattgagcagtatattcaacaaggccattatcatattcgcagtcattgtaatgtagatccatctattggaacgaaacatattgaaattactaaagaagcatttagtcgatatgaacaatacattactcatgaaattgtggcttttcctcaacacggattactccgctcacaagtcgaacctttgatgcgcgaagcnttacgcatgggggcaactcatgtcggcggcgttgatccagcccttgtggatcgtcatgtggatcattcaatcgcaaaaatatttgaattagctaccacatttaataaaaaaattgatgttcatttacacgcccgtgatactttgggactttatgaatttaataaatttgttgattatacagaacaagcaaagatgtttggcaaagtcactttaagtcatgctttagccttagggagcttagaagaagcagcaattagagacattgcgcaaaaattcatcgaaacaggtattgatttgacttcgactgtaccaattggaatgcccaccatgccgattccaaccttggttgaacaaggtgttaagatctccgtggctcatgacagtttgacggatcattggtcgccttttggcagtggcaatacaatagaaaaattaaatacagccgctcaaagatttaaaattagcgatgagtatcgcttgaatcgtttatggggcttagcgagtaattttgtaacgcctcttgatcctaacgggcagcaagtttggcctaacgtcggcgattctgcagatttcctactatttaatgctgagagcactgctcacgtgattgcacgccaacagccaatccaacaactgatactaaaaggacaactggttgaagccgttcaaaagggggaaaaagaatgacagcatccattgtttatttgaataatgttcgtttagaaactggttttgctaaagaccaccacgaattaacgtatactaaaaccgcacgctatactttagcgattcaagaaggcaaaatccaagcgattattccgcaaaatcaagtcactgaaaagcaacaaggcactgatttaaacggacaactggctattcccgcttttcaagagagtcataatcacttagataaaacctacctttcattaggctggcgtgctagccaacctgttaaaaatttaaaagagcgtttagcagacgaagccagtgaacttaaattgttagctccgtcaacagaacaacgagcgacggccatgattgaaaaattgattgggtatggagcctcttatattcggacacatgtcaacattgatccttatgtagaactagaaaacttctggggcgtcaaaagagccttagaaaaatatgcgcatgtgattgattatgatattgttgtctttccacagcatggattattaaaaaatccccaaacggttttactcatgagagaagctctaaaaaatggtggaacaatggttggtggtttagatcctgcaggcattgattatgcaattgaagaatctttagaaactattttcgatctggcagaagaatttcaagtaggaatcgatatccacttgcatgatacgggggaagtgggcgtttatacaattgataaatttttagacattttagaagaacgaaaatttactcagcgaaccgctatcagtcacgcctttgcgctgctagatgtacgaccagcagaaaaagaaaaactataccaacgcttggcaacgcatcaaacggcgattatgtctacaattccctatgatcctcgttatttattgccaccaattgatgtgttacgccaagctggtgtatcggttcatttaggtagtgatggcttttttgactcttggagttctaatgtttcaggtgatttatttgaaaaattacgtaatttttgtgaaatgacaggaaagattacagaagagcaacttactcaagcttacgtccatggctgtggcaaagtagcacctttttcatttgaagaagaacgcctttggtttacagaaggcgacgaagcaaactttatttttacagaagcagcttctacagcagaagtgattgctagaaaaccacagaaacgccagattatgttgaaaggacaatgggtttaacttgctttaaaattaggtagaaatagaatgctaaaaagccaaacagaggaaacaaggttcagctctgagcaacgcatagtgtcagtctagcggttactcgtcacagtttaatccttataaagtgcttctgctcacaacgtgtatcagcgtttcaagtttgtttgactcactttaacatagcacttttgcgtatcttcctttataataagacaaaatgaaggagatgaaccaagcatgactgaacaaacgagagaaaacaaaaaagcagcctacgaattgtgcttacaacaattgagcggtttgttagaaatagaaacggatgctattgcaaatttagcaaactcgtccgcgttacttgcacaaacattaccagacaccgtttttgctgggtattatttatataaagatgaagaattagttttggggccttttcaagggaaagtctcttgtaccagaattaaaatgggcaaaggtgtctgtggtgagtccgcggaaaaacaagctacattgattgttgataacgtgaagacacacgccaattatatttcttgtgactcagctgcgatgtctgaaatcgttgtaccgatggtaaaaaatcatcaattggtcggtgttttagatattgatagtggtgtaacaaatagctatgatgcggttgaccaactgtatttggaaaaatttgttaccttgttactagaaaaatcagatttttaagcagactatttttgctttctgacaaatcatgagaaaataaagtataaaatttgatcatgaaagaaggtgagtcatttgttagagctgtatataaattttaaaggtgaagcaaaagaagcaattgcgttctatgaagatgtttttgatacaaaatgtcaaaatttaatgacttttggcgaagcacctgaagatcctgagcatcctataaacgacgagataaaggatttagtgatgaacgcaagtatcattattgaaggaacctatgtaatgatttcagatgttcctgatatgtttggttttgaagttacggaaggaaataacctttcgctcgtggttagcacagatgatgatgaaaaaattgatcgcttatttaagcgattatctgaaggtggcactgttacaatgccgtttctgaaactttttggtccaaaaagtatggttccctaaaagatcagtttggcatccattggatgtttaattattatgaagaagattaaaaaaatccccaatccgttattttcattggattggggattttttattcatgaaagaattgcttcttagcgatttgatactgccgttgcttttctgtccaaaattgctgatcgttttcatcaattttgcgaatgacttttgctggaktacccccaacaatcgtgttggcaggaacgtcttttgtaaccacagcaccagcagcaacaatagcattttttccaattgtaacgccaggtaaaatggtggcacttccgccaatccacacgttatcttcaacaataattggcgtaccgaattctaattctgcagttcgaatcgttggatcaattggatggccggcagtataaaaactagcacgagggccaaccatgacattatcaccgaagatgattttgtttacatctaaaaaaatgcaatccatatttgcataaaaattttctcctacctcaatatggcgaccgtaatctacatggaggggtggggtgatatataactcattgccagtttttcctaataattctttttctagggccacaatttctttcacattatcgataggaagttgattgattttttgagctaacaccttgccttttgttgatttgttttcgggtaaaatggtgggggcgtaatataattcaccttttaacatttgcatataatcaaagtcattttgtttcatgtaagcgctcctttaggctttttctctattgtatcaaatcaatacaataagtcgaggaatatgtaaaataaaaaaggacagatagcaaaatagccttgcttatctatcctttatctaaggttatccaatttttttaactctcccgccaattttatctgctaatttttgtgcttctttttcagagtggtaaactaaacaacctgatttatctcgcgtacgtttaccatctgcagttaaatagccatgaaaaaatttgattgcatacatagacatcaccgcctttctaattgaaaatagtgtaaatggagcgattaaaaatgtcaaataatagaagtgctcttaaccattcttatcttttttagttcgaagataagcttggttaagagcaccatttcacttaataaattagtttgaaacgggtcgttgagtgaaattcctgttcaggtgagagggtgatagaaccgaacaacggaaatctttcagcaccaggacagacttgggtttcaaatgtgagcgctccgtgattgactaatttttgcccttgaatatcgggaccgttatcagcaaaatttgctgaaaaaataacaactgaaggttgatcagtgaacatctctaaggtgatatctttagtaggactttttaagataacatccgggttaattaaatcatgattggttaagatgaaagggtgatcgaagccgttcatcttttggatttgttcatcgttacttgaaaaaacctcagctaattttttaggtttttgtaaatcaaaagctgtctggtcgacggaagctaattctccaagcggtaaaactctttcatcaagcgggacaaacttttgggcatttatttgtaactcatgcgcatcaatggggattgtaggatttccagttaaattaaagtagacatggattggttggattaaaaagtgtttgttcatctgtagttgcctggatactcaatttgccattcattttcttcagtcaatgtatacgtgactgaaacagtgagattccaggaaaaccattttcaccagcaggactctctagccaaaa

SEQ ID NO: 365 - DNA, 5247 bp; double-stranded, linear
ccattcctaaaaaaaattcaaaatctttcagagaagctgttaaaggaatttttaagttcacagatattaacttagcgcgtgaggctaaaaatcgattgattcatgattatatcgatcaaccaaaatattcaaaagcttgcgcatcattggatgatggattcgaagacgcctttcaatataccgtacaaggaaattcccacaatcgactaaagagtaccaatctaattgaacgactgaatcaagaagtacgcagaagagaaaagattattcgcatcttccccaatcaaacatcagccaatcgcttaattggagccgttcttatggacctacatgatgaatggatttattcttcaagaaaatacatcaattttgataagtagaaatggtaaaaacattgtatagcattttacacaggagtctggacttgactcggaagtccaaaccaaaaacaaactaattattaaccaacctgagcaaactgaaaaaccaatgaaagatgttgctaaattgctgaaaattttaccgccaacatttaacgaaacagtgctccttccagtccaaacacagttaaaagaacactatccgcgaacggtttccctcgtgaaaaacttagtcagtccgctgccagaagaataccgtttcttgacagaggtactcttatctgtattactcagcggagaaatttctgaaacgattccttaccaagcgctcctcgtggcgcatggtgaatcgactgccacaagtattcaagccgttgccaacaaattatgtggtacctatattttcgatgcgattaacatgcccttaacctcctccgtccgagatatcgtcgccgaagttaaagagtggctttctcagcgggacacatcacaaggcgtcattatgctcgtcgatatgggttctctgacacaactttataaaagtttgaaaccgcaaattcttggagaacttttggtgatcaataacctgaccactgcctatgcgttggaaattggtcatcaattaatgaacgaacaacttttctatggtattgctaaaaccgctgaaaaaaaatttaaaaccgatgtacagtactttgaaggcttttcagtagaaaaaaatatcattgtctctagtatttcaggtctggatattgccaagcaaatcaaacaaatctgtcaaaaatacctgtatactgacattaaagtcattactctaaaatacaaagatttggtaaacacgttagacattgccaacgccgaagaaaattatttaaaagaaacctcgctcattttgacgacgtcttacttagacaaccatacgaatgttgctagcgtgaatctcttagacatgttagacgaagatgcaggaacccagttgatggaacctttccaaaacttgatgcatcccaataacattgatagcatgattaacgaatttgttcacttcttctcgaaagaaggcttgtcagaaaaactagaatttctaaatcctgacgtcattattaaacaagtcgaaaacgttacaaaaaacattgaaaaacgcttcgacctcacactcagcggcaaaatgaaatttaacttaatgatgcacaacgcgctcatggtagagcgaaccatgctcggcgttgaagactatgaaatccctgctaacctcgaggaactaaccattaaccaaaaaccatttttccaaaatgctaaaaacattttctatactctagaacagttttatcgaatagagatttccaactgggaactctatgtgatttatgaaattttgtcttctcggtgagggggatgggaaaagccactttccagaggaaagtggcttttttagtttgtgttctgcgttaaaaattcatacatattaggttctacaggtgtttctaaggtaaagtctagtttaacgacgctttttttcttaccctctttgtcttgtttttcgacttgttggatagttycttgaagaggggctacttcgcctagataatagaaatctgtttcgttctctttttgattatatttccgtttcacaaataaatgaaatttatattccccaggattccgcaaaagttgaacttctggcgagcgtagatttctaggcgcttttgtataccaatggaatgttcgttcatcaataaattcatcctcataagcaatacgtgcagctttaaaatctttgcctttatccaaagttacaaaaatagcaaaatgattattactgtttgtatagccaccaatactttgttcattttgattaaagttcatatttaataatcgtaaaacatctttacgacgatattttttgtataaatttaacggttgggataaatcatactccatagatttgttaatccctgtatggattacatctaacatcaaattgatgaaataagaattctttttaaactctctgaatttttctgttatttgtaaacaattttctttcatcttaaacatttgtgataacaaataacgttttctaattgttgattcgtaaaaagataaatcyaagactttaacaacagatgctagagtatctgtcgtatacgtcaggttaaacgtatcaaacagcgctgtgatttcctctaaagataactgttctttatctgtcattaaaaattcttcaataacataaagttcatgcgggcgaattcctgatagcaattctacagaaacaaattttagtgcaccgttttcttcttcacttaatttagcttctgtttccccaattctctccaagaaattatagtatgttttttctttacctataatcaacaatggatccacgccatctaacacttgaaaatcattcaggtaaggaaccctattcaaccgatttttcaacttaaaataactagcttttagttccgacatcgcatctaatttagcttgatcaattgatttaaagatacgttcacgagcaactttttcaaaattaattgaagataaaccactgatatacgtcacatcaattgtatcgcgacgtaaactattcttagtttgagaactatctccagataaagccataggaatcatatagttatttttataattaccaataaaatcaattaccgtaacaaattcttttgatgggtcttttcttagcccccgacctaattgctgaataaaaataatactagattgcgtatttcgcagcataattacttgatttactttagggatatcaatgccttcattaaaaatatcaaccgtgaatatataatgaatctctccagtatctaaacgcttaatttccttttctcttttatcaaaattatggtcaccagataaataagcactcggaattccacgatcgttaaacatctctgctaactgccttgcttcgtctttacgactacaaaacaccaagcctcgaggactatctcccgaataaccataatagttaattttttttattaaaaaatcaactcgttctttctgtagcaaacgttttaaatcggttgtttcatcaatgatttcaccatctttttcataatcagttacgccaaaataataaaatggacaaagcagttctgcctctaaagcggcttgcaaacgtatttcatacgctacattataatcaaatagctcaaagatattaaaattatctgttctttcaggtgtagccgtcattcccaataaaaacttgggattgaaaaattcaatggctttaatataagatttcgctccagctttatggacttcatcaatcaaaatatagtcaaacgcttcttttcctaaacgctcttgatattcacttttagatactgtttgaattgttccaaatagatattttgcatcaaaattcttagaattccctgataaaacaccataatcatcatcttttccacctaaaatcaatttgaatgattctaatgctttcattaaaattagctcactatgaacaataaataatacacgtttaggatggaattgctgcacatcaaakgctgctagatacgttttccctgtaccagtcgccgaaacaatcattcccttagttgcgcccgtttctctaagcgcttttaaacttctaagcgcttctttctgcatagagttcggcaaaatatattgcgtatctaaacactcgttttcagaaacatcttgcactaacatctttctattaacaataggatgataatttttttcaaatgcatcgacccattctagggttagcgactgtgcctcatgccattcttgaatgagatgcttttgaatagaagaaaccatctcgccattctctcttgaagttaatctaacattccactcatagttaagtttcaaagcagacattgttaggttcgaactaccaataacaaagctttgataatcctccatctcaaacaaatatccttttgaatgaaaaccttcttttttagaaactcgtacttctacatttggaatattcaacaatgctcgaaatacgtgtggatcattaaaatttaagtatgttgatgttaagatttttccagagattccacgcaaagccagatcagccagttgtgtttttattgcatttaagccactaggtgttataaatgcaacggctataaaaaaagtcttacagcttttcaaatctttactcaatgtattcaataaataatcatgttttttgggattgttaacaataaatttaggtgtaagttcgtcacctagagtttccttattaataaatgccttttgtaacgccaattctaaattatccattttgttcagttcccacacctttttctactaatttwtccacagtaggaatatcagcaggcgcccactcaagttggtttaattcatttggcgttagcatttaatttgtagatgttctgtcaactgaggttcacctgattctaaataacagataaatgtagttaaattaacgaaaccaaaatcatactcatatcgacaaaaagcatactcttccttgacgatcgttacttctatttttaattcttcttgcaattcacgttcaagcgcttgaacttccgtctcaccattctcgatttttccaccaggaaattcccaaagatttgctaatgcacgttcaggtcctctttgacaacacaaaactttccccttctccactatgattgctcctactacgcgaatttcttttttcatatattttaaccctctaatctaattgattttgttagtttwattatatttaggatcgcataaataagctagggttgcaatatwagtggcgkaaatttcatttattatatttgttttttgatttactatactttaattatttaataactcttca

SEQ ID NO: 366 - DNA, 1657 bp; double-stranded, linear
ggactttctcctcctgagtatttgactatacttacagtcaatggtcggaagatcgggtcagtacccctttggaaatmatttargtaccattatttagcacctttccctgacttagaagaagtgattattcgcttagatgaatttgatcaggttttgttcgccaatcgcacagctacaaatggaaaaaaaatggatatgtcatcaattaaaaaacatggctttcaactaatgcgaattatctccgatccttatacaggacaaccactgggagaattgtacactgtgttttcaagtcaagaattgctaggcaaccaagcagacttattgaaaaaatcaggtattaatgcgtttatctatgatagtgctgggaatcaaattttttctgaaaaagcgcaatttaccaaagaagaagagcggcaactagataaaagaatgcacaccgatagtgacattcaacaggtttttcataatcgctacgatattacggaaatagaaagcagtggccggagtaccattctcttattaacaagccgccgagtcttatttcaacaattgtttatgaattatgcggccattttagggattgggttacttttgattgttattttattagtgggcttaaaccgcctatttaaacgctattctcaacaagtccaattaattttagaagcgacacgagccattggcgatggcaatttaaaagaacgaattgacacgaatcaagttcaggaagagttgaatgatattgcttccgcaattaattttatggtagacagtttagatcaatacattcacgatatttatactttagaaattaagcaacgtgatgcccacatgagagcgttacagtcgcaaattaatcctcattttctttataatacattggaatatattcgcatgtatgccttgagtcggcaacaagaagaactagctgatgttgtctatgctttttcaacgttacttaggaataatattaaccaagaaaaaaccacgaccttggcagaggaaatctcattttgcgaaaagtatgtgtatttgtatcaaatgcgttatcccgatcaatttgcctataagttcgaaatagaagaaacaattgctgatgttgaaattcctaagttcatcattcagccgctcgtcgaaaattattttgtgcatggtattgactatcaacgacaagacaatgctatcaaggtccacgcctaccgagaaggcgaaaaaattattgtggctgttgtggataatggaaaaggaatcaccgccaatcggttagaggaaattcgcgaacgtttaaatcaaacagaaatagacacggaacaatccattgggttaagaaatgttcatgaacgtttacaacgcttttttggggagagttatggtttaaccattgaagggaaagaaggagaagggacgacaattcgtctttcgtttgtagcataaggggtgaaaagatgtatcgagtgatgtttgttgatgatgaatatatgattttagaaggcttaaaatggattattccttggcaagagttaggctttgaaattgttaaaacagcgcgtagtgcgcaagaagcattggcttttttaggaaacagaatccattgatgttttattaacagatattacgatgccagaaatgagcgggatcgaattaatgagcagca

SEQ ID NO: 367 - DNA, 14557 bp; double-stranded, linear
gctagactcggagtcgcctccaacatcataacactctaaaagaaacatctataaagtgatcggtttattaattatttaacaaattcgataactaccattggtgctgcatcgccgcgtcttggttctgtcttcaagatacgagtgtaaccaccttggcgttccgcgaaacgaggtcctaaatcgttaaatagcttttgtaaagctgattcaacaacgatagactcatcttcttcacgaacactagcaacttcattacgaacgaaagtagctgcttgacgacgtgcatgaagatctccacgtttacctaaagtaatcattttttctacagttgaacgtacttctttcgcacgagcttcagtagttacgatgcgttcgttgatgattaaatcagttgtaatatcacgtagcatagctttacgttggcttgatgtgcgtcctaatttacggtaactcacgttgggttccctccttcgtttctgttctcacgagccactgctgttaagcaggactggaaacttcgtaaaagtcttaatcgtccttacgtaatcctaaccctagatcatgcaatttaagttttacttcttcaagagatttacgacctaaattacgtactttgatcatttctggttcagatttgtttgtaagttcttgtacagtattaatgcctgcacgttttaaacagttatatgaacgaactgataaatcaagttcttcaatcgtcatttctagcattttctctttttgagtttcttctttttccaccatgatttcagcgtttttcgcttcgtcagtaaggtttacaaagatatctaaatgctcagtcatgattttcgcagctaaacttagtgcttcttgaggaatgattgaaccatctgtccatatttccattgttaatttgtcgaaatcatcacgacgaccaacacgtgtattttctacttggtagttaacacgaagaacgggtgtgtagatggaatcaactggaagtacaccgattggcatatcttcttttttgtwttcgtctgcttgaacatagccacgaccaggtttcactgttaagcgagcatggaaagtagctccttcagcaacactacagataactaaatctttatttaggatctcaacatcactgkccacgataatatcgccggcagtcmcggkagcgggtcctgtaawatcgatctcaagggtttctcytcytcmgcatawaattcmatgctagccttaatattcaaaataatttgtgttacgtcttctcgtacacctggaatggttgagaattcgtgtaaaacaccatcgatttgaatattcgtaattgcagctcctggtaaagmagacaataaaatacgmcgtagagagttacctaaagtagttccgtaaccgcgttctaatggttcaacgacgaacttaccataatctctattytcatcaattttttcgattcttggtttttcaaattcaatcattcttatctatacccctttcaaaacgaaaagtgtcttgttcaatgacgttcctaattcaaactcagaatgagtggcgctcattaaacacgacggcgttttggagggcggcatccattatgaggaactggagtcacgtcacgaattgcagtcacttctaaacctgttgcttgtaatgaacgaattgctgcttcacgtccagaaccaggtcctttaactgttacgtctacagttttaagtccatgttccattgccactttagttgcggcttctgcagccatttgagcggcaaaaggagttgattttttgcttcctttaaagcctaatgatcctgctgatgaccatgctaatgcattaccatgtgtatcagtaatcattacgattgtattgtkgaatgtagaatggatatgtgctacacctgattctatattctttttgacacggcgtttacgactaactttttttgctgccatgaagttctaacctccttcacttaggaattattttttcttgcctgctactgttttagtagggcctttacgagtacgtgcattatttttcgtgttttgtccacgagttggtaatccacgacggtgacggattccacggtatgaaccgatttccatcaagcgtttgatgtttaagttcacttcacgacgaagatccccttcaacttttaacttatcaatttccgcacgaatcgcatctgtttgttcgtttgttaaatcacgtacacgaacatcttcagatacgccaacgtttgctaaaacttttttagctgtagtgttaccaataccataaatgtaagtaagagaaactactacacgtttgtcacgagggatgtctactcctgcaatacgagccattattcgttacacctcctaattatccttgacgttgtttatgttttggatttgctgggcaaataaccataacacgtcctttacggcgaattactttacaatgttcacacattggttttactgatggtcttactttcatgataatacctcctgtggttttacggagtacaattatttaaagcgataagtaatacggccacgcgttaaatcatacggtgataattcaactgttactttgtcaccaggtaagatacggatgtagtgcatacggattttacctgaaacagtagcaagaacttggtgtccattttctagttcgactttaaacattgcattcggcaaagtttcgacgactgtaccttcgacttcaatcatatcttcttttgccacgcacagtacctccttgtacttgtttcgcgttttcacacgataaaacggcggaaactccagctcccacctagaaattctcaactaacttcgttattcattttgatgtcacaaaactgtagaagtcggactgatatattctaccatatttagttatgttttggcaagagaaactgaatacaacaacagggttaaactgcgggcaattggaaattagttttcgtcaatgatttttttcacatcagaaaaaacagtatcgatttcgcgattgccatcgattgtatgcatcaagccttgttctttatagaaagctaagattggtgcgctactttcaatgttgactgccaaacgatttttaaccgtttcgggcttatcatcttctctttggtagaattcatgtccgccacagcgatcacaagtgccttcaacttttggcgggttgaataatttatgatacgttgcgccacatgtgcgacagatgaatcgtccagctaaacgctcgattaatacatcttcttctacatggatgtcaatgacagcatcaatttttttgtttaattctttaagcattgtatctaatgcttttgcttgatccagtgtacgtgggaaaccatctaataggaatcctttgtctgtatctggttcagcaaggcgttctttaacaattccgtttgttacttcgtcaggaaccagttcacctttatcgatataaganttcgcttctaggcccaaggcagtttcatttttcattgctgcacggaacatatctccagtagaaatatgtggatgccatacgtatcaatgattttttctgcttgggtgcctttacctgctccaggtaatcccattaaaatgaggttcatatattctcctcctaattttaaagaccggcttatgaagctagcmatatgtgagaatggtgctgaggtaaaacctcaacactcgattcttacttattgataaagccgacatattgacgtttcatcattaatccttctaattgtttcgttgtttctaatgcaaccccgataacgattagtaaacttgttccacctaaaccgattgattgaggtaagttccaaaccatttgcgcaatgattggaagtaaagcaacaagtcctaggaaaattgagccgacaacacttaatctcattaacacgccagatacatattcttctgtacctttacctggccgcacgcttggaatgtagcttccttgtttttgtaagttttccgctaatttctcagggtttacttgaacaaatgcatagaagaacgtaaacgcaacgattaggacagtatagatgattgcccctggaactgtgttataactgaagatttttgtcataatgtcataccaattttcaccagcgaattttgatgagaaagcttgtaaaatggcatttggtgttgcaattaacgagctggcaaagataactggaataaccccagcagcatttacttttaacggtaaataactacttgttggtgcaccagaaacacgttttgtatattggattggaatcttacgttctgcttgttggaagaacgttacgactgtaacaatcaccaaaatagcaataactaagattgcaatgaaaataacagattgccaaatacgagaagactcgatattgacgaagtaatcttcatagatttctttgactgctcctggcaaacgggaaataatcccggcaaagataatcattgaaacaccatttccgattcctttttctgtaatttgttcacccatccaagtcacaaacatcgtcccagcagttaaaataactgcaatcatcacaaaggtacctaaggttggattgttgacaatcccagtttgacttaagctattaaaaccagcagtgatccccattgactgagccacacccaagacaatcgttagatatcttgttgcttgatttaatttcttacgcccaacttccccttgttttgaccattctacaaatctaggtacaatatccatttgcaatagttgaataataatagaggctgtaatgtatggcgaaacccccatcgagaagatagagaagttttgcatggcactaccactcaccatattcaacatattcaaaaagggtaagctacttaaatcagacaatccctttgcattcaccccgggcacagtaatgtgcgcacctaggcgaaatacaaacaagattaaaactgtaaataagatttttgatctaatgtctttgactttaaaggcgttctttaatagcttgaacaattagatcacctcgattgaaccaccagcagcttcgatagcttcttgtgctgatttcgagaatttagctgctttcacagttaattttttcgttaactcaccatctgcaagaactttgattcccgctttttcgtttttaacgattcctgcttcttttaggacaacaggagttacttctgttccatcttcaaaacggtttaaagtatctaagtttacaacagcgtaatctttacgattaatgtttgtaaacccacgttttggtaaacgacggaataatggagtttgacccccttcaaatcctaaacgaacaccaccgcctgaacgggctttttgccctttttgtccacggccagctgttttaccattaccagatgaagtaccacgtccaacacggttacgtacttggcgtgagccctcagcaggttttaattcatgaagtttcataggtttggcacctccttaagcaatcttctattacaaatctataaatcttaaacttcttctacgtccactaaatgtgaaatagtgttaaccatacctttgattgcttcattggcaggttttgtaacagtactattcactttacctaaacctaacgctttaactgtagcacgttggttttgaggacgtccgataacactgcgttttaaagtaatttttaattcagccattatttttgtcctccttaaccgataatttcttctacagatttaccgcgaagtgctgccacttcttcggcacgttttaattgttttagaccttcaacagttgcgcgaacaacgttaataggtgtgtttgaacctagtgatttagatgtaatatctgctacaccagctaattccaatacggcacgaactggtccaccagcagctaccccagaaccttctactgcaggtttcataaggatacggccgccaccgaatacgccaattacttcgtgcgggatagtagaaccaaccataggcacttcaactaagtttttcttcgcgtcttcgattgctttacggatagcttcaggtacttcttgtgctttaccagtaccgaaaccaacgtgtccgtttttgtcaccgacaacaactaaagctgcgaaacgtaaacgacgtccacctttaacaacttttgttacacggttgatcgctacaacgcggtcttctaattccaaatgttttggatcaatataaaccatgaatggtgttcctccttctcctaaaattctagtccattttcacgagcagcttcagctaaagcttgcacgcggccatggtaaaggtatccaccacggtcgaagactacttttttgatgcctttttcagcggcacgttcagcaactagtttaccaacagctgcagctgtttctgtttttgttccacctgaaatttctttatccaaggcagaggcacttgctagcgtcacacccgctacgtcatcaatgacttgcgcgtagatgtttttgttagaacggaaaatgttcaagcgtgggcactcagcagtaccagagattttgttacgtacacgacgatgtctcttttgacgtgttttgtttttatctggttttgtaatcacaattttcacctctttgatttaatgtttactactaatatttcaagcagtcagcagattacggaaaagagaagctggcagacaagacaaaagcattttattggaaaaatcccataaaatgacagttgcttgttgttgacttctgttttctacacagctgttattatttaccagttttaccttctttacggcgtacaaattcaccaacatagcgaatccctttgcctttataaggttctggaggacgaacgccacggatgttagcagctaattcaccaacaacttctttgttgatgcctttaacgataacttgtgtgttcgcaggtacttcaaatgttacgccttctggtgctgtcatttcgacaggatgagaataaccaacgtttaaagttaatttgttgccttgtacttgggcacggtatccgaccccgataagttcaagtgctttttggaaaccttcagaaacaccaacaaccatgttgttgaagtttgcacgagttgttccgtggattgttttcatttcttttgaatcgtttggacgaatgaatgtcacttcgtttccttcgatgttcattttgatatcagaagaaaattcgcgtgttaattcacctttaggtcctttaactgtaatgttgtttccgtcttgcttgatttcaacaccagcaggaagaacaacaactttattaccaatacggctcacttagagacacctccttgtgtattttttagaattaccatacgtaggcgattacttcgccgccgatatttttcgctctagcttctttgtcagtaattacaccctctgatgtagagatgattgcaattcctagaccgtttaatacttttggtacttcgtcagcttttacgtatgcacgtaaacctggtttagaaatacgttttaagtttgtgataacacgttcttcgtttttaccatattttaggaaaacacggattacgccttgtttgtcatcttcgatgtattctacgtcgcggataaatccttcacgtttcaggatttctgcgatatcacgtttgatttttgaagcaggtacttctaaagtttcatgtttaaccatgttcgcattacgaatgcgagttagaaaatctgcaattggatctgtcatgaccattgaactatttacctcctttatgcgagtttacttgtttaccagctagctttcttcacgccgggaatttgacctttataggcaagttcgcggaagcaaatacggcaaagatgaaatttacgataaactgaatgtggacgtccacaacgttcacaacgagtataagcttgtgttgaatgtttagcaggacgtttgtttttagcaatcattgattttttagccacgtagttcgcctccttatattatttttggaatggcatacctaattgtgccaacaattcgcgagactcttcgtcagtgttcgctgttgtaacaattacgatgtccataccgcgtactttatctactaaatcataatcaacttctgggaagattaattgttctttaatacctaaagtatagttaccacgaccatcgaaagcttttttgctgacaccgtggaagtcacgtacacgaggtaaagaaactgttactaatttatctaaaaattcgtacattctttcgccgcgtagnnttactttcgcaccgattggcattccttcacgtaaacggaatccagcgatagattttttagcttttgtgataagtggtttttgaccagtgattaatgctaattcttcaacagctttgtctaagtttttagcatttgatactgcatcacccacacccatgttgataacgattttatcaactttaggtgtttgcataactgagctgtaattaaatttttccaccaatgatggtgttacttctttaatatatttttctttcaggcggttcattcagtaagccctccttccgcaatttttatttatctaaaacttcacctgtttttttagaaacgcggacttttttgccgtcgacttctttaaacgcaactttagtagcttctccgtttgaaggatcaatcaccattacattagaaacatgaattggcgcttccacttcaaggattccaccttgtggggctgcttggtttggtttttggtgttttttaacgacgttgacaccttcaacgataactttatcttgtttaggaaacgctgctaagacaacgccttctttgtttttatctttaccagtgataacttttactttatcgccttttttaacaaacattactgtttcgcacctcctttaacgtgggctcgagattataatacttctggtgctagagaaacgatcttcatgaagtkgttttcacgtaattcacgtgcaactggtccgaagawacgtgttccgcgtgggcttttatcgtcacggataattaccgcagcattttcatcaaatttgatgtaagaaccgtcagcacgacgagcgccagattttgtacgaacgataacggctttaactacttcaccttttttaacaaccccacctggcgttgcttgtttgacagtagcaacaataacgtcaccgatgttagcagttttacgaccagatccgcctaggactttgatcgttaaaatttcacgtgcgccagaattgtcagcgactcttaaacgactttcttgttggatcacgatgtgtatccccctttcagattttgtgcttcaatctattaggaaattctcgttttattagataataactgcttcttcgactacctctagtaaacggaaacgttttgtagctgataatggacgagtttccatgatttttacgatgtctccaactttcgctgtgttgttttcatcatgcgctttatattttttagaatatttcatacgtttgccatagatagggtggtttttctttgtttcaacgacaactgtgattgttttatccattttgtctgataccacgcgaccttggtaaactttacgttgatttctttcttcagtcatacgcgtttggcctccttccactattagttagcttgttcacgcaatactgttttgatgcgtgcaatcgattgacgtacttctttaatacgtgcagtgttttctaattgacctgttgctaattggaatcttaagttgaacaattcttcttttaattgtttttctttatctagcatttcggcagtggttaattctctgatttctttaaccttcattcgattcaccacccatttcctcacgttttacgatcttagtttttaccggcaatttgtgagatgcaagacgaagagcttcacgagctacttcttcaggaacgcctgcgatttcaaacatgattttaccacgtttaactggtgatacccagccttctggtgcccctttacctttacccatacgtacgccgatagctttacttgtgtaagacttgtgagggaaaattttaatccatactttcccgccacgtttcatgtaacgagtcattgcaatacgggctgcttcgatttgacggttagtaatccagtgagattcagttgcttgtaaaccccattcaccaaatgctacttcttttccgcctttagcttcaccgcgcatttttccgcggaattcacgacggtgttttacacgtttaggtactaacatgattatttccctcctttctcagtgttttttttcgttggaagaatttctccacgatagatccacactttaactcctagttttccgtaagtagtgtccgcttcttcccatgcgtaatcaatgtccgcacgtaatgtgtgaagtggtacagttccttcagagtatccttctgaacgagcgatatccgcaccgtttagacgacctgatacttgagttttgattcctttagcgccagcacgcattgcgcgttggatggcttgtttttgagcacgacggaaagcaacacggttttctaattgacgtgcaattccttcgcctactaattttgcatctaaatctggttttttgatttcaacgatgttgatgtgaactcgtttgccagttaatttgtttaattcttttcttaggttttcgacttcagatccgcctttaccgataaccatacctggtttagctgtgtgaattgaaatgttaacacggtttgcagcgcgttcgatttcaattgtagatacagcagcatcagcaagttttgttgcgataaatttacggattcttaaatcttcgtgtaagaattcggcatactctttttcagcataccatttcgcatcccagtcgcggatgatgcctacacgcattccaattggatgtactttttgacccactgattgtccctcctcttaaatgtttaagctctgttttcataaagaaaacagcctatttcatgagacttatttctctgttacaactactgtgatgtgactagtacgtttgttgattggtgaagctgaaccttttgcacgaggacggaaacgtttcattgttggtccttcgttaacaaatgcttcagatacgactaagctttcaacgtctaagtcaaagttgttttctgcgttagcaactgctgacattaaaactttttcaatgattccagcagacttgttcggtgtgaatttcaagattgaaattgcatccgcaacgcttttccctctgataagatcgattactaaacgtgctttacgaggtgaagtgcgaactgtttttgcagttgctttagctgatgtaatttgttctgacatttgcatatcctcccctcaaaattagcgtttagtttttttatcgtcagcaacgtggccacgataagttctagttggtgcaaattcacctaatttatgtcctaccatgtcttcttgaatgtaaacagggacatgtttccgtccatcatatacagcgattgtgaaacctacgaatgatggaaaaattgtagagcggcgagaccaagttttaattacttttttcttttcggcaccttgttgtgcttcgacctttttcatcaaatgatcatcgacgaaaggtcctttttttaaactacgacccatggtgaacctcctctcaaaatgtacgacacatggtcaaaaaaattatttagtacgacgacgaacgataagtttgtctgatttagcttttttattacgtgttttgtatccaattgctggttgaccccatggagatactggcgctttacgtccaattggtgttttaccttcaccaccaccgtgtgggtgatcgttagggttcattacgctaccacgaacagttgggcgtttacgcatccaacgagagcggccagctttaccaatgttgattaattcgtgttgttcgttaccaactgaaccgattgttgcacggcaagttgctaagatcatacgaacttcgccagagtttaagcggattaatacgtatttgccttctttaccaagtacttgcgcgcttgttccagctgaacggattaattgtccacctttaccaggtttcatttcaatgttgtggataactgtaccaactggaatgttttccaatggtaatgcgttacctactttaatatctgcttctggaccagatactaggcgcatgcctacttctaatccttttggtgctaagatgtatgccttaaccccgtcttcgtaatgaactaacgcgatgttagcagaacggtttggatcgtactcgatcgttttaacaaccgctgcgacgttatctttattacgtttgaagtcaatcacacggtattgacgtttgtgaccgccaccttggtgacgaaccgtaatgcgaccgttgttgttacgaccggcattgttttttaatggctgtaacaatgatttttctggtgttgaagttgtgatttcagcgaaatcagaactcgtcatgttacgacggccatttgtggtaggtttgtactttttaatcgccacgtcttatttccctcctacgttgatattgttcaggactgcttattcagcagcttcgaataattgaatttcttttgaatcttcagttaatgtaacgatcgctttgcgacgtttttttgtataacctgcatatttacccatgcgtttgaattttggacgcacgtttaagatgtttacgtttgctactttaacatcgaatgctgattcaacagcttgttttactaaagttttgtttgcgcgagtgtccacttcgaaagtatatttcttttcgtccatagctaacatggatttttcagtgatcactgggcgtttgattacgtctagtaattccattatgcaagcacctcctcaatttgagtaagagctgtttgtgttgccaagactttgttagctgacacaacatctaacacactaacgttatcagaagttactacagaaacgtttggtaagttacgagctgataaagctgcaaagtcgttaccattttctaaaacaactaatactttagtatcgatagacaagttagcaagaacttgtttgaattcttttgtttttggtgcatcgaagcttaaaccttctactgctaccaagttattttcagcaactttgtctgataatacagatttcattgctaagcgacgaacttttttaggaaatttgtagctgtatgaacgcggtgttggtccaaagactacgccacctccacgccattgtggtgaacggattgaaccttgacgagcacgaccagttcctttttgacgccatggtttgcggccaccgccacgaacagcgctacggtttttaactgcgtgtgttccttgtcttaatgaagcacgttgcatgatgattgcatcatagacaacactttcattaggttcgattccgaagatttcttcatttaaagtgatttcaccgttttgagttccatcttgtttgaataatgctacattcggcattccttagttcctcctttccctacacttatttagctttcacagctgatttgattgtgattaaagattttttcgctccaggaatgtttcctttgattaagataacatttctttctagtccatttaacaattcaaggttttgaattgtttacgcgktcgccacccatacggccggctagtcgtttatttttaaatacacggttaggcgctactggacccattgacccaggacgacggtgataacgagaaccatgagacataggtccgcggctttggccgtgacgtttgattgccccttggaatcctttacctttcgtagtacctgtaacatcaacaacgtctcctgcttggaaaacatctactttgatttctttacctacttcatattctcctagctcaacattcttgaattctttaatgaagcgcttaggagccgtgtttgcttttgcaacatgacctytcgcaggtttgtytgataaaacttcacgtttgtcttggtaaccaacttggatagcttcgtatccgtcagtttcaacagtttttacttgtaaaactacgtttggcgtagcttcaactactgttactggaattaattcaccagactcagtaaagatttgtgtcattcccacttttttccctaagattcctttggtcatgagtacacctccatcttaattttatagtttgatttcaatattaacaccagacggtaagtcaagcttcattagagcgtcaactgtttttggtgttgggttcacaatgtcaattagacgtttgtgagtacgcatttcgaattgttcgcgagaatctttgtatttatgagtcgcacgaataactgtgtaaagtgagcgttctgttggtaatggaatcggacctgatacgtcagctccagttctttttgctgtttccacaattttatccgctgattgatctaaaatacggtgttcatacgcttttaaacggatacgaattttttgttttgccatcttgttccctccttcgcctattttaaaagtagacatagctccacgaaaatttatccggcatgctcgttcatggcaaagcgtccgagcgtgtcgcaacctctcgcttcacagccggcaaatcaaatcgttgatctaccaangctttttacactcctgtaaacagcacctttttgattatactatgaaaggatagtgttagcaaggattttctgcgttttttgaaagaatttgncnngtttagaaaagcatt

SEQ ID NO: 368 - DNA, 1981 bp; double-stranded, linear
ccccccggagtgtaaaagtaactatgatgcatactttggataaaattcttccaaaataaamccgtkggcccatkgagacaaagcgctccaagaaactggctttattggctagatttatcgaaccatgaacgacataaactactttttaactgctgtttgtgcggtagaacatccagatattgccagcggcctaataattcttcttcagcttctaatccttgacgatccgtttgaatttgtttcaaagattcttgaatattctttaattccgtcaaatagctttgtaatgtttcttcatcaaaggtttgtyccaactcttctaaggtatagacttttctttttatctttaacccttttcctgaagagcgtgtcaaaaataaaagaagctcttgcaattgttgtagcatcgtttcatatttacgtagctgttcagttgactgttctgcttgtaaaaaagaatattgactctttaaggcttgttcttcttcaggcgaatgaaaaatccgttttacttcgacaatttgcaagccttgaatggcttgtagaattgctgcttctttttcggcagcggcaattattgtcattttttccattttactaactgccataaacgtctttcaccctctcaataattgaatcaatgacttgttctttgttcgcttcataacgttcgtgaagcgcttgttcagtgcgctttgtttcatctaaaagttgttctttttcaagttgtaacatcttttcttgcgttgctagtgaatccgtcagcactttttcaacagcttcttcactctcttgacgtagttcagctaaacgttcttgcttctgttcttcatataaacgacaattcatcttagcttgttgccgatgctcttccaccgcatcttccgctgccttgatttgctctagtacttcttgtaccattgtctccacctccttagtttttacacctttagcatataagaaaaaggactagcgaaatagagatacgctcagcccttttgttttaggtatgcaaaaaggcgcaaactcaaaaattgttcttctcaccccttgaagaactgaatccttgaagctttcgcccaaccattctttattcaatactctaccatcttagcaaagtttttcgcaaaattcaatacttacccaaatgaattaaaataacaaattttcacttttataataggtaataaaaaggcattattttttcgctttataattattgatcttgaatttttttcacatagatgtgctatacttacgtaaacaattaaatttatttrgagggatctctgatgaatatacgatatatttcaatctctggtaatacacgctcatttgttcaacgtttaacaacttattctgaagagcaacatcagcacaacgaaaaaaatcctacgattactttcaaagaaatttcggaaaattctccgttagaagtagaaacagaaccattttttacctttgtgcctacctatttagatggtggcgatggcatcaacaatggcaataccgaaattttaacagaagtcatgcgagaatatcttgcttttgaaaataattatcgttattgctctggcgtggtgggcagcggcaataaaaactttaaccaccaatactgcctgacagctaaacagtatgcggaacaatttaacttccccttcttagctgattatgaattaagaggtacccaagcggatattgaacgaatttatgctattttaaaggaaaaccaataagcaagtttcattactaaaaagctcacctatgatagactacattttgaggtgaagaaaaatgagaaatacatggttagcagaacaacttcagtcaatcagtgaagaacccaattcttttattatcgaggaaaccatcaaatatattgaacaattagaagatgataatgaaagtcttcaagttgcattggaagggactatttgggagtcctaaaaatgggacgaccattgggaaaatatttaacnga

SEQ ID NO: 369 - DNA, 1652 bp; double-stranded, linear
tcatagggcctattttttgtcaaggaatcttcttatcttttttgtttaatctatcaaattaaaatattttattttttaatataaaattatttcaataattattgaacatttcaaattgaattgattttttcagacgtaactttaggcttgagccagaattttttgcgcttcatctattgttcgacaatcactgagccgctgaatgttttcgagatctgaacagaaaaaagctaattcttgaagcatgcttagttgccgttgactttttaaagcaacgacaaataacaaagtagctatttttcgatctgcttccgtaccaaagttgaccccatcaggcacttgaataaagcaaatcccttcttttaaaacttgttcatcttgtccttccgcatgaggtaatgccacgaagttaccgatatacacactgactttttgttgacgttgatacattgctttgacatagtcaggcgtgaccaactgattttttagcagtaattcaccagaagctgcaagtgcttcctcccaactagcatacgattgattcaacattatttgctccgctgtaatttcaaacatctctcaacacctagcctttcatttcttcaattaataatgacgaaagcaactgataaacaatggcttcatttcctgaatgaaaaatttctgtatttaaatcattcataataatcgcaccactgatttttcctaaaattttcccgattgtttcatcaatcggtatcggcgctagcatgagtaacatacgttgtaactgcatcggctttttatccataccttcaatcataagtggctgggccagattaaaaatacaaaaaacaggctgtgtcactgctgtacttgaggtatggaataaggccatttccgtctgaggaatcccaataggcgcttgctcgtaacgtttcatcaattgctgacagacgattgcactatcggtgattaaatctgcggaaagttgcgcgagagcttgttgaacggtttctgctaaatccgcttgattatttaaatctgctatgaaaaatgtttctaatagtttactaatttcttccatgaaagcgaccaccgtttcgtagctttcttcgccacctatttttttcacaggcgctttcctaagcgagcgtttttcgtgactaatccgcttaaactcttctttcaattggcggatttcatcgtctaaaagtaacggtgagatcaatttatatttaccattgtatcctggtaataacgartggaaatcactaagtcatagttttcctcaacattcaccttacctaaatccgcaatccgaaaaaaatgaatctggttgataaaaggaaagtagcgccgtaatcgcatttccagcatacttgtcgaagccaaaccgctaggagaaaaaccagcaatatcaacttccataattttgggactccgttctaaagaattggcaaaatgaagcaccatgtaggcaatttcctcttccgatagattcttttgcggaaaaatttgcggcaacgcttggcgtaaagcgcagctatttcttgatattgattcatgatccgttctaaaatgggattcgttaaatctncttcttgtaaaaccgcccgagaaaaaacacctgataaatgcgtcaacaacattntatacaaatnggtatcttc

SEQ ID NO: 370 - DNA, 1742 bp; double-stranded, linear
gtgattcgagncggtgcaaantggnccgatggtaccgntattactgctgatgattttgtaacggcatggcaaagagtggtagatcccaaaactgcttctcctagcgttgagcttttctctgctataaaaaatgctaaagaaattgcttcaggaaaacaatcgaaagaaacgttggcagtaaaaagtaatggcaataaaacgatagaaattgagttagaaaaacccacaccatattttacagatttattagcattaacagcgtactatcctgtacaacaaaaagcgattaaagagtatgggaaagactatggcacttcacaaaaatcaattgtaacaaatggggcatttaacttaacaagtttagagggagtgggaacttctgataagtggacgatttctaaaaataaggagtactgggatcaaaaagaggtttcaatggagaaaattaacttccaggtagttaaggaaattaacacagggattaatctttataatgatggccagttagacgataccccagttacaggggaatatgctaaacagtacaaagataacaaagaattttccactactttaatggctaataccatgtatttagagttgaatcaacgggaaaaaaattctattctacaaaataaaaacgttagaaaagccattagttatgcaatagacagaagtaattatgctaaaaacattttagataatggttctatttctgctgttggtgttgttgctaaagacgttgcttttgatcctagtacaaaaaaagattttgctaacaaaatgttggtgcattttgatacagaaaaagcgcaatcctattggaataaagcgaaaaaagaattaaatattaaagaacaagtaactttaaacattttaaccaatgaagaagaaacaaccaaaaaagcagctgaatacattcaaggacaattagaagaaaatctaaaaggtttaaaaattacgataacaccagttcctgcaaatgtacaaatagagcgagttatgaaacatgattttactattagtctaagtggctggcaggcagattatcctgaccctatgagttttttaggtamctttgraagtwacagkgtgttgaattttggaggttatagcmatactaaatatgatgaatacttaaaagatacctcagataagcgttggaaatctctaaaaaaagcagaagaattacttcttgaggatgcaggagtagttccatttttacaagtaggtaattctaaattattaaagtcaacgatggagaaatatagaaacgcattcgataggtgcaaaatatgattacmaaaagatgaaaagactagagtagttactctagtcttttggttattttcttttcgtttagttttatawgattattttcyttagtaagtaaagtawcyggtttacycatagaaccattatttttttttgagatcattagataaatgttawctttcattaattttgctagctcgaccatttctaagtcyccctaatagatcgacatatttaatgagttatttaaagaatccatgttgtttgttaaaaagtaaccaactaaattataagttattaaataatttagtttatacttatatgacgggaatttttgcaataaatcattgtagatattcagaacttctgtacaactttcaaaatctcggttttgaacgagtttagtagtaatgttttcaagtaaatagtatgctgcttcactagtaactgttggagcgtttgaatct

SEQ ID NO: 371 - DNA, 1862 bp; double-stranded, linear
tagtatttcctgtaacattatttagaaataaatttatttctaaattaggcaagcttttttaatacaacatgattaacagtaataatcactttctttttgcgatatattatcattaaaaggatatagataatttaaaaaataccccccattgtcgttcaagaattttggagtttcctagccattagttttcttatattcaattatttttcattgtcctatatgaaattttgcaactattctaaggctatgaaaaaaactaaccatccttaaagaatttatatcggcattagtaattctaatatttatttcttagagcaaaaccactaattgttagttaaactctttttttattatacaatgcttttactgataaaagttctatcctcattttaataaaagattatttaagtttctatctaatgaattttacggatttgctaacgtattattaattgagtaacctttttcaaaattgtccctaatgctgtgaaaccaatactaatttcaacacaaataactaaaactttaattatcttctttttcattagcttttatctcgraaacaaaaattataaaacgttttttaacttaccctaactattcttattntctaaatgttacagaatagttacggtargtkaaatatagtactttctttctatttcattgcctgtacgctcttttttatctatatattatccatcaaatacacattcatactatctatcataatttttatattctattcgttgtacaatagttataagaaatatattcaaacaaaacgccttttcttacttaactattttaattttctagaaagcataatcttttgtactatctatttaccttaaataatgcaattctatttatcatggagacaaaaatttaaaatattactttatgctttttgactaacactattatattaaattgataacgtttactcttgtaattgataacaaatctctttagtagtagaataaactttactatatacttgaaagaatttattatataacaacacatttttttcaattggttgatatacttttttatatttcacaaacattttaatacaactatcaatgtttgcacacataccacaaccaataactgctaatattgcagctcccaagctaggaccctgttccgtttccaatgtagtgataggaaggccaaaaatatcagcctgtatctgaagccattgttgatttttcgttcctccacctacagaaataattttttttattttcaaattttttctttgttccatgattactttagattcttttaatgaaaaagttattccttcaataactgatcgtgtaaaatgttttagactatgtcgactatcgataccaataaaactcccccgaatttgactatcttgatacggagttctttctcctcttatatagggagtaaaaatcaagccctcacttcctactattacttcatcaatattcgctaacaaatcagaaaattctacatctttagcaaatgtatctctaaaccattttaaagaattacctgctgccaacgttactcccatggagtawtargaattaggcagagctgaattaaataagtggagattaccttgatattcgttctcagcatcgtcttccattgacaaaaagacgccactagtaccaattgacagcattgctacttcagaattaactatcccagctccaatagscgcacmagcattatcaagctccacctggcaaaaattccactttggttccaagnccaaacctattaatccacggaccttctccatatnaccactttagctgaagncccaaataaggttggcaaaaccccctaggaaattaactttcaggaatgtctgg

SEQ ID NO: 372 - DNA, 6674 bp; double-stranded, linear
ttatttgattttaccgatggtnantcttcccacatttacttggcggtgggaatcaaattgttttagctttaggcaatcaaccgactacgatttgggctttagtcggcttactggttttacgttttgttttttcaatggtttcttacggttcgaatctccctggtggtattttcttgcctattctaactttaggtgccattatcggaacattgtatggcagtctacttgtccaatacgtagggatggatccaatttttgtgaaaaactttttaatttttgccatggctggttattttactgcgattggtaaagcaccgttaacagcgattattttagtaacagaaatggtcggcaatttttctcatttaatgtctttaggggttgtcgctttagttagttatattaccatcgatagtcttggcggcaagccaatttnatgaaagcttattagaacgtttggttccttctaaagtaagtaatattcgtggccacaaaacgattatcgaattacctatcactgcagaaagttccttagatgatacgatggtacgtgattttgtctggcctaaacaaatgttgcycacttccattcggcgtggcgaatcggaaattttaacacatggtgatactgttatgcatgttggcgatgtgctcattattttgaccgatgaaaaactcgcttaccaagtcaaaaaagagatttatcaaaaaactttaccgaatgatttagtgaattaaagaaagctgctgaacctgagttcagcagctttctttttttcttatgactgttttttaatttttttgaatgtttttgaccgttttagattgattagcgttttcatttgtgctattatatccatgaaatgagggatgaaaatgcttacggaagaacgacatcaaaaaattttacaattgttagatcaaaaatcagtcgtcaaatcgcaagaacttgctagcttgttcaatgcttcagaatccacaatccgccgcgatttacaagaattagaagacgccaatttgttagaacgcattcacggcggcgctaagcgtattcttaatttaggctttgaacaaaacatgacggaaaaatcaatcaaaaacacgcacgaaaagcaaaagattgcttctttagccgttagttgtgtacaagatggcgatatgatctatttagatgctggttcaaccacgttagaaatgatcccttttttagttgggaaacaaatccatgtagtgacgaattccgtgcatcacgctgcaaaacttagcgatatggaaattcccactattatgcttggtggtactttgaagctctccactaaagcaatcattggtgccactagtatggaacagctacaacattttcgttttaacaaagcttttttaggaactaacggcgcacatttagagtttggtttaacgacgcctgatcccgaagaagcagcgctaaaagccttggctattcatcaagcagaaacagcctatgttttactggatcatacaaaatttaatgaagtaacgtttaccaaagtggaagaattagagtcagttactttactaactgactactgccctgctgaatcgcttcaaggattccagcaaaaaactattttaatggaggcaaacaaatgatttacacagtgactttaaacccttctatcgactttatcgttcatgtcgatcatctacaaattggtgatttaaatcggatgacgaatgattttaaattacctggcggcaaaggaatcaacgtttcacgtattttaaaacgtatggagacagaatccactgccttaggttttttaggtggttttacaggctcattcattgctgattggttgaaaaaagaagaaatccaaacgaatttcactcccgtgtctgctgatacacgaatcaacattaaattgaaatcagatactgaaacagaaattaacggcttaggacctgctctaacaaacgaagaaattcaagaactaaaacaagcagttagtcgtgttcaggctggtgatattgttgttctttcaggaagtacacctgcttctctacgcaaaggattttacgaagaattaatccaaattgtgaaggaaaaaggcgcagaatttgttattgatacgacaggtgaagatttaatgaacgctttgtcacaaaagcctttattggtcaagccaaataatcatgagttggcagaattatatcatacaacctttacaagtattgaagatattttaccttatggacatcggttactagaagaaggagcacaacacgtaattatctcaatggctggtgatggtgcattacttttcacaacagaaggtgtttatcgttccaacgttttaaaacgtccactgaaaaattctgtcggcgctggcgactcaatgattgctggttttattggcaacttttcaaaaacacaagatcctttagaggctttcaaatggggtgtcgcttgcggtagcgcgaccgcattttctgatgatttagcctcagaagattttatccaagaacttattcacgaagtaacaattgaaaaaatttcagaataaatccactaagggaggaaaatagagtgaacattaatgatttattaataaaagatgtcatgattatggatttacaagctactgataaaaaaggcgcgattgatgaaatggtccaaaaattatacgatggtggccgcatctctgacattgacacttacaaagaaggaattttaaaacgcgaagcacaaacatcgactggtttaggcgacggcatcgctatgcctcacgcaaaaaatagtgccgtaaaagaaccgacagttctttttgctaaaagtaaaaaaggtgttgattatgaagcactagatggacaacctacttatctattcttcatgattgctgctccagaaggcgccaatgatacacatctccaagcgcttgcggccctttctcgattacttatcgatccagaatttgttggcaaattgaaagaagcggaaactccagaagctgtacaagcacttttccaagcagcggaagatcaaaaagaagcggaagaaaaagcagaacaagaacaaacaacgccagcaccagaaagcaatcgtaaatatattattgctgtgactgcttgtcctacaggaattgctcatacttacatggccgaagatgcgctgaagaaaaaagcaaaagaaatgggcgtagacattaaagtagaaacaaacggttcagaaggaattaaaaatcgtttaactgctgaagatattgctcgtgctgatggcgtgattgtcgcagccgataaaaaagtagaaatgaatcgatttgatggtaaaaaattagtcaatcgtcccgtcagtgatggaattcgtaaaaccgaagaactaattaacttagccattagtggtgaagctcctactttccatggcagtgactcggctgcaagcgaccaagaggattcagcggaaggttcaatcggttctcgtatctataaagatttaatgaatggtgtttctcatatgttacctttcgttattggtggcggaattgccattgctctttcctttatgattgatcaatttatcggggttcctcaagatcaattagccaatttagggaattacaatgacgtagctagctggtttaaccaaattggtggcgcagcatttggctttatgttacctgtcttagctggttttattgcttctagtatcggggatcgtccaggcttagttgctggtttcgcggctggtgcattagcaaacgccggaggagctgggttccttggggccctaatcggtggtttcttagctggttatgtagtggttcttttacgtaaagttttcaaaggcttgccaaaatcattagatggaattaaaaccattttattctatccagtttttggtttgattattacaggcttattaatgttagtcattaacatcccaatgaaagcaattaatgatgcgttaaatcatttcctacttggcttagatggcacaaatgctgctttacttggtgccttattagctggtatgatggccatcgacttaggtggaccagttaacaaagctgcttatgttttcggtacagctacgctagcaagtactgttgcagaaggtggcagcgtggtcatggcttctgtaatggctggcggaatggttcctccattagcaattttcgtagcaactcgtttatttaaaaataaatttacaaaagatcaacaagatgccggcttaaccaatattgtaatgggactttcttttgtcactgaaggggcaattccttttgcagcagctgacccattacgtgtgattccaagtttcgtggtaggttctgcctttactggtgcgttggttggtgcgtttggtatcaaattattggcaccacatggaggaatcttcgtcgtcttcctattaagtaatccattactatatctattgttcatcttaattggggcgattatttcaggaattgtctacggacttttgaaaaaacctgtcgaagtacctgcttaaaaaaagcaaaaaagcgattcaaccatggttgaatcgcttttttattattttctctttatcgcataattttctaaatactcaggatttcctttgcttctgatatacgtgtacacgcccatcacaaaggccccaagggtattggtaaataaatcccccatcgtatccattaaagcagcacgcccaataaatggttggccgttggacatattatagcgttgtaagttcatgttccctaatgaatcgcagataaattcccagaattcccagaagacgccacaaagccctgcaaatgcaaacccaaataataaaaataaccacggggaaacatcggcgtacttcgttttcttcaataggaaaccagcaataccataacccacagcagttaacagcatcggactaacaaagtgtaaaattttatcccagaacgaaatgattgagatcatatgcaacgaggttcctaggaatactgaaataaataagaaaaaccagtaaaaataaacgatagtcggtggcataataatttttaaaaatttattgacaagatccggtaaaaagattagaccaattccaagtaaacattcgataacaaacgtcacaccttgttttgttgaatacttagccgtaaaaaattcccagagattgtacgtcaagcataagatgccaaacaccactaatccatatttaattttcgaataatttttatccattttgacacacctttcaaaagttattttatatgaaaaaaactgtagatgaaagacaccttccatctacagttttagaaaactctatcgaatgaagagcttattaaaaatgtttatttttcaacagctgtttcagtaattgtttcaacagcacgtttcatacgaatatcgtgttctaacatgtcgttgtttaatactttacgtacttgcgcttcaggcatgttgtattgttctgctaaatctttcacttcagcatcgatgtcttcttgtgttacttcgatgttttcagctttggcaactgcttcaatcactaagtttgtttttgtgcgtgtttctgcttcgccttcaaattgtttgtgtaaatcttcttctgtagaaccagttaattggtagtacatttcaggagaaattccttggcgttgcatgttgtttaagaattcatccattgaacggtgaacttcgtcgtgaaccattacgtgtggtaattcaacgatttcagcattttcaacagctaaacgaattgcttcttcgtcttttgcttcttcagctgctgcttcttttgcttctgtcaattctttacggaatttttcttttaattcgtctaatgattctactgaatcgtcaacgtcttttgcaaattcatcatccaattctggtaattcttttgcttttacttcatgaacagttactttgaagactgcttctttaccagctaaatcttctgcttggtaatcttcagggaaagtaacgtttacttctacttcttcgccagcttttttgccaactaattggtcttcaaagcctggaataaatgaattagaacctagttctaatgagtaattttcgcctttgccgccttcaaatgcttcgtcgcctaagaagccttcaaagtcgataactacagtatcgccattttcagcagcggcatcttctttgattactaattcagcttgagattcttgttcgcgtttcaaacgtgcttccacgtcttcatctgttacttcacggtcttgtttagacactgttaagtttttgtattcgcctaattttacttcaggttttacagttacttcagcagtgataacccagtcttcccctttattcatgctttcaacatcaatttttggttgtgctactggttcaattcctgcttctaatacagccgcttcatatgcttctggtaaaacagcgtttaacgcatcttcgtataacgcttcttctccatacatacggttaaaaacagtacgtgatacttttcctttacggaaaccaggtacgtttaagttttktttcactttattgaacgcttgcgttaatcctttttcgattactgcttgttcgattgaaaaagttaatacaccatcattagtgccttttttttcccatttcgcagacatttgtttccctccgaataacatttaatttatacatcaaacttwatwakgcataccttaaaatagacactatccctggnaaatgta

SEQ ID NO: 373 - DNA, 1630 bp; double-stranded, linear
tagcattnatgattgtctttaactacattccaatttatggaattatcattgcttttaaaaattatacgattgttgacacggtttcttctgcaccatgggttggacttgaaaattttcgaatcattatggaagatagttttttttgggaagcagttcgtaataccttagcgattagtttaatgaaactttttttaggattcgctattccgattatcttagcggtaatgatttttgaaatgagagatggacatttaaaaaaagtgattcagacaatttcttatattccgcactttttttcttggatcgttttaggcgggatgttgatttcgtggctttcaacaaatggctttatcaaccaagtcatgatgtcgttaggcttaatgaatcagggcgtcaatcatttgttagatcctgataagtattggtggattgctgttctttctgatttgtggaaagaagtaggttggggcacgattctctatcttgctggtatgtctcgcattgatccaacgttttatgaagccgcgagaattgatggtgcttcaaaattaacacaaatccgaacgattactttgcccttattagcgccgattatttcgttgaacttaattctaaatgttagcggtttattgggatcgaacttagatcaaacgttggttttaatgaatgctcaaaaccaaaacaaatcagaagtaattaattcatttgtttatcgtatggggynaacgcaaggggacttttcttatgcgacggcagttggtttagggatttctgttatttcaattgttttattagtcattacagatcgcattactagaaaaatgaacaatggtcggtcggttattttataaaggaggcaacagctgtgattaaaagaaaatcaaaagaaaacaaatggttttactttttcaatacgttaattcttgtgttgttttctttattaattatcgtgccaatttggaatattttagtttcctcagtttcgtcaagttcgggtttagccggtaaaggcttggttttatggccgaaaggatttacgctagaaaattatcggaaagttttttcggatagtagcattccgcgagcgtttttgatttctgttttaaaaacagttattggtgcgtcgacgcatacactgttctgtgcgattgtcgcctatggacttagtaaatctagactagtcgggcgtaacatttatacaacgatgggtgtcattacaatgtactttggtgggggcatgattcccacgtatcttttgattaagtcattaggactcttagataccttctgggtatatatcattccagctttatttagctattatgatgtagttatcttaatgaactttttccgagaaattccaccatctttagaagaatccgccaaaatagacggcgccagtgagtttcaaattttttataaaatctttttacctttaacaaaaccggcattagccaccatcattttatttaatggggttggtcaatggaatgactttatgaccacaaaattatatattaccaaagaatatctgtatccattgcagatgaaaatttatgaaattattgttcaatcamacttgagtaccatgacagagagcggcagtacagatatggtggtgcaggcaacg

SEQ ID NO: 374 - DNA, 885 bp; double-stranded, linear
tcatccataattcctttttccgctggttcttttcctaatgcaaaaccaggtaacccatccgcgaccacgttaacaaacaacagttgaactgcagtaaatggcgcaccccaaccaagtaacatggcaattaaaacaataaaaatctcagaaatattacagcttaataagaagttaatggctttacgaatatttcggtacacggcacgtccttgcgccactgcatcaacaatagttgcaaagttatcgtccgtcaaaatcatatctgaagcaccttgggccacatctgttccagtaatccccattgcgcaaccgacatcactagctttcaaggctggcgcatcattcacgccatctccggtcattgctacaacagcgccagaacgttgccatgattgaacaattcgaattttatcttcaggggttacacgtgcataaacggataaatctttaacacgtttatctaattcttcatcactcatttttttcagttctgaaccagataaggcttcacttttatcttttaaaattcctaattctttagcaattgcactggctgttaccacgtgatcaccagtaatcatgactgttttaattccagcttttttcgcacgagcaatggcgcccttactttctggacgtggtggatcaatcatgccaattaagcctaacaagcgaagatttttttctaaagcctctgatgtaatttccttgggtggttcatcatatacggcataaccgacagcaataactcgtaacgctcgttttccgaaacgatcattaacaatagccgcttgatcgacatctccgaaaccaaaacgaggtagtaacacatcaaaggctcctttagtaattgrgrtgtactttttcccccattgatggaccgta

SEQ ID NO: 375 - DNA, 7664 bp; double-stranded, linear
gcgtgattatctatacgttggttcaatgttattcggtttgtttttcggtgctggaaatttaattttccctgtacatatgggacaagaagcgggggcttccgtctttttagcaaacttgggcttcttagccactggaattggcttaccttttcttggtgtcattgctatgggtgtttctaaaagttcaggtgtttttgacttagcttctcggattaatcgtcgttatgctcttatttttaccttactattatatttaacgattggtcctttctttgctttaccaaggttagcaactacttcttttgagattggtcttgcaccatttgttccgaaagacttgcaatggctggttcttgctggtttttccgcattatttttcttagctgtttggctcttctctagaaagccaagtaaaatcttagattatgtgggtaaatttttaaatccgttatttttagcattgctaggaattttgattgttttagcctttgtaaaaccattaggtcatgtggccagtgccgctgttggtgaaaattatatttcaagtcctttctttaaaggatttacagaaggttataatacgctggatgctttagcttcattagcttttgggattgttgtcgtttccactttacgaaatatgggcgtcgaaaaaccaggagatatcgctaaaggaatgattaaatcaggtgctttcagtgttgtattgatggggattatctataccttacttgcttatatgggaacaatgagtatcggggcttttccaatcagtgaaaacggcgggattgccttagcccaaattgccaattactatttaggcctaccagggagtattttactggcttttatcgtagttcttgcttgtttaaaaaccggtatcggcttaagcacagccttttctgagacttttgaagaaatgtttccgaaagtttcctatcaaaaattcttggcaattgttgttattttaccagctatttttgcaaatgtcggcttaaccaacatcattcaatttgccgttccagtcttgatgttcctttatccattggcgattactttaatgcttttggtaatcatcagtcctattttcaaacatcgacgggaagtctatcaagcaacgacctatatcacattgattgctgctgttttagatgcattaaatagcgcgcctgcctttatcaaagatacggcgtttgtaacaacgcttttagaaaaagccggccaatacttaccattgttcactattggtatgggctgggtcgttccagcaacggttgcttttctaattagttgggtttgggtcatgatttctaaaaaagatcctattcttgattaattcttaccaaaacgacactagaaaaaatgcggaagcgcatcttttctagtgtcgtttttatgtatattcgttgtaccaaactcttgactatggtaaattgaagttaccaacaagtactggaggaaattgcccatgttagttacaacaaccgagagaattagcggtcaagaatatgaaattattggagaagttttcgggttaaccacacgttctaaaaatatgtttaaagatttaggtgctggactaaaaagcgtagttggcggtgaaatcaaaggttacactgatatgcaacgagaagcacgcgaccaagcaatcgaacgtttaaaagcagaagcctctaaattaggtgcagatgccgttgtgatgatgcgttttgattctggcacaattggcacagacatgcaatctgtcgtggcttacggaacagctgttaaatacatctaaattttgcaactaaaaagacgcagaccttttcttgtaaggtctacgtctttttagttttcatatttcacttctgctaaatacaatccttctggatgagcagtcggacctgctaaatttcgatctttggctgcgataattgctggaatcgcggttggttccagccgcccattgccgattttcaatagcgtaccaactaaaatccgaatcattttgtacaagaaaccatcgccccgaaaagtgaatgttaattcatcccccgtttcattgacatgaacactggcttcatgaatggttcggactttatcttctaccgaacttcctgaggcacagaaagaggtaaaatcatgggtgcctaataaatcaggcaaagcttgttggattttttcgagatcaatgggatacggaaaataactagcataaaaacgtcgaaatggacttcgcggtttgccaatatccactttaaattgataggttttttcgatcacatgataacgtgcatgaaagtcttctgaaacacgttcccacgtgcgcacagcaatgtcttcgggtgtttgtgtatctaacgcaaagcgcattttttccaacggacgttcctgcggataatcaaagtgaatcacttggcccattgcatgaacacctgcatctgttcgtcctgaaccaaaaaccgtcacggagcgtccattattcatgcgtgctaacgttttttctatttcttcttgaacggtacgctcattaggttgcttttgaaagccatgaaaatgagtgccatcataggcaatgattgctttatagcggggcataatttttcttcaccttttctaagttcttaatacaaataagccaatggttaacaagacaaagccaaacattactattgtatctcgtaggtgccaatgaagaatgcggtattttgtccgtccttcaccaccttgataacctcttgcttccatggcagtcgctaagtcttccgcacgattaaaactacttacgaaaagcggaatcaaaagtggaacaatagctttcattttttgaagtaagtttccttcaccaaaatcaacaccacgggcacgttgagcattcataatcttttccgtttcatccattaatgttgggacaaaacgtaaggcaattgataacatcaatgaaacttcatgaactggaaatttcactacatgaagtgggcgtagcaaatattcaatcgcatctgataactctaatggtgccgtcgttaaagttaataacgttgacatgaaaataattaaaacaaaacgacagaaaataaatagcccattcgtcacaccaaactgggttatggaaataattccccactgaaagtacacttcccccccttgtgtaaacaaggtttgaagagccacagtaaacagaattagccataataatggccgaacaccgcggataaagaagcgggcgctgatttttgataatgaaatagcaaaagcagtaaaggctgctattaaaacataactctgccaattatttgctaaaaagataattccaataaaataaaaactagctaataattttgcacgcggatctaaacgatggataaaagaatcgcctggaatataacgcccaaaaatcaatttattcatcattttgcctcacctgcttcctgcatttttttcagaagctgatcggctaattgatcggccgttaatggtaattgctcaaaagaaaagccttttgccactaatttttcagcaaattcggctgcagttggcacgcctaattgtttttctttcagccattgtgtctcttgaaacacttcttgtggtgctcccgctcggacgatttgtcctttttctaaaacaatcacgtgatctgcgtaattagccacgtcatccatcaaatgtgtcactaaaacgatggtcatattatgttccttatgcagacgactaaacatctccatcatttctttacgacccttaggatccaaaccagcagtcggttcgtctaatactaagacttctggttccatcgctagcacaccagcaattgcgacacggcgcatttgaccacctgataactcaaacggagaatgttgtaagtatttttcatctaagccgactaaatcaagcattttcttagctaattttttcgcttcttcgtctgaaacaccaaagtttttcggtccgaaagcgatgtctcgctccactgtttcttcaaacaattgtgcttctggaaattgaaaaacgatcccaacttttttacgaattggttttaaattcttattatcagtttctggcgtaattacacgctctccaattgtcacttggcctttagttggtttcaccaaagcatttaaatgttgtaatagcgttgatttgccactgccagtatgtccgacaatcgctgtataagagccgtcttgaatcgttaaattaatatcgaataatgcccgttgctcaaaaggagtattgggttggtaagtaaaatctacttgtttaaaacggatgtccataaccaatccaccatcccttcttctgttaaataattcgttggcacaacaacgccacgctctttcaaagctacttttaatttttcaggaaacggtaaatccaagcccatttcaacaagcgcttctcctgcagaaaaaatcttttctggtgttccttcgtttgtcaattgtccttggcgcatcactaaaatacgattcgcattagccgcttcatcaatatcgtgggtaatagaaataactgttaaattactttcttctttaatcttttgaatggtagcaattacttctgcacgaccttctggatctaacatacttgtcgcttcgtctaaaataataatatctggtcgcaaagcaaccacaccagcgatagctactcgttgtttttggccgccagatagccgagcaggttctcgcttggcaaaatctaacatacgaacccgttctaatgcatcgtgaacacgttcgaccatttcatcacgcggaataccttgattttctaaaccaaaagccacatcgtcttcgactgttgaaccgacaaattggttatctggattctgaaaaaccattcctaccatacgccggatatcccagacgtttgcttcatttaattctttgccgccaactttgatagtcccagcagctggcagtaacagcccattgatcgttttggctaacgttgatttaccagaaccattatggccaataatagcgacccattcgccttgttgaatggaaaaagacacatcttttaaagcgggagaagcatcttctggttgataattaaattggatattatttagttcaatgattggttgcatcgcatactccctcaatctatttattctttctaacactaccaaaaaagtagcgttttttcaatcatctgttctgattcttcacactattttttattataccaaaagaacggtcattatgggagctcttatctgtcttgacaggtctatttttcataaaaataacttcttgttctcataaaacaagaagttactgattttcttttaaaaatgtgtcttcaaatattcaaacgcatattgggcatataactcagcacccattgccatcgcatcttcatcaatattaaaacgaccatggtgatgtgcccactccgtatctttctctggattaccacttcccactaaggcaaaacaaccagaagcatgttcagtataataactgaagtcttcgccaccagttgtcggctcttcttgtcttaaggccgcttcaccaaaattttccttaattagtgtttgggcaaacaaggcatcctgctcatcattaatcactggcaacgtcccatattgataatctaacgaagccgtcccaccgtaaatagcggctgtttgttccgcatagcgttgtagcgcctgttctactcgattacgcgttgctacactaaagcaacgaaccgttccttccaaacgtgcattctcagcaatcacattaaaacgggtccccacatccatccgtccaatcgtgacaactactggatctaaaggatctgtctcccgagaaacaatcgtttgcagattcatcacgaaagaagaagctatgactgccgcatcaatacaagcgtttggcatggcaccatggccaccacggcctttaaaatcaacagaaaaaatatctgcggatgcgaaacttgagcccactcgacacgaagcggttcctacaggcatttgtgaccagatatgtaagccaaatacatcatcaacaccggtcattgcgccttgcgcaaccattgctttagcaccttgcgcattttcttcagatggttgaaaaattaaccttactgttccctgaagttcttcctggatttcttttaatactttagccactgttactaacatcgcggtatgggaatcatgcccacatgcatgcatcttgccagcttctaaagatttataagctaaatcttcatttaattcctgtacaggtaaggcatccatatccgcccgcagcgcaaccactcggcctggtttgccgcccacaatttcagcaattaaacccgtcggttctgttttgcgataagtaattcctaattgatcaagaactgccgcgactttttctgtcgttcgaaattcttcaaattgtaattctggatgttggtgtaaatcccgtcgaaaagcaatcatttcttgtgcatgctgcttgactagtgctttgatttttttcatacttacgccccgtttctacaaacttaataaaatacttgaaaaaatacccgctaaaataaccgaaacaatggtgactgttacgaaacctgccactaacatcggtggcattaaatggctcgttaaagccgcctgttcttgttcatcttctgtcaatgattgaatcacttcattagtaataatataatcggctggaaagccatataaagctgtcaacgaaacagcgaatgccatctctttactcacacctaatacacgaccaacaattgctgaaaagatgtacatcccgataacaccaatcacaataatcccaatcattggtaaaaataaatccatcaacatttcaggtgtggcttgttttaagccatcaaagacaaaaagcattaaccctaaaatcgcaaaaccaaagctatttgctttctgcaatggttgcttttctaaaaagcctaaagacgttgcaatcacgccaaaacataaacacagcacaaaaggactaatcgtcacaaacggtgccgtccacacagaaacataataagcaagtgtggcaactaaggctaaacgtaaaattcgtgaataatctgtatgatatcgtttgggtactttttcaaatagtttaggcacatctggttctgctcctgtttcttgcccctcttgttcatgaaccggctgccatgtccctgctcgatattcttgaagcttccgctttccttctttttttagaacaattgaagttaagggataaccagcaaacccttgaatgacataaattaaaattgccaaaaccgaaagtgaggctaaaccagctgattgagccgcttctgacattactaatgaagaaactaaacctcctactaacggcgggattgcaactaaaactgtttttaagtcaaaaacaaaagtccccacagctaacaacaaggcaataatgcccagaatacctgacaaagcaatcacaatcgttttccattgattaaccaattctttaacagagagcagagtgcccatattagtaatcaacagatacattaataaagtggcaaccactgtaggaatccctgccacttccacaatattttgtggaaaaatagtccaataaccaagaataaataaaacaccacaaacaaaaacggatggaatccaagcttttgttttgatagaaactacatcaccaatgtataaaataaccatcagcaacgaaaaagcaaacatttgc

SEQ ID NO: 376 - DNA, 2344 bp; double-stranded, linear
aaaaaaattttcaaaagtcaaaaatgaaggggattttcaagatggaacaatcattaattgtgagagggacaccacaagagtatctttgcgaaattggttcgtgggaattattagaaggacaactattatgcagaaatattcatcgtgtattcattttacacgggactgagtcatggcaagcggcaaaaccgtattttccgacgtttcaaaaagtaacagctgtttttgaaaactatggaggtgtttgtacagatcaacgtgtgcaagagttagaagcgcaagtgctggacaatcatttagaggccatcgtcgctgttggtggaggaaaagtggccgacttgggcaaagccttagcacacaaaatggcgttaccggtaattattttgcccactttagcagctacttgtgcaccgtgcacgccattgagtgtaatgtatcgagaagatggagcaatggaacgatatgacgtttttccgcaagcaaacgctttggtgttggtagaaccaagagtgttattacattcgcctcggtccttaatggtggcaggtattggggatacattagctaaatggtacgaagcagatgcgattatttcgcagttagatgtccaagtgttacctattcaagtttctcattttgccgcggaaaaatgccgcgatattttgttaaatgaaagtatcaatgctttaaaagcgatggaagagcaacaattaaatcaatcgtttattgatgtcatcgaaacaaatttaattattggtggaatggtgggtggctttggcgatgattatggtcggacagcaggtgcscattccattcatgatgcactaactttgctgccagctagccatcgacaattgcatggaaacaaagtggcgtatggtgtgtttgttcaattagccattgaagaaaaatggcaagaaatcgctgaattgattcctttctatcaccaactaggtttgcctatttctttaaaagaaatggacatggacttaactgaagccgagtatcaagaagtagcagamcgtgcttgtatagaaggcgaaacgattcattatntgaaacaaaaaattccctgaaattgtgaaacagcgtgcaagrtttrgaaaaatatacagcgacaaaataagtgccaaacagcaactagttcatttgaattatttgaattagttgctgttttttaaggatccttttttgaaaaaagaaaccttgagaaatccttgcaaattcaataaaaaaaaagtatgatgatgggaggacaaattatagtagaaagtagggaaatgaatgacggaaccagccattcgttatcgtttaatcaaaaaagataaacacacaggtgcgcgtttaggtgaattaattactcctcacggcacatttccaacaccaatgtttatgccggtaggtacacttgcgacagttaaaacaatgtcaccagaagaattaaaagaaatgggtgccggtgttattttaagtaatacttaccatttatggttacgcccaggtgaagatttagtcgaagaagcaggcggtttacacaaatttatgaactgggatcaacctattttaactgattcaggtggcttccaagtcttctcattaagtgatatgcggaaaatcgaagaagaaggtgtgcattttagaaatcatttaaatggttcaaaaatgttcctttctccagaaaaagcgatcaatattcaaaataaattaggatcagatattatgatgagctttgatgaatgtccaccatttgatgaaagctatgagtatgtcaaacgttcgattgaacggacttctcgttgggctgagcgtggcttaaaagcccatgcgaatcctgatagacagggattattcggtattgttcaaggtgcgggatttgaagatttacgtcgtcaaagtgctaaagatttagtgagtatggattttcctggctattcgattggtggcttatctgttggtgagtctaaggaagaaatgaaccgagtcttagactttacgacaccgttaattcctgaaaataaaccacgttacttaatgggtgtgggtgcccctgattcattaattgatggagtgattcgtgggattgacatgtttgattgtgtgctaccaacacgtattgcgcgcaatggtacttgtatgacttcacaaggtcgcttggttgttaaaaatgcccaatatgcaagagatttncgtccgcttgatgaaaaatgtgattgtwakgtttgtcgtaattatacgcgggcctatattcgtcatttgattaaatgtgatgaaacattcggaatccgtttaacatcgtatcataatttatacttcttgttagacttaatgaaaaatgtccgtcaag

SEQ ID NO: 377 - DNA, 2424 bp; double-stranded, linear
taagttttgtttcaaattcttctacatattctcgatacataaaaacacatcttgaaatactcggtctaagttccttaaccctctcttccaattttgtacattctctttttacataagaaacagttaattcgttactgtcttcaagttcttttacactcaattgaagtttatgaatagaactcatcacatgaatcattttctcaatagtggcatccataagttttatattttttttgattaattctttatccattctatcaatccacctttctaaaacgggtacatttcttctaattcgaactctcgttccatataggaccgaacacttttattatctctattggtaaacaacaagtcttttgcatcaacactcaccatttcaataatctcttcatgcttttcttttnaattctgctaaatcaatgcgttccatcaattcatttgttcctaacagattatcaatctctttaatcatctttaatgaaggggctaaataatttgatagccatcgaagcgtcttttcaatagacggtttttcaccttgcacagacaattttaagccttccaatttatcaacaacatcatgccaagatttacaataaactttcatatcatcttcaatgtcatagacagtcaaagattgattaataatttctttcactaaccaatctagcgactcaccgcttgatagaaaatattctacaaacaaaaacgccttttcatcagaaaggcgaatttcgtatcgatttttaatttcatgtttttctcttgcttcttcaacactcatactttcttttcttgctaactcgtaatctttttggtaaaagttaaaatacagtggcgattgacgactaccaaaataaagggataaacctttattcaccatttttttattttcgtaaacaaatccaccgctaaaatcaaaatttttaaatgtggtgtcaacaagcccctgctccattttttcttttaaaacatacaaatcaaaattttcttgccccttcacaatcaattcatcaagagcaatatcaattcgagtgatttttgtatctactaaaatgccttgaccgaaaatatcgtcatcataaagagagcgaaaaaattctgtccacgatcggtkgttatcttcctcaaagatttcttctaattgacgacagccttcgccagacaagtccaacataattcccatattgacattttccggattccgaaaaatccgaatagagctatatgaaaatgtttccgtgtaatgataaaaccctctagattcatgagtaaaccagttcatatccatgtgcaacaacttttcaayaactgtccgaacatctaatgttttaaatcgtattcttaaaaagtcaatttttgcttctaccgaagcgtgcccaccatctaagttcaacacattaataatcttttgttctaactctttagaaataacacgttttccagattctatttttgaaattaacgaacgctcrattcctaatttacttgccaattcttgctgttttaattttagytcttttctatatcgctttaaatcaacacctctcactgctttaaacctacttccaaaaaatgtgacaactttagtcgaaaaatgtgacaaaatcataatcgctcaatcccttgtaggacatagcttttaagcaacttttttatacggtatattaaattctacccccatgttataaatagggggtttttgacgtaaggtgggcattcgcccaccttacgtctgttcattttaaaaggattttccgttgctaaaagtatacgtgggctttcgctctgcttcgcccacgtatacttattactagcaacaatccttcaaataaacagccgttattcagctgttcctcgttctaatgcaccaattctctcttttaagcttgcattctccgcaagaatagattgagacacctttaaaagttgcctcatatctcttttcaaatcctcaatttcttgtttattaatatgtgtagctttattctcatcagacataaatacttcatttattgcctcattaagcggaacattattttcacgcaaacgtagcaactcttgaaaattttctatatctttaatagaaaaaaccttatagctataactatgacctgcactattctttgcatatcggcgttcaaaacgtgtatcagtcattttttcaatcctatttgcccaatttttcagtgttttcaaagcaatagcattgtctagctctaaaattacttgatcaaatgaatacattttccacacctacttattaaacatttctttccaagcagaatccatatgctccttaaatcttgtttctaaatacttatcaacttcttgtgatgttgaaaatttcttttcctcaattggtctatcttcctcgtaaacagcttctgcatctaaaacagaaattactaataatttata

SEQ ID NO: 378 - DNA, 1468 bp; double-stranded, linear
gacgctcttttaccaatcaaagagtaaggcatagcctaaagaaagcagctctcgaccaaaatttttgatatcttttggaaaagaagaagccgcagtgatgcctgaaacatttgagatgcctgctcgcttggctaaaagttgcgagcggtacatgtgaaagtcactagtaacaatcactagccgtttaaaagaaaggagtttttgtgaattgacaatattttctttggtgcgtgtggcacgattttctaagagaatctgtttttctggaacacctttatttagcaagtattgtttcataaccgcggcttccgtagccggctcatctgctccttgccctccgctaacaataacgggtgtctcggggtgttgtttaatataggggatagccacatctaaccgagcttgcaaaacacggctgggcagtgcggtttctttagacgtccctaaaacacgggcccctaaaattaaaatagcatctggtttatcggtgggttgcgtatttttgccagtaaaaataagtagacctaaaatcaaaagaatacaaaagccaaaactgacaatggataaacttgttatttttaaccaatgcatgaaacatccctccttgtaatgttagtgtatacgaagtaccatagaaaaagcgatagaaaacaaaagacttataaaaaaatctatgttttaatagaaacttttgaagagagggagcgaatgcatgcgtacagaagaagaaatgtttcaacttattatggatgtagcaaaacaagaagaacacattcgagctgtgggaatggtggggtctcgcacgaatgtgaaagcgccaaaagatagttttcaagatttcgacattgtttatattgtagaaccatgtgctgagttttttgaaacagcaacgtggatagcaaaatttggacaaccattaattatgcaacgtcccaaggaaatgaccttatttcccacagaaccgaagacgcgggaaacatttttaatgttatttgaagatggccaacgtatcgatttaacgttgtgtcctctcgcagaaaaagataattggcatgaaggcgattctttagcaattatcttgttagacaaagatgaaaatttgccgcctttacctgtagcatctgataaaaattatacagtaacagttccggatcagcagcaatttaacgattgttgcaatgaattttggtgggttagtacgtatgtagttaaggggctttgtcggaatgaactattttacgctgtcacacatctctatgaatattgtcagcaggaactgttgcgcttgctttcttggcaagcggcttggcaggaaccggagccaatttctgttgggaaacaatttaagtatctgaaaaattatgtcactcctgacacgatggatcaattagcatcgttgctggatttttcctagtaaaggagcctkgttggaacagcttaatwaagrccccaagccttttttggacgt

SEQ ID NO: 379 - DNA, 13085 bp; double-stranded, linear
agtttaggncatmcgtaaacatcttctcctcctttattcgttcatttttttatagataacgtangggamaanggatacgaagcttactcactttcgtatcaaaaaagcawtcttcactcaagtgctacacgcttttttggttttaaaatgacatttaaaaggactgctaccaaagtggttaagataacttccgaattaccgaaaatcgttgttacccaagttggaaaaccagctaagcttccagtagacaatgtgacaccaattccaaatgctagagctgttccgacaaccccagtatttcgaggagtcatttcctgcgaagcaatcatccgaatacctgtcatagaaatagaagcaaaaactgaaatcgttgcgccaccaattaccgcgtaaggaatcgtagttaataatgcagctactttcggaacaaaaccagcaattaataatataactgaagcgaaaaccagaacatatttattaatcacttttgttaccgtaaccagaccaacattttgtccaaaagttgccactgggattgatccaaataaactgccaataaagttagtgaaaccactccccataattccgccagataattcttcatccgttgcatcccgatccattgccccaaccgttgttgctgtaaattgaccgatggcttgaacagcatcaacaataaacatcaccacaagcgtaaagattggtaccaattgaaaatccagtccaaagtgaaacgnggtaattacctgaacgattttagcattttgaactggctcaaaactaaccatccctaaagctaaagaaatcaaatagccaataaccattccgtttaaaattgcggataacttcaaaaatccttttgcaaaataattgaagtaaaagacaatcgcaaaggttaataatgcaactaaccaattccgggctgaaccaaaatcagcactaccagctcctcctgccatatacttaatcgcaacaggaaacaaggatagtccaatgcttaaaataaccgttcctgttactaaaggcggaaacaacacacggatttttttaatgaacaaaccaacaataataacaagaatactgccaactaattgggaaccaaaaattgctgcaatcccaaaatcagctccgatggccatcaaaatcggtacatacgcaaaacttgcccccatcataactggtaaccgtgaacccacttttccaaaaatagggaaaagttgaattaacgttgcaactgctgaaaaaatcaatgatgtttgaatcaaaatagtcgtatcactaggacttaattggcaaactttggcaatcatgattcccggtgtgacaatccctactactgctgcgacaacgtgttgcaatcccatcggaattgcttcagaaattgatagtttcgcatcatattcaaataatgcttgctcttttttttcattcataggatcgtttccttcttctttttattctaaaaggattgttccccttaatcaataaagaatgcaatcctttttccctcagaaacatcttaaaaattatcctttgacagcaactgcttcaatttcaaataaaccatcttttggcaacttggctacttctacacaagaacgtgcaggcaaaacttctgaaaagtaattcccatagatttcgttaattttgctaaaatcagacatatgttgtaaaaacaccgttgttttcacaacattatcataggtcatctcgacctcttttaaaatcgaacctaaattgataaaagcttgttttgcttgttcttccactgtagtcttcatttcgcccgattgcggatctaatcctagttgtccagaaatgtacaacgtatttcccgctaagacagaatgtgaataaggtcctacagtagctggtgcctgtgcagaattaatcattttgtttgtcatcgttttcctccattctatgattctttattttcaattaaagtccctgtttttccagataatccttctttggctttttctaataacgtaatcaatgtttttcgacctggcttagattcagcaaacttaatcgctgcttcaacttttggtaacattgaacctggagcaaactgaccttcttgcgcatattgtttcattttttctgttgaaacattccctaaggcttcttgattttctttaccaaaattaatacaaactttttcaactgctgttaaaatcacgagcagatcagcatccacttgttcagccagtcgttcactacaaaaatctttgtcgatgactgcattgacaccttttagtcggttcccttcttgaatgactgggatgccaccaccgccgccagcaatgactgtttggccagcatcaaccaatgtttgaatcgtgagaagttcgacaatattttttggtttaggagaagcgacgacttggcgataaccacggccagcatcttccatcacttgtatatttttttctttgactaattgttctgcttcttcttttgtcatgaagcgaccaattggtttcgttggttttttgaacgccggatcattttcatccacgaccacttgagtgactacggtggtgacggctttacttatatttcgttgacgcaactcttcttgtagcgcattctctaaatcatagccaatgtaactttgactcatggctacgcacatggataacggaacaactggatattgtggattattaaaggaaaattcttccatagctaattgaatcatccccacttgaggaccattgccatgagataaaataacttcatatcctgcttcaatcaaatctgcaatcgctttggaggtctgttttacggcagtcatctgctccgtcaaattatttcctaaagcattgccacctaaagctactacgacgcgtttgcccattgcttcacctcattttctgttttataaaaaggacgatgctttttctttttcacaacgagttttcgtattaactgtctgttgtcgttgcatgaagtcaacgcacatgactaagcgttcttgactcgagacaatcacacattcatgaatagacttgggaaggtcttatttgttcatgttgaagaggcaacttctaatgattcattgtgtaaagaaaaagcatctgtcttcatgccaaattcattattttacttctcttggtgtcgctttatccgctaattctgttaaggttttttgcggattttttactttacttaagaaaatcatagccgcaataacatacggtttgtagctagcttctttgtaaagttcgacccgataacgatcgaaaacagaagcttccacttcgccttcttcacaactaacgccagtaatatcagctggtagacaatgcatatacaaagctttgccgtcttttgttgttttcatcaattcttctgtacattcccaatctttgtgctttttattttgagaaagtaattcttgttctaattgatcaattcctgcttggtcaccattgccatataattcagttcgcttttccattgccgcaaaaggtgcccagcttttcggataaacaacatccgcatctttgaatgcttctgccatactattcgttttagtaaagtttccaccaaattctgccgcatttttcttcgcaacttcttctacttctggcataatttcataaccttctggatgtgctaagacgacatccattcctaaacgggtcattagaccaacaattccttgaggaacagataatggttttccataagatggtgaatacgcccaagtcatggcaacttttttccctttcaggttttcaatgccaccaaattcatgaattaaatgcaacgcatccgccattgcttgcgtcggatggtcaatatcacattgtaaattcactaacgttgggcgctgttccaataccccatctttatatccttcttggacagattctgatacttcgtgcatgtaagcattgcctttaccaatgtacatgtcatcacgaataccaatgatatcagccataaaagaaatcatgtttgctgtctcacgaacagtttctccgtgagaaatttgactttttccttcgtctaaatcttgaacttctaagcccaaaagattacacgctgaagcgaaactaaaacgtgttcttgtagagttgtcgcggaataaagaaatccccaagccactatcaaagattttagttgaaatattattttctcttaaatagcgtaatgtatcggcaactgtgaaaacagcttctaattcatctcttgttttttcccaagttaggaaaaagtcattttcgtacattttttcaaattctaatttatctaatttctcaatatattctttaaacgtttccattccatctgctccttttttcttgtctaataatcctttacttaaccacaatagaccgttggtaatgccgcataaacggctgcacaacgaaccaaatcatctttccaagttttttcatttggtgcatgtgcttgtgcttcggcccctggcccgaaaccaatacaaggaataccattacgtcccataattgaaacgccatttgttgagaaggtccacttatctaacaatgggcgttcttcacgcatttccactgtttctacagagcctttccgtgtttctccatagagatttttatgcgtttccatcaaggcttttgttacatcatgattttctggaattacccacgttgggaaataacattcaatttcataagttaaatccgtataagaaggacgatcatagttgtacattgaaaccgtcacatcatctccatattttttaacagctggtaaattgcgaatttcttctaaacaactttcccaagtttctccagcagtcattcgacggtctagtgaaacggtacagccatccgcaacagcacaccgacttggtgaagaatggaaaatttgcgaaacagtcaccgtaccacgtcctaagaaacgggcttcttgccactctggattgtacttaggatctaacatacgaactaaaccacgaatcgctgtgctttctgtatctccattgttgtttaaggcacgaacatcttgtaagatatccgccattttgtaaatggcattatctccacgttctggtgctgagccatgacacgaaacgcctttgacatcaactttaatttccattcggcctcgttgaccacgataaatcccaccatctgttggctctgttgaaacaacaaattctggacggataccgtcttctttgataatgtactgccaacataagccgtcacagtcttcttcttggacagtaactgttactaaagcagtgtatttttctgataatagacctaaatctttcatgattttagcgccataaatagccgaaacaatcccgccctcttggtcagacgtaccgcgaccaccgatctcagtttctgtttcatagccatcgtaaggatcaaatttccagttactcatttcaccaattccgacagtatccatgtgcccatcaaaagcaattaatttttcaccagaccccatataaccaagtaaatttccttgaggatcaatgtcaattttatcgaaacctaatttttccatttcggcttttgctcgcgcaattttgttgccttcttctgcactttctcctggaattttgacaaggtctcttaaaaatttgaccatatcttctctgtaaccttctgctgctgcatttactgcattaaaatccattccttttacctccataaaatttttttataattgtctggatcagtgtccccttcggtagaaaacattaaaacgtttgacgtctcatccagttgcaatgcctcatgtaattcttgatagtcgggatcttgcatcactgtagctactaagcccattgctactgccccagattcgcctgatacaacttgcggatccccttttaatggcgcgcccaacatacgcattcctttttcagaaacccaatctggcgctgaaacaaagaaggatgtatgattttttagaatatcaaaagaaatcgtattaggttctccacatgctaagccagccataattgtctgtaaatcaccatcgacaaagcgaatttctccgtcttttttaattgctgattgatataaacagtcagccgcctgtgcctcaactacgaccataatcggtgggttttctggaaaagcattagcaaaataaccaatcactgcaccagctaaactgccgacaccagcttgaacaaaaacatgactaggtcgttcagagccaaactttcttaattgttgagaggcttctaacgccatcgttccgtatccttgcataatccaagtcggaattttttcatatccgtcccaagcggtgtcttgaaccatgacaccgttttcagtttcttcggccattttattagccattcgcacacattcatcgtaattaacttcttcgattgtgacggttgcgccttctttttcaatattttcttttctcgtctgtgttgaacccttcggcatgagtacaactgatttttggcctaatttattcgcagcccaagcgactcctcgtccatggttaccatcagttgctgtaaaaaacgtagcttgtccaaaagctgatcgtaattgatcagaagttaattcatcatatgttagttccgaaacatctttctttaatttttcggcaatatagttagccatggcaaacgaaccacctaatactttaaaagcatttaaaccaaagcgataagattcatctttaacaaagaaatcatttaaccccagatacgcggccatatgattcaattctgctaatggtgtttctgaatactgtggaaaacttttgtgaaaagccaaagctttctcaattttttctttagacatcagaggtaagtacttatcctccgtcttcggcatttcatttgctgtccatttaattttttccaaaaatacttctcctccttctatttttaagttgctttacgaaaaacaaattttccttgatttgccaagatgacttgcccagcttcagcaactttttgacctcttaaataaaccattcgagcctgtccttgtgtttcaaatccttcatacggcgtataatcgacattttgtaactgcgttctcgcagcaatcacgccggttgttctgggatcccaaacaactaaatcggcatcactgccttcttgcaccacacctttttgtggatacatcgagaattgtttagcaatattttcagaaagcagagcaaccattttttccaaggtgattcggcccttcgccacaccttccgtgtaaattaattctggtctcgtttcaacacctggcatcccattgggaattttactaaaatcatctttgccaactgttttttgtccgtaaaaattaaaactgcagtgatctgtcgatattgtattgattgccccctctttaatcccttgccacaaagcccgttgatcctctcgtttgcgtagtggcggtgagcagacatattttgctgcttcaaaattaggcgcatcatacaagtgatcatctagtaaaagatattgagggcaagtttctacatagactgattgtcctctttgacgagcccgttccaccgcttctaatgatcgttttgtgcttaaatgcacaatattaaccggcaaatcagccatttccgctatcatcaaatatcttgctaccgcttctgcttcaacagccgccggtcttgataacggatgatagtgcggggttagctttccttgagaaacatatgattggattaattcatctactaaatcaccattttcacaatgaacgcctaacattccattaactttttttatttccttcatcgcttcaaaaatttccgcatctgtggtccgcaaattatcataagccatatacattttgaaggaagtaatacctgcagcaatcatttcctgaatttcagcagctatcgttggtttccattcaatcatggacatatggtaagtataatcacatgaactcttgccttcagccaattgattccaagtagctaaacagtctttcaatgagccgcctttattaggtgtagccatatcaataaccgtagtcgtacctttggccaccgccgcttggcttccagtggtaaagttatccgccgtacttaacgaacctttgccattatttaattccagatgcgtatgcgcatcaataaagcctggtaatacataacaccccgtaacatcctcaatctgagaattttctactggtaaatttgcccccatctctacaatttgctcgccgtcaattcgaatatccaattgacgacgattatatgcagatacgacggttccacctttgagcagaatagacatttatttatcccccagtcgtaaatttccttttatgcttgcatacaataagcatattcttcaatcatagttaccattaatgcaattaaatcttctggtacatctaatccttgatctgttaattgaattgttgacaccgttccccatagacgcagtaaacaaattttatccacaggattttgaacatagaaacctgaattagtactgtcataaaaatcagcttcactgttaaataaggtaaatttgtctttgtaaggggcacttgcataagggcaaaatgtttcacagttgccacattcgttacacatccgatcaacatggacaatttgtggttttccttcgacatacacaacaatatttgctcggtttggacagacatccatacaagattcacaaattgtggagcattctaagcaacgactagcttgactacaagacatctcgtctgtcacaaggataccccgtttgtttctaacaaatgcgacatcactatttaaattatctttttcatagtgatgattgtggacaagacaaatattattggccgctttggttgcatcagcgattgcttcaacaattgtggctggtcctaaattagcgtcaccaatgacatagacacctggtatatttgtttccaatgtttcttgatttgaaacgactttcccatagttgtctgtgtgaatgcctaatgcttggtaaaattctgtatctactttttcaccaacagcggcaatcactgtatcagcaggaatatcaatcatttctcctgtaccaattggtcgacggcgtccagaggcatctcgttcacctaggaccattttttcacaagttaattgttgattttcatgtttaattggcgaaagtaattctaaaaagtcaacaccatcttctaaagctaaataaagttcttcttcatctgctggcatattgcgtttattccgacgataaaccactgagacttttttaacaccaggtaatgttgtggctgcacgagcacagtccatggctgtatttccgccaccaacgacgacaatttgttctccgtaaggattaatcgttggattttctcgatttgcttttaaaaattctaacgagttcaatgctcgaccagattctaaacgaaggaccccatgtttccatgcaccaatggcataaataacattcgtatagccttggtttttcaattccgccaatgatggcgcctcttgtcctgtacggaattcggctcccataaattccgctaactgaacgtctttttgaacagattccatagaaattcgaaattctggtacaatctggctacaaacgcccccaattgtctcggatttttcaaacacagtaacaggcatgccttcacgtgctaataaatacccagcagagatccctgcagggcctccacccacaacagctgttttaggtgcattttcttttggctgtggcttttctagtgtcgtcaataattcatcataagcatgttcagctgcttctaacttcacttcccgaatatgaatagattcttcataaaattgacgtgtacatttagtcatacaaggatgtgcacaaatggttccagtaataaaaggcaacggattcttatcgacaattacttgcaaggcctttaaataattaccttcactgacataacgaaggtaagcaggaatatcctgattgattggacaaccaccgtcacttcgacaaggagcaatataacaatctgttaacggaactgtttttcttagtttggtactttctggtaatttaattgatttttggtaacgcgcttgtgttttagctttctcaacaacttgagctaatttatccaagttgacatggaccatctgaggatattctgctgcgcttaatacattagcaacttgattcattcgttgatagccaccaggtttcaacagagtcgttgccatagtgattggccaaatcccagcatcgaatatttctttactattgaaaatatctgcaccgccagaataagaaatttgtagtttcccatcaaatgcttctgataatttttgtgccaatgaaatactaagaggaaatagcgaacgtcctgacatgtacatttcatcaccaggtaattcatttgctgcaatcgttaccgggaaagtgttcgtaattttaactccgaagcttagatttttactattagctaataattgcagacgttgtaacatcggtactgcttcttcaaattgtaaatcttctttaaaatggtgatcgtcaaaaaccatataatcaaaccctagctcatccatcgtttgacgcgcatattcataacctaacatggttggattacatttaataaaggaatggagccctttttcacttaataaataggccgcaattcgttcaatttcgtctgatggacaaccgtgtaaagtcgacagcgtaatagaatgacagactttaggactaattgcttcgatatataagtcatctacttttttaaaataagatagatattttttggcagctgcttggcattccgcccaaatcggcgttccttctgcgttctgcatttcgttaatataacgatcaatttttggtgattgaatccctgccaaatcatagccaacactcatattaaaaatgaaaccattcgggtcacctagctcgaactctttactaagtaacttcaaaacgaaccatgctttgacgtattcatcataagcttggggaacgcgcaattctgtggaccactcaacgttgtaacattcatctgctgctgcgatacatggtttactcacaggtaaatcttctccatccagtatctggactgtcttaacttcaaaaaaacgagaacctgttaaataggccgcaataatattttgtgctaattgtgtatgaggacctgctgctggaccacaaggggtttccattttttctccaaataacgaaatcgtttttgtaggatccgcatgataaaatttacgaatgccaaaaattgtgccatcttgttgatactcactaaaaatccaatttaataaagcctcaattgagatgggatgcataatatcactcattaacgtcactccttttatttataatgaaagctattgatttactcgtttccagaaagattgtgcttgcgtttgcgcatcatgccaaactttctcttcatcaattccttgaacttcacgattacgcatccgaatttctccattaatcaccgtgtcagtgaccatcccaccattcatgccgaataaaatgtgcatgttataattctcttttgtcattggtgtcgggccatgataatcaacaataatgacgtctgctgctgcattaggttctaaaacgcctagctttgttttaaaatagcgattagccatttgcggattattatcaaacagcattgtgggaatttctgcccaagccgcatttggatcagctaaatgatgtttgtggataacatttcctaccttataggattccgtcacatcattcgtataaccatctgtgccaagacccatcaaataccatactcattaaacatgcgcatcgcaggtgggcaaccgaccgcattccccatattcgactctggattcgtgaccaccattgtgtctgtatctcttagtaattccatctcatgaggtccaatatggatgcaatggcctgccattgtctgttttcctaaaatccctaaatcaaataatcggttcacaatcggcttcccatattttttcaaagaatcatgaacatcggctaaatcctctgcaatatgaatatgataaccaatcccatctggcgtattggctgcacataattctaaagaagcatctgataaagtaaatgctgcatgcatccccatcatcgctttttgcatatcatcatttcttaaggaactggctttaataaaggcggcattttcttgaactgcttcccgcattttctgctcaccatcgcgatcagaaacttcataacaaaggcaggtccgaatccctaactcgtccgctgcattagataattgggttaaactccctgtaatttctccgtaactagcatgatgatcaaagacagttgtaacgccgttgcgaatactatctaaataagcaaccttaccactttgataagtgtcttctaatgtcaaggcacgatcaattcgccaccattgatctaccaaaatatccatgaaatttttaggatgataattcgttaaacttaacccacgtgcaaaggtactataaatatgattgtgcatgttaataaagcctggcataatcactccacctttagcatcaataaatgtcgcttctggataagcttgttttaattcttctgttgttccgacttgtttcacaacttgaccatcaatcgccacacacccattttcaaaaaaatgattctgcgcatcccgagtgattaaacgcccatttccaattaataacatgtattcttctcctattttccaacctattccccacgtttagcaaacgcttacaaatcaatcgctcaatcattcacgaatatagcttgtctagcttttctaatctatatttcctacgaaaagcatttgaagcgcttgcatttttttactaacgaactcattaacttgattaaagtatatcaccttaccttaaaaaaaacaatgctacctaaaaaatattttttagaattttgacagccgttatcttgtattattatttttatcatgctatcattatttttcagaacaggtagtacgcgacattaaaggatttagccctgcctattccatttaaaaatattatgttaaatttgacacaatcttataaaaactgtttgtgccaggcacattagaaaggagcttatttatgttaaccgacgaaaaacttacttttttaacacaaat

SEQ ID NO: 380 - DNA, 1121 bp; double-stranded, linear
ttttggtatgaaacagaaaaagtggttaatcggacttgttgcactgggcttggttttagcagcatgtggaagtggcggttcgaaaacgacctcaaacgaaccagctacacagaaaattaacgtcgcatctggtggtgaactctcgacattagacagcgctcattatacagatgtctatagttccgatatgattggtcaagtagttgaaggcttgtatcgacaagataaaaacggagatcctgagctagctatggcgaaagcagagccacaagttagtgaagacgggttagtctatacattcaagttacgagaagcaaaatggacaaacggggatccagttaaagcaggggattttgtagttgcgtttagaaacgtggtcgatccagcatacggttcaagtagcagtaatcaaatggatatttttaaaaatgggcgtgcggtgcgggaaggacaagccacgatggaagaatttggtgtcaaagcaatcgatgaccagacactagaactaacattggaaaatccaattccttatttagcccaagtcttggttgggacaccttttatgcctaaaaatgaagcctttgccaaagaaaaaggtactgcctatgggacttctgcagataattttgttggcaatgggccgtttgtaatttcaggttgggatggcaattccgaaacttggaaattgaagaagaatgatcattattgggataaagaacacgtaaaattgaatgaaattgatgttcaagtagtgaaagaaattggcacaggagccaatctttttgataatggcgacttagattacactgttttagcagatacttatgcacttcagtataaagagtcaaaacaagcgcattttgtacctaaagccatggtgggttatttaagccccaatcatcgccgtgaaattaccggcaacgaacatgttcgaaaagcttttttacaagcgattgacaaagaaacttttgcaaaagaaattttaggagatggctcgacagctttaaatggktttgtaccagctaattttgcaaaaatccagatacaggtgaagatttccgcaaagaaaatggtgatttattgccatataatattaaagaagcccaagctaactggaacaa

SEQ ID NO: 381 - DNA, 1278 bp; double-stranded, linear
ntcattgaatgcncggaacaacggaagtatggatggcgacccaccagcggcgatgcgttatacagaagctcgtttatcacagttaagtggtgagttgttaaaagatatcgacaaaaataccgtcgatttcgtctggaattttgacgatacagaaaaagaacccactgttttaccagccaaatatcctaatttattggtaaacggctcaacggggatttcagcaggctatgcaacagaaattcctacgcataatttagcggaaatcattgatggaactgtgtatttaattgatcatcctaatgcaagtttagagaaattaatggaatacattccaggaccagatttcccaacaggtgggattctacaaggaaaagcagaaattaaaaaagcctacgaaaccggccgtggtaaagtaattttacgtgcgaagacaaagattgagcctttaaaaggcggcaaacaacaaattgtcatttctgaaattccttatgaagtcaacaaagcaacgctagtgaagaagatggatgaaatccgtttaaataaaaaagtagacggcattgccgaagttcgtgacgaaagtgacagaactggcttgcaaattgttgttgaactaaaaaaagatgtcaatgcagaaggtattttaaattatctatttaaaaacactgaattgcaaatcaattacaactttaacatggtagccatcgacaacatgaccccgcaacaagtgggcctaaaacggattttagaaagttacattacgcatcgcaaatcagttatcattaaccgttgtcaatttgagttggacaaagctcgcaaacgtgagcacattgttgctggtttaattaaagcattgtctatcttagataaagtgattgcaacaatccgtggcagtaaagataaaaaagatgcgaagaagaacttagtatccgactatgcgtttactgaagaacaagctgaagcaatcgttactttacagctataccgtttaaccaatacggatattactgatttacaagaagaagcgaaaactttagaacaacaaattgctgagttattgaacattttaaacaatgaaaaagaactattctcagtcatgaaaaaagaacttcgcgaagttaaaaagcaatatggcaatccgcgcttaactcaaattgaagaggaaatccaagaaatcaagattgaaacagccgtgttagttgcgcaggaagacgtggtcgtaaacntgacgcacgaaggctatatcaagcggagtagtattcgttcttatacagcatcaaa

SEQ ID NO: 382 - DNA, 4184 bp; double-stranded, linear
actttttgcttaaatttcgtgatgttttgcactgactattcttcctctttttggtaacgataaatgattcgtccatttaaccccgcttctccaacaatttccgcgcggtcaggtaaagaaatccaagcatcacgaaattggaaaaattcattttgctccacgattaattcagagatttctccagcttttaatgaagcaattttttctacaaaaggattttcagccattgatttcaccactctttctcttaaatatcaactcttatagtttacttgaaaatggcgcaattgtctgtaaaaaaatcgaatctttgcctttttttaaacaaagtcttttacttgattctcttacaaaaaatgctataataacctcaaaggtcaaaaatggtcaagtggttttatagacagaatttattcctgctatctagtacttggctggtttgaggaaaaatggtctgtttattagaaataatagagcaaacaactatttttctggcctcagttattttgaaaggatgtgtttcattcaatgatttgtcaaaattgtcaacaaaatgaagcaacaattcatttatatgcaaatgtgaatggtcaaagaaaacaactggactattgccaaagctgctatcaaaaattaaaaaatcaagcaaataattcccctcaaaatatgggacaagacccttttggctttgggagtttagacgatttatatcgttctctttctcgccaaatgcaacaaggtaatccttatgaacaacaaacaccacccactcaatttggtgatggtggtaatggaggtcaaccccctcgcggaggcgctggcgctggtcaaggtttactaggcgagtatgggattaacatcaccgaagcggcacgccaaggagatatcgatcctgtggtaggacgtgaccaagaaattaagcgtgtcattgaaatcttaaatcgccgtacaaaaaacaaccccgttttaatcggtgaaccaggtgttggtaaaacagccgttgtcgaaggtttagcccaaaaaattgtcgatggcgatgtgccccaaaaattattggacaaagaagtcattcgtttagatgtggtttcacttgttcaaggaactggtattcgcggacaatttgaagaacggatgcaaaaattgattgaagaaatcactgaagctgaaaatgtcattttatttattgatgaagtccatgaaattgtgggtgctggtgctgctggtgatggcaatatggatgctggcaatattytaaaaccagccttagcacgtggtgaattacaattagtcggtgccacaactttaaatgagtaccgtattattgaaaaagatgctgccttagaacgtcggatgcaaccagtccaagtagatgagccaaccgttgccgaaaccataacgattttacatggtttgcaaaaacgttatgaagattatcatcatgttaaatatacagatgaagcgattaacgcagcagcaaacttatccaatcgttacattcaagatcgctttttaccagataaagcgattgacttgttagatgaatctggttcaaaaatgaatctaactatccaactcgtcgatccaaaaacaattgataaaaaattagcagaagcggaacaacaaaaacaacaagcttccgcagaagaagattttgaaaaagcggcttattatcgtgatcaaatcaataaattacaagcaatgaaagaaaaacaaatcagcgatgaagaaacaccagtcatcactgaaaaagatattgaagccattgtggaacaaaaaactggcattcctgtcggtgacttaaaagaaaaagaacaaacccaattgaaaaatttagctgttgacttaaaagctcatgttgtcggacaagatgatgccgtcgataaagtagctaaagcgattcgtcgcaatcgtgtaggcctaggcaaacaaaaccgcccaattggttccttcttatttgttgggccaacaggcgttggtaaaacagaattagcaaaacaattagcttttgagctattcggttcagaagattcgatggttcgttttgatatgagtgagtatatggaaaaacacagtgtttctaaactgattggttctcctccaggctatgttggttatgacgaagctggacaactcacagaaaaagtccgtcgtaatccttatagtttaattttattggatgaaattgaaaaagcgcatcctgatgttttacacatgtttttacaaattctcgacgatggtcgtttaacagatgcacaaggtcgtacagtcagctttaaagacaccatcattatcatgacaagtaatgctggaacaggagctgtggaagccaacgttggcttcggtgctgcccgtgaaggtgtgactaaatctgttttaggtcaattgaacaacttcttcacccccgaattccttaaccgtttcgatggtattatcgaattcaaagcattaagcaaagaaaacctgatgaacattgtcagcttgatgttagaagaagtaaatggcttattagctaaacaaaaattacacattgaggttccaacagaagtcaaagagaaactcgttgatttaggttatgatcctgcaatgggcgctcgtcctttacgtcgaacaattcaagaacaaattgaagacggcattgctgaatactatctagatcatcctgaaaatcatcaattagtcgcagcgttagataacgaaggtaaaattatcgtaactggcgcacaagaagtgactaaaacagaaacttcaacatctgaccaagcagaataatcaaaaatccacacgcattaataacaatgcgtgcggatttttttatgcttttcactttttattttcatcaaaaaaactataatagaagaaagatattcgtatacttgttcctcatagaaaaaattcaatctggaactcctgtacataattggaaacgctcttttgcagcacacaactataatgaggtgataaaatgaaattagtgaatgtgaccaatagctacaaacaattagtaaataaacaattggaaaacacggatgcttactttgtaaaagtctactcagcaggaaatacgaccgctgtctattcagaagcagctcaccatgtggaagttctgattatgaataaaaatcgtcgcattcgtccgacagaagtaaaagaaattttagcaaaactgttaaaacgattacctaaagaggcttatgacccagatgaaatttctatcattgagttaaaccatgtgaccgaagtgtctgttccattaaaagtttccctcatggaaaactaaaaaaaactgccgaagtttccccacttcggcagtttttttaatttattgtgacgttattttttttacaagactttgataattttccgaccaggcttcctcatttgtcggactgactaatttattttcctcgattgctttttttcttaagtcatccacttcttttttgaaattttcccccgatttttgagcataatctttagaaaaatattttgattggcgagaataagccttcagtttcgcatctttaatctcttcttctgtatctgcaaaatattcatcataacgaagatcggttattttccctgaatcttttaacgtaataacagttaaacgtccagaaagcccctcctcaaaatcttctgttagacttgtataatgttcttttgaaggttctttgatttccttggctaaagccctagcagcaggaagatagccattattagcgctattggattgacctttggctgtctggaaggcgccatctaggcgattttcagcaaccatttgattttctagaaaagtcatcgtattaacaacggtcactaacgattgatcagttcgggcgttgttcgcttgaaaatttgcatagccggataaacgttttgtcactcctgcccattcttcagaataatagtttttaggtccacgttcatcaaattccactaactgaatttgttgatccttaacaacgacatcaattaaagccgtatagccgccatcaaacacgacttcatgatgataataatccccttgaacttccccgatttctggacgacctgaccaatacatcttttgagctttttcttctggactaattcctgattgtccattattagcttctactgtagcgccagaaacagcatcaacttcaaaggtatgtccattacgctcataactcactttggca

SEQ ID NO: 383 - DNA, 6159 bp; double-stranded, linear
aaaaacacgtgtgtctgttccataatagacacgtgtaggatctgcgccaggaacatataaaacggccatcagcgtcaccgaaattaaagcgccgattaaaactaagctgaaaattcgaccgcgcttacgaacaaagcgttccagaagaataaaaagtaatggccaaattaaataattttgcgcttcaactgccaatgaccaaatatgtacaaatggcgattgtgtcgcaaatccatcaaaataagaaaaccctttaaaaatttgccaccagttgttgtaataaaaaatactactagcgacaacgctgcgaatattgtttaataaatcctgctgaaagagtgtaatataactaactgcacttaaaagcatcacaattaatgctggatacagccgtttcatccttcgcacataaaatccttttaaatcaatggtctgattttctgcccattcttgccgcaacaagtcgttaataagataacctgaaacaacaaagaaaatcggaacacctaagtagccacctcgcatgacttggggaaaaaggtgatacaaaatcacgccaattacagcgatcgtccgaatgccatcaaaacctgtaatatagcgttttttcttgctatttgctgtctgattcatttgtgctttccaacttttctataaaattawtctttkccyttatttaaagaagcaagtaactttaatatacgttttttcctaggaaatggcaagcaaactttgcctcctttaggctttttttacaattcaaaaaaccagcattttttaaatcacaaaaaaacaaccaaagcttatgaaaatcactcataagctttggttgtttactcatatcgttttcgtttagakgargatggaatccctagggctycacgatwttttgctaccsttcgccgggatatttccakgcckgaatctttwaatcgctcgactrattttggatccagataacggtttactttttacttcttgatcaattaatttttgtagttgctttttaaccatcgttgttgagacatcctcgccatcttcttctgatgaaagaatacttgttgagaagaatgagcgcaattcaaagacgccaaacgtggtttctagatattttccattgaccgcacgactaactgtcgattcatgaatagacaaagcatccgcaatttcttttaaagtcattggttttaatggccgatctgcttctaaaaagaaggcttcttgacgacgcacaatttcttgccctacacgtaaaattgtatccccccgctgattcactgcgcgctctaaccattcaaattcgtttttcttatccttaatatattcttggacttctttgtcgtcagtctcttgcattcgtttgaaataattttcttgaaaatttaatgtcggtcgaccagctttgttggaaatcaccactattcgatcttccttgattcggacagttaaatctggtcgaatatacaattcctcggtcgcatcaaaaatattccctggcgctggcgataacgtttgtatataatcaaaaatcaattgaatttctgctaattcaatcccgaattttttagctaacgggccccatttacgactcactaaggcatcaaattcttcctccaataaaatatacgctaaattaggcgcggtatcgtctcgttctgtttgtagcatcaaacattcttgtaaattgcgtgcccccacacctgctggatctagctgttgtaacaaagttaatgcatctagcatttgaatggcgcttgcttcggttttcactgccgcttcttctaacgaaatcgttaaataaccattcacgtctatatattctactaaaaacaataccaatgttcgcaagtatgtatcgcggtaattcaaatgaatttgatcaattaaagactcaaataatgataaatgatagtctggaatttgattcatataattattttcttcgtcttgattggtgtaagaacgactagttatcggaaaatctgtggtgtactgcgtgtctacttgtaaatcaatcaatggattctctagtgctttcgcttcaacaaaggcagcgagttcttccgtattaaattgtaaaatttgaatggattgttgaagctgttgagtcatggccaacttctggacttgtttttgttgttgggacattcgttgctcaaatttcattattttcgtcctccctcttgtaatttttgtcaatatcagctaaactagtattcgtgccgcgcccttagtgtagtggatatcacgtaagattccggttcttgagacgggggttcgattccctcagggcgcgttatttaaatatgttgatttatcaacgtttctggacactctttattcatctaaagagtgtttttttcttgtttaggaatgatttttctatccgtatttttttcaaatgttgcttgtggcaagctcaatcgcacttaacgcgacaacatttgttctgcttcagctacaaatccaataaggttaaaattcctccgttcctattgtaacgcataacgtttcctttttctatctgctaaacaaagtattacgacaagcaaacacctgcttctctcttaaagttccctttctgattatatagtaaattgcttttaatttgttaattattttacctaaaacttaataccctaattaaataaagaacctggggcaaaaatcactttggatttttgtcccaggcttaaaacctgataattggcgggaacagaaccgttcagctccgacctctaaaatacttaattagaaatatactaccagcaatcacaccaattatgattactagccaaaataatccacttacaagtaacagctcagttaaggtcgtcttcagattctcctcctttaaatggcctctgctttgttttgctatgtaattaatggcgagatcagacaacagctatcaaaaaaacggaccaacacgtggtccgttttcattcattattaagcttttacgatgttcgttgcttgtaagccgcgtggaccttcttcagtatcaaaagttactgcttggccttcgtctaaagttttaaatccatctgattgaatagctgaaaaatgtgcaaatacatcattgccatcttcacctgtaataaatccaaaacctttgtctgcgttaaaccattttactgtaccgttgttcatatatatttcctcctagtgcataaaaatatgcaagttattgcaaaaaatgttgagtggcaaaaggagaagtatagtttttaaatatataactcaaattacttatcaaaattgattacttaattactataacatatttattaggaataaacaatgcccacgactcttccttggactttctaaaataatcaaagatgcgcttgacaaagccctagcaaaaaacactcctattctctctatttccagttagttttgtttaactttaaataatcactacgcgccaaataatcaaatagcggagctaatcctggtgaaaaatttacttcctcaaaccgcttaataaattgtacgcctttaattttatttggttcgttcagggtcacttttccttgggcttgtttggcaaaataaaaatgtccttgccaaacgattgaatcaaaaacaagtggtccagtaaaaatttcttcaagttcagtaatttccactgctaattcttctttcatttcacgaatcgcacattccagcgctgattcaccaagttcttgttttccgccagggaaattccatgtgtctggccgatcttttaaaataagaatttcatcagattgatttttaagaagtactcgcgaaaattcttttttcatttcgtttaaccctcttcttcattttttattgagaagccacacttggtagcataaaaatataatgcaaaatacgatccgcatacgacggatttttttcaaagtcattgacttcttcattgactaactccaaatcatcggtaatcactccagcaacgtccataaagagcattttactcaatacctctgagtcattaactgtccaagcataaactgcttttttctgttggtcagcttttaaaatgaaggtatcattcaacgtagtagcttccattgtatacaaatcagcttgtgtttctggaaaagtgaaattatagggcaaaataaaactaacttttacttttgatttggcttttttaaacgctttgatcacattgtagtcgagagattgaacctgatggttattctttatcagaggacgttcatatttttcaataaagttagaaagcgcaccttgactatcttgtttagacgttttaatttctactagtaatttttgtttggcttggtttgctttcgctaaataatcatcaaaactggcaattggtgcttcttggccattttctttaacggtcatttttgttaattcagccaacgtaaattcttgcggcgtgccatcaacgccggcgagttcttgaaggtttgcatcatgcatcacaacaaattgatggtctttggtttcttgaacatcaatttcaatataatctggtttaaatttaatggttctttccatagcaggaatggtattttgtacgccattactattggtgacccctcgatgcgaaataatcaaaggttttgattctaatagccctgttaagtaaacagcgttgaaaattatatagccgccaaaaatggtgaatagtcctaggcccatcccgatagtcactaatttattacgtttcgtttctttgtcaaaggcaacttttgtcgtcgtttctgcttgaacatttaattgtgtatataagaaattaatcagtaatactgaaagccaagcattagagacaaactgtaaaaattggacaacggttaaatttaaaatcccacctagcaagctaatggtatcgctcaaggtatctaacttcaactgtagaagataaagtaacacataaataacatacgttgaaacaaataccgcgatcgtcacaaatgcaatattacgaataatgaaccataatcgtttgtttgtcattgaccaactagccttaactgcctcgcccgctttttttctctccagaatcattaatggaagcgtgtaaatgaaacgaatagctaaataccagacnnrtaacccaaaggccagtaaccccaccaagtaaggaattcgttgggacaaaaattcaacaataaaatctggaatcacaaatttcgtcaatagattactttggaaaatcaggttaccaaaagggacaatgacaacaaaataaccgaaaaagaataaccacgaacgggcaccttgctttttaagaaccttaaaagatgccttggtaactcctttaaaatgaaagcgatggtcttgccgtatttgaaaaatccctaataataaaaaggtaaactgataaaaaactgcacctaaaaaaagtaacaacaagagaattaataacaccagagcaagcggcttttctaacaataaattcaggttattaaacgaaagataaggaataccttgagtttttagtgcgttggaagtagcccaactaaaagccccacccaccaataataataagacatttaaagtaaaaaataaccataaatactgcaagatgtctttaaaaaattgccttgttccatttttaaatgtttgccaagcagacatacaaactcctccattctaaaagtatctgattaaagttcttccatacgaagcctaaataaaacaacggcaatccaaattgaaataaatgatggcaaaataacaataatgatttcgactggctcatcaatagttccttgtaacgtattttttacttctgaagaaacaataaactgatcaaaaatcacttgataaatagtaacataaatcaatacccattgaatataatattcaattattttcattaaagcgatgggtaaaacaatttttttcgtcgttaaattcaataaaaaatataacaaaagactcgtactgatgataacgactatccctaaaagaaataacgactctaaccgctgccctattacgtttgcaacgcccattgttaataataaatacatagctaccgaaattaagatgctcacacttagcataacagaaaacaaaagtaatgccttaagaaaamsccacttatcaactcttttatttccaatcaataaacctaaaagaatcaccgacaaaagtaaaatcaattcaatcattcgttcctcctcc

SEQ ID NO: 384 - DNA, 1366 bp; double-stranded, linear
gtaatagcagaaatgaggaaaagaaatgcagaaagaatccatttatggactgacgagagaacagcttgtggactggtttttagcccatggcgagaagaaatttcgcgcaacacaagtgtgggaatggttgtatacaaaacgtgttgcttcatttagtgaaatgtcgaacatttctaaatcattgatgactttattagaagaaaatttttcattaaatccattaaaacaagtcattgtgcaagaagcacaagatggtaccgtaaaatatttatttgaattaccagataaaaatatgattgaaacagtcttgatgcgtcaagaatatggattatctgtttgtgtgaccactcaagttggctgcaatattgggtgtacattttgtgctagtgggctattaaaaaaacaaagagatttaactgctggcgagattgttgcccaaattatgtgggtgcaacattatttcgatgaacgtgggttggatgaacgtgttagccatgtcgttgtgatgggaattggtgaaccatttgataattatgccaatgtcatgaactttttacgaacgattaatgatgataaaggcttggctattggtgcccgtcatattacagtttcaacaagtggtttagtgccaaaaattcgtgaatttgcagacagtggactacaagtaaacttagcaatctcattacatgctcctaacaacgaattcgtacatcaattatgcggattaatcgtagttttccaattgaaaaattaatggcagcaattgatgaatacattgaaaaaaccaaccgacgtgttacatttgaatatattatgttgagtcaagtgaacgaccgaccagaacatgctcaacaattagcagatttactacggaataagaaaaaactttcttatgttaatctgattccgtataacccagtgagtgaacacgatcaatatagccgaagctctaaagaagcggttttaaaattttatgatgtactcaaaaagaatggcatcaattgtgttattcgtaaagaacacggaacagatattgatgcggcttgcggacaattacgcagcaaacaaatgaaaaaagaaaaagtcmaaaaccaataacgtagttaaaatcggatcagaaaggtttctttttgattcgatttttcgtttatttaataaaaaatcgtcggtttttcaattcttgtttataaacaaaagatgratgcyctaaaacttttatgacaawtttyctttttgtggttttcaancttgaaatyctaaaaggaaatagctatactggaaaggagatccgtcnccngattttttcctggaaaccgcctattattttccgntanccttttccaaaaagntgggaattttggtacgc

SEQ ID NO: 385 - DNA, 1022 bp; double-stranded, linear
catttccgattatgccggcgtttagttttttgaaaatcgattttagtgatattccgattctactcggaatgttcttgtacggaccgttagcaggagtaattactgcttttgttcgttcgttgctacacctgttcttaaccggactagcaccgcaaaatatggtgggagatttcgctagctttttagcaagtagtatcttcaccttgccaattttttatttctttggtaaaaagaaaaatatccgtacaaatcggatagtgggcttagtaagtgggatcttagccttgacaattttcatgagtattgcgaattattttgtcattacacccatttacttacaattatatggtgtgaccacacaacaatttttaggaacatctttagcaagctatgtggcgattggtattgtgccattcaaccttattaaaggcctcttagtcagtggtgtttttctagtactacatgcgaagttattgccatggctatcaaaaaaacaacatactattcagaaaaaaacaccgttaacaaaataaatgataaaaaacctgctgttgaacaatgtttgacagtgggtttttaaaatttacgcctaaaagaaaagaggktgtcataatctgtcatcattctgttaaaaaatactaaaccatctgcattgtaattttaactttcccttggtatgatagaaatcatcaaagaaagaggagttttcctgagtgaaaaagtgtaaaaattgtcgtcacgtgaatcgtgatacggagtccttttgtgaagaatgcggcgctccgctaatgaatgaatcaatgcatcaagaggaaaaccaagcacaaccatcaatgaataaaggggacgatctactcctctcagatcaaaaaagaagctggatctgggcgttccttttgtggtccatccgtcctggggccgggagccnatttcctcgggaccgccatnattttccaaaggaccaccaaattccctaatttaattgaagccgattgaggaatnggggtgncccaaggaattaa

SEQ ID NO: 386 - DNA, 8145 bp; double-stranded, linear
tggttcaggtaaaggtcgttttatttatgaaatggctaaagcacatcctgaaattaattatattggtatcgatatgcaattaagtattttatcgattgcattagataaactagtggccgatccgttacctaatctacagttattgcgagtagacggcgaacattaacagaatattttgctgaaaatgaagtagatttaatctatttaaatttttcagatccttggccaaagaaaaaacatgaaaaacgtcgtttaacgtataaaaactttttagcgacagatgaaattattttaaaaccaaatggagaaattcattttaaaacggataatcaagggctcttcgaatactcattwagtagcttttctaaatatggcatgattattgaacgtgtgtggctagatttgcataatagcgagtttgaaggcaacattatgacagaatacgaagaaaaattttctagtcgtggtcaacgaatctatcgagtagaagcacgttttgttgcaaaataaaaacaagcattcctttattttaagtgaaggaatgcttgttttttattatttaagaaagcctaagttgtcgttcttagagcataggcgtccaataaaattctggccagaatggataatggtaaccgtgaacgcacttcataatcggggaaaaaggagccttctgatttgaagcctacgaacggaatttcaatgtatttcattaaactagagtgtttgcttgcagttaaaaggatagtcccaatttctgagtcgtaacagtttttaccagcgacaactaattcttgggtttctccgtttaaagaaacaaaaagagccacatccttttttgataactttttactaatatttttaataatttctgggtccgtatgcagttcacagtatttgccagccaattgaaacttaaccatcatttcctgagcaattaattctgaaaaacctctagcaaagataataatccgtcgagaagccttgattttttggatcgcatcttcgatattaccaatttcaatcatgttaatcgtgcgagttacttcttcttcattctttaaaatggctgtccgaattcctcggtctactttttctaatgctgaaaaatttatattttggttttctttatctttcaagtgatgcttgaaggatgtgaaaccttcatagcctttctttttcatggttcttacaatcgtcgcagttgatacattggctcgttcgcttaattttacaatggaataatcagggatttctaaaatatgtgtttcgataaaatgccagagatattgctctgactcactcaatttttgttccataatgaccagcccttctttctttcactaaaaaaacatttataagcctatttttaatgaaaaaaaataaaaaagctagagaaattatgaaattgtaaatgttttctatatttttgcgaaagaatgaaaacctttacatggcattttgagacataataaagaggagaaaggaggaactacagtgactatttatacatgtacattaaatttagccattgatttatttatcgaaacagaagagctagttccttttgtcgtgaatcgtacgaaggaagatgatattcaagcaaacgggaaaggagtcaatgtttccctaattttaaagatgttagggattgataataccgctttgggagtcaaagctggtttcactgggaactatgtcgaggactatttaaaagaaaaagaaataaccactgattttatcgaagtcgctggtacaacgagaattaatgtgtttacaaaagttacccaagatcaaaaggaatacaaattagtcaataagggaccaaaattatctgaagaacatgtacaacgttttttgaaaaaaatttcagagttacgtaaaggggattatttgtgcgtatcaggaagtttaccacaaggggtttcgccaagtattttgattgaaattagccgaatttgttttgaaaaacaggtgttcttaatcttagacagtagttatgaagaaattttagattgtttgccttatcaaccatttttattgaaaccaaatgaagaagaacttcaagagtggtttcatacagaagtgcagactaaggacgattacattttttacggacaagaattactgaagcggggagccaaaaatattttactttctttaggtagtgaaggggctttatttatgaataatgaaaaggttctttcaggtaattcaccaactggaatggttgtgaatacagcttgttcaggggatgcaatgttaggtacctttttagctggttggcatcaaggactttcattggaaaaaaatttgaaaagaagtattgcagcaggtagttcaacagcatttcgcaaaggattgacagatttttcagatgttcaggagttagagcaacaaataaagattcaagaggaggaataaacagatggctacgtatcaattaatagctgctacaggttgtccgacgggaatagcgcacacgtatatggcacaggaggcattggaacaagctgcgaaacgtaaaggtattacgattaaggttgaaacacatggtcagattggtatagaaaacgagttaacacctgcagaaatccaaggagcggaggcagtcattattgccgccgacaaagacgttcaagcagaacgttttgctgggaaacgaatcattgatgtccctgtcagtgtgggaattaaagaagcagatcgcttaattgaagaagcgctcgcaggcaaaggatcgattgcggccgaaaaccaagcagtggatgaacttgaacaggaaacacagatttcttcaggaaatgttggacatagtatttataaaaacttaatgaatggcgtctctcacatgttgccgtttgtagtagcaggcggcgttttaattgctctttcttttgctatttggggcatttattcatttgatccagaaagtagtcagtataatgctaccgctgctatgttaaaaagtattggtgatgcctcaatgggcatgatggtgccaatcttatctgcgtatatcgcagaggggattgccaaacgacctggtttggttgtgggctttgtcggtggtttgattgctaacactggtggcactggctttttaggagggatattatctggttttcttgctgggtatttcattcttttattacaaagagtatttaaaggcttgcctaaatcattagatggtttaaaagcaattttcctttatccagtcattggcgttgcagttattggtatcactatgtctttactagcagatccgatgaaagctgttaacgaaggaatgatgagctttttagctagtttccaaaactccagtccgttggttttaggaattattgtgggttgtatgtgtgcctttgatatgggaggtccagttaataaagcggcctatgttactgggacggcactcttagctcaaggaaatacttcttttatggcaggagtttctgctgcctgcatagcgccacctttaattacaggctttgctacattattctttggaaaatactttgacacaaatgaacgcaatgcggggctagtgaactttattttaggctccacacatattacagaaggcgctattccgtttgcggcaaaagaccccttgaaggttttaccaattatgatgctcggatcttcaattgcggcagtcctaacgtatatgtttggggtacaagtgccagcacctcatggaggatttcttgttctaccagttgttactcacgctgttcaatgggttttggcaattttagctggttcattggtaggtggcttattgctaggttttgtacaaaaaagtagaatcgccaaacaagagcaatcgttatcaaaaaaatgaaataacaggaattaggagtggatggaatggcttttattaaagaaaatcatatttttttaaatcaacagttacaaacgcaagaggatgtttttcactttttagcaaaaaaatcaacagaattggaagttgctcaggacgcacaggaagttttcgataaactgaacgagcgagaacaagaaggaacaacggggatgatgaatggatttgcgatacctcatgcaaaagcagcaacgattcaacaagcggccattatcatcgttaccttggaccaaggtgttgagtggcagagtcttgacaaccaattaacggagtttgtaattgcgctgtttattccagatgccgaagctggcacgacacatttgaaattactctcttctgttgcgcgcctcttattaagagaagaagttacttctggactgaaacaagcaagttcgccagctgaaattgctacgttactaaataatcaattaggagagggaacagaatgaaaaaaattagtgaacaaaaacgtaaacatttagaaaatctggtagatgatcaagggattattggcgcactagccattgatcaacgtggggccttaaaacgcatgatgggaaaatacaaagaggtgactgcgcaagaaatcagtgactttaaagtattagtatctcgttgcttaacaccagagacttcagcaattttgttggatccagaatatggcctagctgctgctgaaaatcgagcacagacttcaggtttgttacttgcgtatgaaaaaacgggctacgatgcttcgacaccaggacggttacccgatagtcttgatgtttggtcggttaagcgtttaaaagaagcgggcgcagacgcgtgtaaatttttgctttactacgatgttgacgaaagtgaagcaatcaatgagcgaaagaaagcttatatagaacggattggttcagagtgtttagccgaagaaattccattctttttagaaattgtctcttatgatgcaaacaattcggatagtgcttcaaaagaatacgctaaagtaaaaccgcacaaagtaattgaagcgatgaaagaattttcaaaggatcgctataatgttgatgttttaaaagtagaagtccctgtgaacatgaattttgtagaaggttttggcactgaaagtctttatagccaagatgaagcacaggcctttttcaacatgcaaagtgaagcaacacaacttccatttattttcttgagtgcaggggttagtgctacgatgtttcaggaaacattgaaatttgcaaaaaaagcaggttcctcgtttaatggagtcttatgtggtcgcgcaacttgggcagacggcgtgcttccatttgttcaacaaggtgctgaagcagccgttgcgtggcttgaaacaactggtaaaacaaatgttgaagaattgaatcaggttttaagagagagcgcagtatcagtctttgaaaaaatacagtaattaagctgaaaatatatactgaatttaaactatttggtcatctgaattaaattttttcagaaatcgtcttctttaagtgaactcaatgtacgcaaactcaaaagatatgatataattatttcgatatcgatgtatgaacacccaaaaagtaacattgctttactttatttggggaaagttggggtattatgggaattcctaaagaaggcgagtttgtaaccattcagagttataaacatgacggacatttacatcgaacgtggcgtgatacgatggtactaaaaacgagcgagtattctttaattggtgtgaacgatcacacgttagtaacggaatccgacggacgtcggtgggtgactcgtgaaccagccattgtttattttcacaagaaatattggttcaatataatagcaatgattagagaaaagggggtttcgtattactgcaatctgcttcgccatatgttttagatgacgaagcgttgaagtatattgattatgatttagatatcaaggtttttccagatggtgaaaaacgtttactagacgttgatgaatatgaatttcatagcaaactaatggattatccagaagatattgacttcattttaaaagaaaatgtcaagactttagtggattggattaataacgaaaaaggccccttctcgcccgagtatgtagatatctggtatcaacgttatcaacagctatcaaaaaaatagccgatgtaaacagcccacaaaaggrgcttggagcattagccaaaatggctaatgctccaagcsctaaattttccgatttaattggtgttatagttctttgttcatttcgtagtgttcaatgccagcatccataaaaggtgctcctgttttttgataacctaaacgttcatagaagcctacagcggtgacttgtgctcctagagtaatcttgtggtagccttgttctttggcaaaattttccgccgcttccataatcactcgtccatagtcggcgccacggtaagctttttcaacggccattcgttgtaatttcataacgccattttctagtggaagcaagcgacaagttgcgacagctacatggttcgtgtacaaaacaaagtgaatacaatgtgcttcatattcatcgatttccatctcttctggtaccccttgttccgctacgaatacgcgttgacgaagccggacagcatctaaataaagatcactcatggtatcttttgtttgagctacatgcatngaaaaacccccagttcagaactgtktctattttaytatacctgaaaaagttctagcmatgaagtattctacaatgactgagggggggaaggtgtgataaataaaacgcaacaattgaataaanataaaggaggagccgctgtgattaatcgatttaaagaatcgaaattatttttctggtcagttgaattacttgtcgtggccatgctattatttawtgcttcgaaaattaatttcttatttgcaccgattgggacattcttttcaacgttgtttgccccagtcttagtagcaggcttttkgtattatttactaaatcctgtggtcaatctactaatgaagacgaaaatgaaacgaatttatgccgtcttactggtatttttattactaatcatcgcattagttctgatcttattaacaattatccctaagttggcagatcagctagctagtttagcatcaagtatgccggatttctttaaacaagtggagacctggatttatgagattgcggagttacctatttttaaacaaattgatttaacaagctatattgaaaaaatggatatttcttatgccaatattatccaacaatttttaagtagtttatcaagtagcttaggttcaatcgtatcaacggtggcgtcaaccactattgttttggtcactgcgccatttattttattttatatgttaaaagatggagataagctagtaccagcgattcaacgctttttacctgagaaaagaaaagatgatattgtggatcttttaggacaattgaaccaaaccttatccagttatattagtggacaagcgattgaatgtttatttgtcggtacatttacgattattgggtattcattgcttggcgttcgttatgcctttttatttggtgtcattgccggctttacgaatttgattccctatctaggaccttatctaggattagcgcctgctgtcttagtgaccatctttaatgaacccgtcaaagcagccttatgttgtttagtggtgctagtggttcaacaattggacggaaatattatttatccaaacgttatcggaaaatctctaaaaatccatccattaacgattattttaattttattggtagcaggaaatttagcaggtttgctaggtattttcctcggtgtcccattttacgcaatctgccggaccattatctactatgttattgatatggtcaaagcgggtcgtagtgaaaaagttaccaatgccgttcttttagggaatgaaacaaatacgaaagaaaataacggttaatgattgaatccgctaatctttcgtgctatgattttatggattaggatagaaaataacctgtcataatactgattgtgtctgtttctaagcctaaccataaaaagaggaagaacgttaaaagagtacgaaagtacagcctcggaattatcaacaattaaggagagagagaacattatgaataatgctgaccctgagagtcagtcgctaattgcgcaacttctattattagtcgtgttgacgtttatcaatgcctttttggcagcggcggaaattgcagtcgtatctgttaacaagaatcgtgtggaacaaaaa

SEQ ID NO: 387 - DNA, 3658 bp; double-stranded, linear
aaaagaggctttaacagccaagaacatcaaacctagtgatttagcgaaaaaaactggcatcggtaaatcttcgatcagcgattggctagctggtcgttacgaagcaaaacaagacaaagtttatcgcattgcagatgcattagacattaatgaggcctggttgatgggacaagaagttcccatggaaaaaaatgcctcaactatcgaccgcatttataaaaaattagaaccccaacgacaagccatcgtttatcaatttgccgaacaacaattacacgaacaacaaacgcaagcagaaattctctcattccctcgccgtgacgaaatgacactggctgcccacgctggggatccagaaaagatattttcaaaagaagagatcgagaaaattcacgattacttggatgaaattgatgccaaatatcaacaatcgatttcttctgacaaaaaagaggattaacttcccatctactctttttattaagtaatggcaggtgaatggtaaagtgaatgattatgaaaaactcgtcagttccattcaaaaggatgtgacggttttagaaattgatttatacaatcaaacaggttgttatgggttgtatcgaaatggcaaaatttatattgaaaaaacattgagtacccgtcaaaagaagaatattttagccgaggaatacgggcattatcaaacatccgttggcactattttaaatcaaaattgtacagaaaatcggaagcaagagttgaaagctcgcaatgtggccttagagcaattagttacattagacgatttaattcgttgctctgaagctggcttaagtaaccattattcttgtgctgaatttttggaaatcgatgttgaaacattaaaaaatgtgattacgtactatcgacaaaagtatggcgccacttatctttataaaggacggatttttgaatttagggattattctgtgatggtattaaatactgggttaacttaaaaagcatggaacaaaatcaataaggattttgttccatgcttaaaagtattctggaaaattcaagagcgttttttgtaccaatggttaatatgtccaacgccaagcataagattggggacaagtataaggacgaatataaatgacggccaaaatccgatgaactgaataatatgttcccgcatactatgtagtacaaagaagaaaagaaaaaagtacagggaactcttgcctgaacccatttcttttaaataacgatctccatttttatagaaaacaacaattcttttcatctttgcacctccatgactattttatcaagaaatcatgaaaagaaaaagcacaccattcgtctggtgtgctttttctttttaattattcaccttgattcaacttacgaatcaactcatcaatgtgatttccgtattggacagattcgtctctttcaaaaatcaactctggtgttttatacaaggttaaccgttgtcctaattctttacgaatcagtcctttggctttgtctaagccttgttgagctttttgttgttcggaagctaaatcagataacaagctgtaataaatcgttgcttgttgtaaatcaccggtcacacgaacatctgtaatagtgatgccttggacgcgtggatctctgatgcgtttgttcaagatatcattcacttcacgcatgatttcttgacctacacgacggtcacgataatttgccatagtgtcttcctccaattactaaaattattgtttgatttcttccataatgaagccttcaatcgcatcatctacacgtaaatcattgaagttttcaatcatagcgccacattcaaaaccaagtttgacttctttcacgtcatctttaaagcgtttcaagcttgctaatttaccttcataaataacaataccatcacgaatgacacgcacgccactatcgcggcgaataaagccttctgtaacataacagccagcgattgtgccaactttagatactttgtacaattcacgaaccgtcatttgacccgtaattttttcttcaaattctggatctaataaccctttcatcgctgtttcgatttcttctagggctttatagataatacggtgtaaacgaatatcaacttcttcttgttctgcttgttgtttcgcttgtggtgttgggcgaacgttaaagccgataataatcgcattacttgctgcggctaaagttacgtcgctttcattgatggccccaactgccgcgtgaacaattttcacacgaacgccttctacatcaattttttgtaaacttgctgaaacggcttcggcagatccttgtacgtctgctttgacaatgatattaacttcttttaattcgccttcttttagactttcaaataagttatccaatgtcacacggctacttgctgaacgttgttcaagcaacgcacgtttagcccgttcttcccctgcttgacgtgctgttttttcatcttcaaagaccacaaaacgatcacccgcttgaggaacatcatttaatccggtaatttctacaggagttgcgggtcctgcttctttatcacggcggcccatgtcattggtcatcacacgaacacgtccgtaagtattaccaacaacgattggatcaccaacatgtaaagttccttgttgaacgagtaatgtcgcaaccggacctttacctttatctaagcgcgcttcaatcactgttccaattgctttttgcgttggatcagcttttaagtcttctacttcagcaatcaataaaatattttccaatagctcatcaatgttttgattgaatttcgctgaaatattgacgaaaatcgtatctccgccccattcttcaggaattaattcatgttcacttaattcttgtttcacatgatcaggatttgcaccaggcttatcaattttgttaactgctacaataatcggcacttttgccgctttggcatggttaatcgcctcgattgtttgtggcattactccatcgtccgctgcaacaactaagatggtaatatcagtgatgctggcaccacgcgcgcgcatacttgtaaaggccgcatgtcctggtgtatctaagaacgtaattggtttgccatcaatatctaactgataggcaccaatatgctgcgtgataccgcctgcttcacctgaagtcacacgagaatggcgcaatgtatctaataatgttgttttcccgtggtctacgtgtcccatgattgtgacaacagggggacgtgtagttaagttttcttcaacaactgcttctggttcgaagaatttatcaatgtccgcaatatcaacttgaactttttcttgcggttccatgccatagtccacagctaataattcaattgtatctttatctaaggcttggttttggttaaccatgacacccatcataaataatttyttgatgatttccgctggttcgcggtggatttttttcgcaatatccgccacgttcataccttctgtatattctaaaacatctggtaattcacggaatttacgtgctggtactgctgggcttcgctgattcttgttggatgtttggccttttttcccttttttggttggaaacgattgcggttttggnttattaaaagttattccgggttaattacgatttggaaccgccaccaaaatggtggttacgggtttggccgcca

SEQ ID NO: 388 - DNA, 519 bp; double-stranded, linear
tttagaatatgggcaaatttcgtgggcttttttaacaagttcttctgctttagcttgatctaccccatcaatatgaacttctaattcagcaccaacgctaaacccatcttctccttggaataaggatacacgtgcagttactgtacttttaccttcgactttttcttgatccatcactaattctaatgcaccgttaaagcaagcactgtaagccgctgcgaataattgttctggatttgttgtattttctttcttgacacctggcgaanaaccgcataagaaaatgatttatccggtgagtgaacttctcctgcacgtccacccgtattaatgatagttgtttcatagatttttttcatgtaaattcctctcctttgtaaagttttacacttctgagaacttgttacttacataattattgtaggaaactttgccagatacagcaaacgttgtgcttgtgrataataaaaaataacattaacgtgtawttttgacgtgaaaaaggaccccatctatgat

SEQ ID NO: 389 - DNA, 697 bp; double-stranded, linear
tcaaaattatatccaactataacaacaatcatttcataccttatttctttttattttctgagtaaaactatgcaacatttaccacttaatattgcttacgcaagttggtcaggtttaggattagtattaacaacaattgtttcagttcttattttcaaagaacaaataaatttaataagcattatttcaattattttaataatatttggtgttgttttactaaacacattcggatcatcacactaattactttattccaatttccttttcggtagaaactttgacccctcacactccccaaagatgagccaccaggcaaaaaaacgccctggtgggcccactttgtttagtgtatatgaggggtcttttctttccgaaaagttttctcggcataaaagatcatctgatgttttttatctaaaaatcattatttttctagaaaatcgtatcattttacaacttttatttttgactgtataatctagttaaatcccgtaagggcgcacttatacgtcgataaatcgacgtgtgacgaaactgacctgcgtcagttttttaaaattaaatggaacggcttgagttatyccgagcagttaaaaaaattaatatgkgtgaatatcgctactgcattcttaaaaaagtggggcagattttagccccataactttttggattacatcgacgatacggcgcgaaa

SEQ ID NO: 390 - DNA, 3869 bp; double-stranded, linear
cttctggtkggcygctttctgcggtttctgttgtgccgttctcttcagtkgtcacacttggtttttcaggtatgattggctcaatcgtgccyagtgtttcactttcatctggattttcttcttctgttggtgagacatgaacttctggttggctgctttctgcagtttctgtcgtgccattctcttcagttgtcacacttggtttttcaggtatgattggctcaatcgtgcctagtgtttcaccttcatctggattttcttcttctgttggtgagacatgaacttctggttggctgctttctgcggtttctgttgtgtctgtcttttcacttgtttctgttgcctgttccgaagtaggtgtctttggttcccattcatctattgtctctaaaggaatgtctagactttcttctgttggcatttccacattttgattgccgcttgcctcgccttctacaaaaacatttttaacctgtgatgtatttttttcattcgttgcgtcttgattgtttagttgataattgatgtcataactattttcaaatgttgcttgatgttggcctgcttctgtgattgtcgaagtgtaacggacgataaaggaagtaaagcgtgctttatcccgataaaaacgtaagttaaagtcattatctgttacgaagtcaattttgccataaccttgttgctcaaactcggcaagtgaaatatatttagtttctttgtcattcacaatatcaaatgtaaaactctctttatttaattgttgaccacttccttgtcgatccgcaattgaaatatcttctgtgacatcggatttattgaggttcacatttaaaaaccaacgtacttgatttgactctccagccaaatcgcctactttataaaaaaacggatagtctcgctcaatttggccagtctctgtgttagtcactccttcaatcgtcaaacgttgagtcgccgttgctgttccgaaatccgtttctatcacattcggttgagaactattggtgataagcgttttaatcccgaaagaaaaatgcccattcacattatgtaaagattcaactttttcgttaaatgttgctacaacatgatctttatagataaaaacttcccctaaaccatttaaattgatttttcgtggtgaactatcgttctcggtcattccaactagtgcgtctggtaaagttaaagtaatagtatctccaggttttattttctgattttctttgtcactaaaagatactttaattgaggtcatctctccttgatataaagtagtgtgatctaattctactttgtcaacgattgaacttttgctcaattcggcgccaaacgaaattggaccaatcaataacgcccccgcaattggtagaatcattaccaacagtaacactaaaaattttacactttttgtcataaaaaattattcacccttcttttctcttattttttccacttagtggtctttttcagaagttgacaatagcaaaaagatatatctcacacaatattaatgctcatttaaatagcctttttttaaaatttctaattcactttctaaggaaaacggtttattatggtagttacattagataacatttgttacaaaatatctaatgctgccaaatttgagttgcataaataacatatttcacatcaataatgaataaaaatacttatttcatcctcattttgtttcccaggccatttattcttgttataataaagtttatgagataaggaggaaaagaatgaaaaattcatattttgacggtggtttagcaacgtatatcgggacttcaattttagcaaccttgattactgtctttacattaggcatttgcgcaccttggggaatttgtatgatgtacaactggaaaatcaagcataccgttattgatggtaaacgcctttattttgacggtacagctatgcaattattcggtcattggattaaatggcttttattaactataattactttaggaatttatggtttttggttgaatatccgtttgcaacaatggattacaaaacatacccacacactttcataaaaagaggaaggatgaactgagttacggtccatccttcctctttttatgaatatctaacagagtgttatcctactctttgaaaaaacaaggaatttatgctatactttgataagtatcaagggatacttatgttatttcgggggcgttacggattcgacaggcatagttgagcttgaattgcgtttcgtaggttacggctacgttaaaacgttacagttaaatataactgctaaaaacgaaaacaattctttcgctttagctgcctaaaaaccagctagcgaagatcctcccggcatcgcccatgtgctcgggtcagggtcctaatcgaagtgggatacgctaaatttttccgtctgtaaaatttagaggagcttaccagactagcaatacagaatgcctgtcactcggcacgctgtaaagcgaacctttaaatgagtgtctatgaacgtagagatttaagtggcaatatgtttggacgcgggttcgactcccgccgtctccatttttagaaaagtagagaaaaacaaaaaagagctaaaaccttataaaataaaggttttagctctttttttctataagcaagagaaggctcgttacctcctcttacacttcctatcacattatctttctaaaaccacttcattttctttttctattggtgattttgggtattgcatagaacatggctaaaaatattattgttatcaaaagagtttttaagatttcaatttctcctgaatctatccaagtatacacaaaagcgatgataaaagtaattactatttccgtaacatgatcttttaaattcattagcttagcccacattgaactgcccataaagctagttgtccagctacaataatagcattcgtctttaacccattggctttagcgaagcgtaatacagtcactgctaattctttccaggctttcttttgtgcagcttttacaattgcgctgatactaatcattgcaaaaaactcatctttgattttgttagcaacgcaacttcctaatgcattccaattaaaacgtgcttgaactactgttgaagcatcagaaatatttacatttaattcttcctcaactgaagaaatctcttgctgagcaaaattatttttgacatagtttttaaagttatcttccgtcactccattcgcatacatttcttccagtccttttgctacagcctcaacttctgaatcctctagctggtcagatgcataaacacttgtaccagcgctgataaaaatacctaatgtcattagtaatgccatcgccaaacaaaaaaatttagccttttttgtcacctgtaattccataaataaatccctactttctttttccttgttataatcataacaaggaaaaagataatttatcatcgaaatccctatttgatgcttatattttcctatatatcctagagctgatttttctcactagtgatcacatcaatttgaactaatgattcaaaaaaagacacaggttatttgaggtacgttcgaggtaatgctaggttctattttgaaaacaacgcagctctcttgaaatattttttgagcttgtctaaaccttctgaaacgaatatagaaaataaaaaaagagtcccctttctcaaggaaactctcaattgctaagtcaaaataacttcacgktatctaaatctttkaaatcaatcctatggttcgcggracaaaggagctaaaaacttaatagaataaatcgcacaaattccgacaataatatagataatttttgctaatggtgtgnttgcaccgccactaattgttgcaactaaatgcaaaatta

SEQ ID NO: 391 - DNA, 1347 bp; double-stranded, linear
ggaggaancgaatggtaaaaaacgattaattattgaagctgtggattctgataatgatttaacaattgaacaattgtttgaaaattataaagaagagaaggtgcatgtaactattcaagatttaggaaatgcggtaggaaatgaaaaatggtaaaagttcctcatcaaggtgatattttattgttgaatacggctcctagatcaggacatgaacaaacaggtaagagaccgtatattgttttaagtcatgatattattgcagattacagcaatgttgttattgtagctcctatatcaagtacaaaaagaaactatcctttatatgtttctattaatccttcttacggaatgaaaacatcaggtaaagtattattagatcaattaaccaccatcgattatgaggctagacaatgcgtgtttttagaaacagcacacgaaaaattaatcgatgaattattgctaaaagttagaaccgtatttcaaaaagtaaataaaacaaataaattttaactaataaaaaggcgaaaaaacgaacaagtcaaaagtttccgacttgttcgtttttttctatcgattaaatgctcccaccagaaagtaatgatacaggtaaaatataatccttacttatcttttctcccttaatctttttcaacaaaacatcaacaattagttttgcaagttcatcaataggttgtttaattgtggtcaattgtgaaaaaaattgttcaataaatgatgttccatcgtaaccaataattttcacatcttctggaatatttaagttgagtttttttacaattttcatagtaagaatagcagttaaatcatctgaaataaaaatgccatctggtttattagttgaaataatcgatttaatttccatctctcgacgaattgtagacaaactattaggaactttaaagacttttccttctggaatttggaaagaaaatcctaaagcacgtaaacctgtaggagaatctgtattatcatttccagtaatcataataatattttgacaaccatttttccgtaaaacgcttgctgccaatttaccaccttcaaaattatctgatgcgatgataggaacatttggtgctaaatttctatcaaaagcaataattggtgcttgaacacgctcatagtcagcaatcccaagattatgactagaagaaataataccgtcgacttgatttgcttcaagcatttcaagatattcacgttcttttccaggatcattttcgctattacaaataattgttttatatccttgattaaataattctatttcaagggtattcaatgagttccgcatagaatatgttactgatattagggaaaatgaga

SEQ ID NO: 392 - DNA, 5385 bp; double-stranded, linear
taacctgataatgtaatcgggtatcgtcttgacgaccttctaaatcaaaggcgcgctgataaaacgtcttaactgcttcatttccataaacagttaaacgattgggaatatctaatgcataaccagacattcgataagccaaatcctcgccgtaaaaatgatcggaatgccaatgagagattagtaaagagtcaaagtctgcaaaacacaagtcgtactgcaacaggtgtaaataagaatcccctggaaaatcaatcagcaggacatcatcaataattaattgagtttgtgtacgaatttctcgtccttttttctctcgagcgtacttacataatttacaattacaaaaaattcctggaatccgttctgctgcacccgtgcctaaatagttgattttcattgggagtacctwacctttctttgacattcttcatacttagtagataacgctgaaccttaaagtaaatgggcatggaaactgaaacatttgttgtgtccatcttaccttttttagagaagaattgaaatggaattttttaagtaaatatgcgtaaaatrgaaaaagctagacgccttttttgataagctgaatttactgcgaatgctcgtactatttccgaaaaaaagttttaccaaaggcactttcatatccatctgctattagttatagaaaaataacaagatggacatagcttattagagcaaaaataactacgctattgataaagagtgaggcgtgttttgaacaggttgcgtgggcaaatgaatttgaataaaagggatgacaaaagatgactattgaaaaattagaatatttttataccattgcaaaatataatagtatttccaaagcagcctctgaactccatgttagtaaatcaaccttaagtgcgtcattaaaagatttggaaagtgaattgggccatttactttttaaccgtaacggtaattctttgacgttaaattcctatggtgataaaatcgtccaatctgtatatatcattttaaacgaggctaagaaaatgaaacttaatttgcatgaaatgattgagaatccagtgatgcgtttaggttttggaaatacgtccttgatgtataaagtgacagaaaatgaggatcaactgaatcgtttttgggaatgttaccatggttcatcgtttgagttattgaataaattggagaatcatgagttggattttgtgattacttctgcagatgtgaatagtccagttttaaagaaagaacaattaattgaactaaaaatgtatctttgtgtttcaagagaaattaaacaagaaattgaggaagaaggcttcagctgtttgaccaactatccatttctatttttgccgcatcacttagatcatttagaagctaccaagagtgtgctagaaatgttgcaattaacaagtccgcttgtttgttgctacgatacgttgatgcttactcgtctcattgaaaaaagtaaaggagtttatgcggtgatctctcttcggaaagaacaactgcaggaaattgattctaaactcttctttttaccgattgaacgaaaacaaaaattttatttataccgaaatgtttccagttcggtttttgtccaacctggtcaaatcaaggcaactttacaaaagttgctagagacttagccattaaaattactttggaatagttaccaaaaatagctttattcgcttagatttacttctgctgcggataaggctatttttgttgttcattgtttaaaagagatgctcaattatggggctgttcgatatttctgaacagaatgttcaattatttaataacttaagaatcgataaatcgtatctattacggttcaatttaaaggggttctggtgtatagtttggctatctaaagatttacttttttaaatataaaataactaaatggcaaggaatataaagaactgttgatacgtgagtacttgcgataactgtgtcgttagaagtttaagtgtcattgttgcttttcctgttttatgtagttgctagaaaggactgtttttatgatcgatagaaaaaaagttattttgtatacttgttgcatgagtttgtttgtagtgaccatggatgttacggttgtcaatgtggcgttaccatccattcaaagtgattttcacacgaatctgtctacattacagtgggtaacagatggctacactttaatggtagcatccttattattgttgtctgggtctacagcagatcgaattggccgtaaacgagtccttcaattgggcttagcctgttttggtttagcgtctttcctatgtgggatttcgcaaaccccagggcaattgatcgcgtttcgcatgttgcaagggattggtggttctatgttaaatccggtagcaatgtctattattacacaggtatttaccgaaaagttagaaagagcgaaagcaattggcttgtggggctctgttacagggatttccttaggcatgggcccgattattggtggactgattgtttcttattttagctggcggtatgtcttttttgtaaatgtaccgatcattgctgcggcaatcatccttacacaaaagtttgtacctgagtcaaaagtagagaagacggtgaaaaatgattttgttggtcaagcattgatgattctttttctatttagttctatctattccattatcggactacctagaaaagggcttttcgcgccagatattttaagtactgggataatcggctgcttagccattgttattttctttatttatgaatataacattgacaatccgttaatcaacccgcgtttctttttatctattccatttacatcggcttcttttttagctatttttggctttatcatatataacggctatttatttttaaacacgctatatttgcaagagatgagaggcttcagcccgttggaagctggcttatcaaccattcctttggcttttgttagttttcttgttgcaccgagagccggcgaaatggtagggagaatagggacgaaacgtcctattatgctttgtggtatttcaatgttggctgttagctttttacaattatttgtaactaaaacaacgcctatgattattttatttattatttatatctttttaggcattgggtttgggatgttaaattcaccgattaccattacagcgattgaaggaatgccactttctcagtcaggaactgcagcagccattgcggtgacatgtaagcaaattggcaattctttaggggtggcgctaccaagtcttttaattacaaagcctattactagttcgcttactcgaacaccttttacaaacgtatggctttatttggatgttgcgccattgcgattatctttttaagttatttatccaattctccgctagcgaaaaagtcattgcgcagagttaggttttatttttaacaaatcaagatttttttgaagggaaaggaagacaaacttagatgaaaaaaataaataaccgattaggactctttttattttttgttttactcttttgggcaaaaacgattctggcgtattacctagatttctcattgggtgttaagggcagtctccagcgagaaattttatggttcaatccagttgctactacgctgttattatttggttttagtttgtattttaaaaagcataaaacatttatgcttagcttaactcttttaaatgttttaaatacattaattttatatttgaatattattttttatcgtgaattcactgactttattaccatccaatctgtttttggcttttcaaaagtttcagaaggaatttctggtgatttacttgccttaatgagggtccacgatgtcttttattggctagatactttagtgctgctcgttttggtattttactcttttaaacagcgacggaatcatcaagtctttgtgaccaaacctatcaacagaagattggcgatctcaattagttgtttaagtgtcttgctcttttcggttaacttatttttaagcgaaaccgatcgtcctcaattgcttcaaagaatttttgaccgtaattatattgtaaaatatcttggcttggatgcattcacagccatcgatggtgtcaaaacagccatgtcaaatgaggtaagagcagaagctagttcaaacgaattacctgaaatcatgaaatttaccaagcaaaacaatttaccgcttaatccacagtatgccgggattgccaaaggaaaaaatgtatttgtgattcatttagaaagttttcaacaatttttgattaatatgaaagtccaaggccaagaggttacaccgtttttaaatcagctttatcaaaacaaagcgacaatcagttttgataatttctttcatgaagtagggcaaggaaaaacgagtgatgcggagaacatgttggaaacaggaacattcgggttaccgcaaggctctctttttacacaattaggatcagacaatactttcgaagcggctcccgcagttttaggacaaaaaggctatacmaccgctgttttccatggaaatgtggggagtttttggaatcgagaccatgtgtataaaaacttaggatatcaatacttttttgatcggtcatatttttcaaaagatgacaaaatgctaggttacggtattttagataaacaattgttgcgtgaatcagctagtgagcttgaacatttacagcagccattctatgcgaagtttttaactgtgaccaatcataccccttattatacggatgaccaaaacttcccgtttcctaaattgaacacaggcaattcgattgtggatgattatgttcgaacagcgcactatttggatcaatcgctagaacaatttttccattacttgcaaacaacaagtttatacaatcattctatttttgttatttatggtgaccacttcggtatttcagatgcgaacaacaaggacttatgtaaagctttcaaccgcgatccaaaaacgtggacaaactatgacaatgcgcaattgcaaagagtacctttgatgttttacatgccaggctatacgcaagggaaaatcatgcacgaatatggtggggaaattgacgttttaccgacactgtaccatcttttaggtgtcgatgataaaaattatatccattttggcacggaccttttatctcctcaatataaacaagtggttccttttagaaatggcgattttgtaacgcctcaattttcgtattaggtggggaaatctacaataatcaagggaaaaaattagaccaagttccagcagatttaaaagcagaagtcacgaaagataacgattgggtgaaaaaatcgttaagtttntctgacaaattaaatcggggaaaccttttacgnttttataaaccacaaagggttccaagaagtgcaaccanaaggg

SEQ ID NO: 393 - DNA, 1146 bp; double-stranded, linear
cgtgtggttatctctgctcctgcaggcgcaatgaaaacaatcgtttacaacgtcaatgatgatacacttgatgccaacgataaaatcatttctgctggttcatgtacgacaaactgtctagcaccgatggcttacttcttaaataatgaattcggtattgaagttggtaccatgacaactgtccatgcctacacatcaacacaaatgctattagatggccctgttcgtggcggaaatcttcgtgcggcacgctctgctgcagacaatactattccccattcaactggtgctgctaaagcaattggcttagttattccagaacttaatggaaaattacaaggccatgcccaacgtgttcccgttgtggatggatccttaacagaattagttagcattttaaaaacaaaagtaacagctgatcaagtaaatgaagcaatgaaaaaacacaccattgataacccttctttcggttatgawgatcgtgaaattgtttctggagacataatcggcacgacagaaggttcgatttttgacccaacgcaaacagaagtaacgacagctggcgatttccaattagtgaaaactgtggcttggtatgacaatgaatatggttttacttgccaaatgattcgcttattggaaaaattcgctaatttataattccaatgaataaaaaactgccttgcataaattaatgcaaggcagtttttttaatgtttactttgacaactttgacaaataccatgaaaagttaagcgatgatctttgactaaaaaatgataccgactttcaacaatttgctctacttcaccaagcaagtcttcttccacttcctcaattgtgccacattctaagcataacaaatggtggtgaaagtgtttggcgccttcttttcttaaatcatagcgagctaaaccatcgttaaagctcactttatcaacgacttttaagtctgttaaaatttctagcgttcgatagactgttgctagaccaatttccggacttttttgttttaccaagaagtaaatttcttctgctgataaatgatctttttcaatttccaataatacaagtacgggtgcctcccggtgtgggggtaaattnaagncngaatccnggaatgggttttggccttttaaagccgcc

SEQ ID NO: 394 - DNA, 14141 bp; double-stranded, linear
tggctatgtcaacattgcgacaaggccgtwaagctctggtgcgccacggcggaagtgcctatcgaaaccgccawmaaattgttgaaagacatggggggcagttccattaaatatttcccgatgaaaggcttggctcacaaagaagaataccaagcagtagcagcagcttgtgccaagtatgacttttatttagagccaacaggaggcattgatttagaaaactttgaagaaattgttcagattgcggtggatgccggcgttaaaaaaatcattcctcatgtctacagctcaattatcgatcaagaaacaggggacactagaacagaagacgtgaaaacgttactaaccatgatgaaaaagacattgaataagtaaagggccaatctttagttgactttctccaccagatttgctactctcaagtggagaataaataaaaaccaacaaatgaatgtggggtattttggtgagtgtcgtaggtatctaattgataagttgaataaccagtgaaccaagcaaggtttatttggtgtgcttagaaagtgatacctgtcagtcatctcaattactaaatacctcctttaaaagaggtttctttagtaacctttatccaatgataaagaggacagcggtagaacgctgtcctcttttttctgtagaaactggtttttatttaaaggcgccaggtattcttttcgtgatagaaaggaagaaaaaacaaatgaatcatgaaaccattcaaaaattacaatttacaacaattcttaaagaagttcaaacacgtgcgattggcgagtatagtaaagaacggttggcgaaaatggtccctgcaacacgtttagaaacagtgcagtcccgcttaacggaaacaaccgaggcccgcttaattattgatagcggacaacacgtccctttcatgggcttgagccaaattacccgcttgcttcaacaagtgaaaaaaggcttaatccttacaccaaacgaattgattgaggtcgctgactttttaagaagtagtcagcgaatccagaagttttttgaaaaaaatcaataccaaacaccacgcctatttagttacagccagcacttagctgatttcagagcaattgaagaacaaatttatacgaaaatccataatcaaaaagttgccaccgatgcttctcgacaacttcggaaaatccggcgtcaaatcaatgaatgccaacaagaaattgaaacaaaagtcaccaaatttttacgtaataaaaataatcaactgtatattcaagaaaatatgatggtgaaaaaaggggaacattacacggtaccaatcaaagctagctataaaaataaggtttcaggcacaatcattgagcaatccaataaaggacaaacggtcttcattgaacctgtagcaattagtaaattaaatgaacaattgacactcttaaaagcggaagaaacagcggaagaatatcaaattttggcagaactaacagggttaatcaatgagcaagaacgactagtcgatcaagccgtcgatacaatgaccaccttagatattatttttgcacgaggaaagtatagtcgcgaaattggtgggattacgccaaaagtaaacaaagaagaacgcttgcgcattgttcaaggaaaacaccctcttttattagaacacgcagtaccattgacgttttctttaggagcagagtatcgaggacttgtcattacaggtgccaatgctggtggtaaaacggttgtcttgaaaacagttggcttattgactgtcatgacacaatttgggttgcaaattccagcacaagcaggcacagagattccagtattagatgaaatttttgtcgatattggtgatcagcaaaatctggaaaatgcgttaagcactttttctgggcacatgaaaaatattgcggaaatgttgcgtaatgttaagcgacacacgcttgttttattagatgaaattggcagtggtaccgagccgaacgaaggagctggcttagcgattgctatcatggaaacgatgtatcaaaagggagccttggtagttgcaacgacccattatggtgaaattaaacgttttgcccaagagcatgacgattttgtgcccgccgcaatggccttcgatcgtgaaacattaacgcccaaatatcaattgaaaattggtgaagttggcgatagtcaggcgctttggattgcacgtaaaatgaagatggagccacagctcattgaaaaggcggctcattatattcagcggaaagaataccctactaatcgaagtctatttaaacccctgaaagcaaaagaaacgacctttgccacgtttgtagaagaaacacaccgttatcaaaaaggtgatcgtgtcctattgacagaaacacaacaaattgggttggtttttacagatgagggtgaacaagaaatccaagtatttgtgaatgataaaattgaaaatgtaccacgaagacggttgaaattacaagcgaaagcacaagatctatatccgcaagactatgatttagaaagtttatttacagatttccatgaacgaaagaaactcaaagatattgaacgcggctcaaaaaaagcgcagaaacaattacgcaaagaggccgaaaaaagagcagcaagacgcgataaataaggaacttaacagaagcaatacaacaacttaacactttgtttacttgttatttatcagaaatcaactaagacttgttatagtcaatgtatgggtagatatgaaggaggaaacaaggaaatgaagaaaagagctttgctaggggttaccttattaacattcacaacattagcgggttgtacaaatttatctgaacagaaaagcggcgaaaaacaaacagaggttgctgaagcgaaggcaactgaatctgaaaaagcatcagtaaaaaatgttatttttatgattggagatggcatggggaatccgtatacaacgggctatcgctatttcaaagccaatcactcagacaagcgtgttccccaaacagcttttgatacctatttggtcggacagcaagccacttatccagaagatgaagaagagaatgtcaccgattcagcttccgcagcgacagcgatggctgccggagtgaaaacctataataatgctattgcactcgataatgacaagtccaaaacagaaacagtgctcgaacgtgcgaaaaaagtggggaaatcaacgggtcttgtagcaacatctgaaataacacatgcaacccctgctgcatatggcgcacataatgtttcacgcaaaaatatggcagaaatcgccgatgactattttgatgatcaaatcgacggacaacacaaagtcgatgtgttacttggcggcggctccgaattatttgcccggaaagatcgtgatttagtcaaagaattttcccaagcgggttatggtcatgtcacagacaaaaagtcgttaaatgagaaccaagacgacaaaattttaggcttgtttgcaccaggcgggctacctaaaatgattgaccgaacggaagaagtcccttcattagctgatatgacagaagcggctcttcaacggttagataaaaatgaaaaaggtttctttttaatggttgaaggtagtcaaattgattgggccgggcatagcaatgatattgttggcgcgatgagcgaaatgcaagacttcgaagcggcgtttgaaaaggccatcgattttgccaaaaaagatggtgaacattggtggttacaactgcagatcattcaacagggggcttgtctttaggcaaaggagatcaatacaactggttgacggagcctttacatgcggcaaaacgcacgcctgatttcatggcagaagaaattattaaaaatggtaatgtggaaaaaacagtgactgagtatattgattttcaattaagtgaggctgaattgaaagcagtgaaaacagcgtcggagtcaaaagatgttgaaaaaatcgctcaggcattaagaaagatttttgatgaacgttcgaatactggttggactactggcggacacacaggagaagatgtaaatgtctatgcttatggcccacaagcagaagctttttcaggacaaattgataatacagaccaagcgaagattatttttggcttagtagatggcaccgggcaaaaagctgagattaaagataaaggtattggcaaataacaaaatgaagaaaaagcagaacgtatagaagttctgctttttcttcattgaaggcataaaaattttatctctgttataatgaaggtaaccagataaaagtgaggtcaaataatgaaaaaaatgcatgttgaaagtgaatttgcaccattgcgttcagttgttttagcacaatcgcaattttgtttaccagataaatttgatgaagcggatacgacttttttaacagaggaaaatgcccgtttaacacagaataatgaagggcgtgatttagcagactttgcaccagaacaacaagtgcgttgggaaaaagaaaaagaagtcatgcaaggagtattagaatcttatggcgtagaagtatttcgtccacgtttattgacaacctatgaaaaagaacatggcaaggaattgggcgtaggatatagtaacttcttttcacgagaccctttttttacaattggcaatctcttaatagaaggaaacttaagatttcaacaccgtcgacaagaaattttaccaattcgtccgattattcagcagtggacacaagaagcagaaggctattattttgctgcgccacaacctgacatttctgaaggggctttaagtgaagcaggtccctttattgaaggcggcgatgttttagttctaggaaaaacaatttttgtgggctactctggcttggcaagtaacctagcaggaattcagtggttagccaatatgattggtcattttggttatgaagtggtgccggttcggttacatcctcatattctccacttagattgtgcgttaagcttgttgagagaaggcttgatgattgtttgtgaagaggcctttttggatggacttcctgcgcaattagcaaactgggaaaaaattcacgttactttgcaagaagcagcgtatttagtgacaaatggtctaccgcttaacgaagaaacgtatataacggaccaatcgtttacaactttaattcctcaaatagaagcaaaaggtatcaaagttgaggcaattgattaccatgtttctagaatgttaggtggttccttccgctgtacaacgcaagctttgattagagaatagtcagcgagtgattatcaattttcgtaagaaaaaatgtacgttttgtctatgaaaacgatataattttagttttcactattttttttaaaaatattgaggaaattttgatttaataaatgcgagaaaacgtcaaaatgttagtgtttgttactaatgttttgacgttttctcgctgtttttttataaaattaccactttatatatgaaaaaaaacaatatcttttttgaaaattacgttttcaaagacacaaaaagtcgttggaaccttgctgttatagtaaattcattttttttgcatgaggtgtttaaaatttgaaatcacaagcagtctttttttcgctatacttagtttacgttctactgagatagaaaagtttttcacttttttattcattaattaaccaagatataaaggagagagtaaaatgaagaaaaaaacattggtaactttatttgcaggaacggcaattttaggggcaagcatcgctcctgcagcagcacatgcaacaacgactggtacaacaccagcaaacgtagagatgacaagtggttcattaccaggcggtacgggtgatggagatgacggaagcacacaagaaccagaaccaggctcgaatacaaattttgatttgttatatgttccaacagaattcaaatttgcttcgacagaagttagttctgatttatcagcgatttcgttagatgcgacaggtacccaaacaaaacgttatgccgttggggatgttcgtggaacacaagcgggttggtcagttactgccggcgttgctgaaatgaaaaatggcactgctactttagaaggctcaattacctttgcacaaacaggagcagtagcgaaatacgatgaaacagcaaaaacatactcacgtgatgtagctgcctttgcagcagatccaggaagtcctgaatttgctggaacaactattccagtaggtggagcagctgtatcaattgctacagcagcagttggtaaaggtcaaggtacatgggattctgaattatcaaatgtaaaattaaacattacaacacctagttcacaaattacaaatggtgcgtatacaggtaacgtaacttggacattagtgctgcgccataaaaagttactaacgagaatactgcattactagaaaaggagctgcgcagtggtgcacggctccttttcgatacataggaggaacaaataatgaagacaatgcgctggctaatcgtcacagtttttatttgtgtgatggcattaagcatcccttctgctgtacaagcagaagaagcggatgacaacatgaatacaaaatttacagttaaacccaatattcctgagaatcaagcgaaaaatacgcaatcctactacgatctcattgtaaaaccaggacagaaacaagaagtcgaattatcattaattaataaaacagatgaagaattgacgattgatttaaatttggcgaatgctgtgacgaatgacaatggtttaattgtgtacaatgatttcgagaaaaaaccagattcaagtttaaaagtacccttgacaacattaattaaattacctgaggaacatgtaaaagttcccgctaagaaaaccgtaacagccaaaatgactgtcgaaattccagcgaatggtttccaaggattagttttgggtggtgtttatgcttcgcttgcagaagatgaaaaggaagaaaaaggaaaatcaacgggtttaaccagtcgatatggatttaatgtagcaattgctttacgaatgtcagaagatacaccgatgtatctagcagagactcttcaattagttaaattagttccgaccattgctttaggaaataaatcggtccaagcggttattcagaatccgacatccgctatttttcctgaagtacgtttagaaggaaaagtaacgaaaaaaggcgaaacgaaagaatatgccaaacggattttaccaagtgttcgttttgcgccaaattcgacgatgaacttccatttagatttcgggaaagaagatgttcgtccaggaacctatatttttgaaggaaaagcggtcttgaaagaagatgaacaacaagtgtggccgtttaagcaagaatttaccatcagtagtcaagaagccaaaaaattaaataaagaagcagtagtgaaattggtcctaccgacttggtggaatcaagctttttatggcttgttagttgcaacaattgtgagtctaattctagctatttggcgttttacgcaacagaaagcaacactgaaacaacaagcctatttacaacaagaaaaacaggcagccttgaaaaatagacaaggagcacgcgatgatgacaatgaaaagtaaagggtcacttctggtgacgttgggaatacttttaaccgttggcattgcgagtctaattgtttcttctgagagttttgcagaagaagtagggcaaacgaatatcggtgtaacgttctatggaggaaaagagccactaaaaacggaaggtgtcattaagccaatagagcaaccagtcactgataaagataaaaaaacgtcacaacaacaagacaaagtgagcagaaaaaccactgctaaaacgaatccgactaatgcacagacgtcattaccaaggacaggtgaacgaaatagcacgtggctttacagccttggtattgcctgtttactcgtagtactaacaagtttctattatttgaataaaaaaaggaaaaaggaaaaataatgtgctgtttttataaatagagttaatgtagaaggaggaatatagatggagattacgatgtggatttggatttgtgctggcttggccgtcctttgttttgctttatttttactgttcttagtaaatagcatgaattttgtacatctggcaaagcctaagcagtctttagtaaaacaatcaatgtttagttggctgcttctggtgatgtgtggcggctgggtagcggtggctatcttactgaatatcgcattacaaacacaattaacataaagaaaacccgttgtaagtttttaagaaacttgcaacgggtttttgttaactttaaaataaagaacggtacaatttatcaaaaaagtacagtagacatttgtacccaacttagatagaaaataaagcgctatcattatatgatgattacaggaggcggacacagctgtgaattataaaataagttatctccttgacgagtatgcagggcaaaaaattgcgctctctttggctcaacaaataaccgatctttcgcaacgagaattagtgacgcaactttcgacaataggcggagtagttcaacagaataccgtcagcattccaaacctttccgcaaatgaatggggaaaacaactttttcaacaacgtcaagtgatctatagcgaaacagaaagacaagcacttatttttttgctcacttattcagaaatcgaagaactatcggtgtatcattatcaaaattttttagacgtttcgaaaggcactattttagcggacatcaaaaaagtacgacaccaactagcaactgaaaacattgctttatcctacgaacgaaaacgagggttttacctagaaggagatgaatttcggattcgtcgtttcgggaaaaattggcttgcccgcctcttacaacaaaagtcgggcaccttcgctttattttgctggctcagtcagcatcaaatgagccaatacgcaaaaatacgtgacggcattcaattagccgtccaggaagcacagcttcaactggtacccagcagattggatgaaattagttactttcttgctttttctcaaaaaagattaggcaaatatggaacagtcgtctggcctgagaaccagttaattcagtccttacgcgcttatcccgtcagtcatcgtattttaagtgatttagttgggccagtggcgaatgtagaaactgagagtctttttttcacgatttgtttaatgacagccttgcaaggagaattgcgagatacgaagttagagtttttattagatatttctggtgaaattattcggaaaatggaattgttggccgttgttcaatttgaacagcctcgtgaattgctcatgaatgtgtattatcatctggttcctgcctattttcggattagctatggcttttacttgccgaatgttttaatcaaggatattcgacaatcgtatcggtcgctttatcatctttgtgaacaagcgttagctcctttagaaaaattaacgaaacggtcaatcccgtcagaggaaatcggtttttttaccatattatttggtggagaaattttcgggcaaaaaaatgaacagcggcaagaaaagctaaaagcgctaattgtttgtcccagtggtatcagttcttcgttgattttgcaatcggaattgcgtcggctatttccaatgattgaatttaaagaaacgaatgcggtgagggaaatagagaatgtatctgaaaaaagctatgacatcattttctcaacggtccctattgaaacagccaaaaaggtttatcttaccaagcccattatgagctctttggagaaaaatcaattgatgcaccaagttcaatcagattggctattgccaggtatttccatgccagatgttaaagatattttagatgcgttaaaaccttatatttccttaaaaaaaggagtcacagaagcgcagttatatcgtgttttacatcgtaaaatgaacaaaattttagaaaaagaggaggatctgcgtccaatgttatcggaattattaacaacagaaacagtccaagtcctgcctgaagttgcagactggcgagcgggaatcacagaagctgccaagccgttattaaaaaatggcagtattacggaaaagtacattgatgcaatgattcaaaaagtcgaatcgtttgggccatttatccatatctgtccagacgtagcattgcctcacgcgcgaccagaagatggcgttaatcagttaggcatgtcattactaaaaatccaaaaaagtgtcgatttattagaagatcctaagcatgaaattcacctttttatttgtttagctgcttcagataacgaaacacatttacgggccttatctagtctgacaaaaattctatcaaaaaaagaatcattacatcgcttagtggcggctgaaaccgtcccagaaatactatcaattatccaagaaggagagaaataagatgaagatttttacagtttgtcaaagtggtttaggaacaagttttatggtgcaaatgaatatccaacaaattttagaggaagtcggtgttgatacagataattttcaaattgatcacacagatgtcgggagtgccagtggcgatatggctgattacttctttgtcgaaaaaacattgcaagatgctttagggtcaattcctgctgaaaaaatcattcctttaaatgcgattattgattacgatgaaacgaaggagaaagtcttgaaagttttagatgacaatggcattgcacatcaataagaaggaggaaaaacatggaaactttattgaatttatttgtttcaattgttagccagccagcgattctggtttcattaattgctttgttgggattagttttacagaaaaagaaattttctgatgttgttcaaggaacgttgaaaacattcgtcggctttttagttttaattggtggcgcagggctattagcgaactcgttaacgccctttgcggagatgttccaaaccgcgttaaatacacaaggcgtggttcctagtaatgaagcggttgtagcgattgccttgcaacaatatgggacaccaactgctctgattatgttggtgggcatggttgttaatattctgttggcgcgttttacacgttttaaatatatctttttgacaggtcaagcgatgatgtacgtttcgtgtttgacagccgttattttagtgggggccggttttagcgttagtttgccaatgattcttttaggtggtttatttgaaggaactttattaacagtgacacctgctctttgtcagccctttatgaaacaaattactggaaatgataaagtagcaatggggcatacagggaatattggttatgcggcaagtggctttattggaaaagtctttgggaataaagaaaagtcaacggaagatattaaaattcctaaaagttttggttttttaagagactcaaccatctcaattatgattttgatgtcgattgtctatgtgattttggctttgctggctgggacaggctatgtcgagcatgagttaagcaatggcgaaaatgcgattatcttttcattaattcaagcaggaacctttacggctggtttcgtagtggttttacagggtgtgcggatggttttaggagaaattgtgccagctttccaaggaattgctaaaaaattagtgcctaattctaaaccagcacttgatgttcccattatctttccttatgcgccaaatgctgtcttgattgggttctttgtgagctttattgtgggaactatttcaatgttagcgatggttggtctgaataccaccgtgattataccaggcgttgtcgggcactttttctgtggtgccgcggcaggtgtttttggaaattccacagggggaagtcggggagcgattttaggggctgcgtttaatggcttattaattagttggttaccgttatttattttaccagtcttgggtgatttacagttagcatcctcaacgtttgcggatacagattatttaatcccaggcctatttttaggcaaattaggtgaggcaggtccgagtcttttagtaggaggaatcattgcttttgtagtggttgttcttttggctagcgctgttttgactatgcgggagaaaaaagtcgccgaagaaaactaagtgttttgttctaaaaaaaggcaagtgggacagaagtcgttttgacttctgtcccmtttgtcttttaccattgttcttggataaactgtgcaatttgtttccgcgcttgtcgtccttctggcaagtattgtttcattgcgaaaacgtgttgcatgccaggcaccaatcggcaagtatcttgtggtcgtggccctaattgttttaaaaattggtgataggaagggcaaaaaacttcatgtgtgccgcccacgaaaaaaagtggcggaaatttttgataatcaaaggacaagcaatttaaagaaagtgtggcgtgattggccgtgtcgtcaatctcttgggcaattaattgtaaatagttcatgccaatcattttgtcctttttttgataacttttggcaacaggaatgtctaaatgtccatctaaccaaggagaaattaaaacagcagctttgggtaagcgttcagggaaatcggtggctaaattctgcaatacgtttaaaaccaatgtgccaccagcagaatcacctaataaaataacatcttcgggatcataatgctgtaaaatttcttgataagcagcatagcaatgattataaatatcagcaaaagacttatttggtgctaatggatatacagggataaaataatctgttgcaaaagggagatcttcaattagtttataactaaagtctaattggctataggcaagattcaatgtaaagcccccaccatgcaggtacagtacagctttcttggtaggcgcaataacggagtttgacatgcgatacatcgtaggaaattgagtcatttcttgaagaggaaaaagatgacgtaaatgttttggcaaagttacttgttcatttagtgatcgttgccaatgataaaaagccttggtgactttcggatttcgttcaaggcgagcaatttgggaaagacgtaaagaatcttcaaaaagacaggcttttaaggatttttgacgagaacgtgcgtgaaacaaatatgcgctagctaacaacaaaccaatcgatttctttttcaattaaggccctccattcagcaaaaagtaaatcattttttctacagtataacattttaaaagtagaacaacgaaatttgttgaaggggtgaaaggacggtttaaacgaatgtacgtatttatttgtggttgcgtaaagtaaatgattgtagtaaattaaatgagattaagaggtccggtgaatgggcgcgttcacggcaaggagagaagtaggatgacaaataaaaaggttacaattaaagatgttgccaatgattcaggggtctccattactaccgtttcacaaattttaaacgggaatggggcacggtttagtgggaaaacggtcgaaaaagtattggctgcaaaagagcgattaaactatcagcccgactattttgcgcaacgtatggtgatgaaaaaaagtaagacgattggcgtaatcgtacctgacattaccaatccatttttcgcgcaattgattcgaggaattgaaagtgttttatacaaagaaaattttatactgatgttatgcaatgcggaccaagatgttacaagagaacatgaatatttaacagagttgattcgtcgtagtgtcgatggctttgtgattgcaagttctgaaatttccaatcaaacgattaatgaaacgctacgtgcgaaaaagattccgtttattgtacttgaccaaaaaaaagcagaaggctttagcgatgctgttttgacagacgattatagaggtgggcaactagcagcaaagcatttacaagagcaacgacatgaacaagtcatcgtggtaatgccgccacatgcgccagtcaatattcagcaacggttaaaaggtttttgttctgtttatacggaaaaggtccagttaatcgaaacagaattatcaaaaaccggcggctaccaagctgtccccgaaattttaaaaacagagagcaccggaatttttgctatcaatgatgaaattgcttttggtttatatcgaggattagcagaagcgggcaaaaaaattcctgaggattata

SEQ ID NO: 395 - DNA, 5190 bp; double-stranded, linear
atnatacctattatccattaggcgacatacgtccttttccgtttaaaanaanntaaatccatatttccatttttaccaatatccgaagtctaaattaaagtamgaagataatccgtaaatattccatattttgaatgaagggtaattcttcttttagcattgaatcatttaataataattcagttgcaaatatatttgcttcattttctaaagtagcttcaaaagctaggctgtgcatatctatacagaatacatttaaatgtttgtgtaagaaataatgtcctagctcatgagcaattattttatcttgttttgtttcatcagtaatattgctattaatgtgaatgatgtaagtgtgattatagtattgtagaaaaccttctacattacctaagttagattttaaaacatgaattcctaagaattctgaaattctttttggatcattagatgaataaaaattaattataccttcaacttcgctttttatttttgaatagatgctacgtatcggactcactccttagtcttttttgtcatatcgtcaacagtttttattgcatttttcattgcaatttttaaaagacgtgcagtttcttcgtcaatatcgccgttttttcccataaatagaagagtatcttcattttttaattcttcaatagtttctttaatagtactatccaatttagtgtcatttttatctggtatatctagcaagtaatttgcgcttacattaaaatattcagcaatttttttattgtttctggattaggagtagaacgattattttcatagtcactaattgaactttgtcttaaatgaagaatttctgcaagttcactttgcttgattccttttttcgttcgtaactgttttaatttatcggagaaagccataatatcacctcttttctgcaataatatcactaaatgttatatgggttaactttatttgtaaaaaaagaatattagttgttgacaaaacgtaaaatacgatatatactaaaaacgtaataaacgatatggtttaaaaaaaggaggtaaaaaacgttatgaaaattaagtttttgacagcaaatgaagttagtgaattaatgaattgttcaaaagctaaagcctacggaattatcaaagaattaaatagcgaattgaaagaacaaggaatgaaaacttcagcaggaagagtgaatgaacaattctttgctaaaaaatttggttttgagcatgagtaataaaattggatattttgttttattagagtatctgattatatgtcggatattctcataaggcaaaaagccttaataaaattaaataaacaaaaaagcgttcacgagaagaaaatgaatttctgtttcgcaaacacttaaagtaatacctagacaatattattttaagcgatttgacstaataatacaagaatgaaatttttgttcgaggttataagtcttgttgaggtggtgtgtgccagccgttgaatggaacacaaggtggcagtagtatctttaactagagccatgttgatgacagattagtgccgagctgtcagattatttccgataaccatgtcgtgatgacacgttgggaatagttgctgaattagattgaatgaaaaaatctatgcaagcttagcaagaggaggagagctgtataccgtatgtcgtaggtctatataacgtgccgtgatgtaattttaattactagccgttgaaaaatgattctatgaaacgaatggataaggggctatttcatagctaaggcgaacttttagtcagttatctgcagaaatgcacattctactacgatgaattttagaatctaaattgctatataagtaagattgttatttgtaagagtggaaaagattttttctaaaaggataaccaatcttagtttaagtatgcacagctggattactctggttgtgcttttttatttgaaagaatagaatttgttataaaaaataaggaggataggaatgaaagaagagttattactttttgttgagaagtttgttgcacgaatgaaacgtcagaaaaaagcattctctattactgatatagaaaaaagctataatttggaacgtaagaagttaggtaagagtgctgttaagttaacaaacatggaacgtttaacaattgaaagtcgattattaaaaaatcagattttacaacgracctataaaatgacaggytatcataarccttgtcaagttgtgttttttagttagyaataagaattgcataaagagaraaargcagtyagttgttgactgtttatttttrtayaaaaattaaktgaaagaaggaaattattttggcaaatagaattcargaaattgcattaaswgawaaaaatytaggaagtaaaattaaagctrtttataaaacagaacgtgatatttatgtraatggkgcrccwgtwcgyggtcgtgtrttyacygcttcaagcgaaaarcaacgtgattttgaaatttttgtccctcatttacgaaaytcacaaatgttgaatggtcgtgaagaagttaaattaattgatccagtagcacgaatyaatgtgaaacgaaataacattggtaatagtcgctcaattgatatggtagtttatgcaaaacgtttagaagtagttggaggtaataaataatgggattaacatttgaaaataatacrattgaaaattttgacgtacaagsyacatttggtaygatgaatttyttagaagtagtkgcaattaatgarcgtgatggwgaagrmaatgtcactgamgaagttcgtgaacarcgwgtgackgtttattctagcaaattaaatgaccaagtagaaattgygattgayccagattatgatgtyagtggtatyaaytatgatgatgarattgaattgactggaaatgtgactgctcgtggttggcttaatactttyaaaggstwyaatgacaatgtrcaracwgaacaagcytttaaagtacgtkcrgcwggtattaaaaargtaggggctgttaaacmaacrcagrcacctcarccaaaggaaaaacaagaaaataaayaatagaagtaartmaatattgtattcggacraatcggtagcgccgtttaacagctgtraagggcattctgacgagtgccctttttattattaatttgtgtcaacaaggtttgttaatagacattaataataaaaaatgaggtggttagttaaaagatgaatcgattagaggaattaatcaagaacccaacaaaattcaatctatcaaatgaagcgattgattcattaagggaattatttgttacttttgaaacgaatccatttttcccaatgagtcgatatgattatgctcgcagatacttaacacaactatattttgcaggctttattagtagtgatttagttcaaagcattttgagtgagttcaaaaagagtgggtaaagttaataaaaaataggagtgattggatgaagcaagggaaacgcccagttagaaaagaaaaagagttgttgaaaagtcgcagattgaatgcgaagaattggttagtggaaagacgtttgaagagtagtgttatttttcttcataaagaaagtggtaatttgaaagagattttttattaagaaaggaaaaatgttagtggaaaaaaataatgaaagtactaaattattgcaaagaaaaattaggtatatgtgtgcggttgaaggtgaaatggagttttatgtgttacgtccattatttactgatgatgttaatgttcaagcagtagttatgacatttcaagatgtttatgataattcttttytctatgaaggtagtgcagagggattatatcaaacgattgttcggtggattgaaaagaatatagcttagtaattaaatgtaaactgagagggggtgtcttgtaagttaatgagtagtctgtcggaaaaaatggagcataaacaagtaaggtatcgagcgtttttagaaagaagattttattcatacagggggtggcaaagttttaattattaccgtgacttgtacttaaaattatttgatgaaacgagtaatggtcttattcaattcttattactagatgattctttttttgaaagtgaacaagctgttttgaaattgttagatagttttttggatcaattagttcgtgcgtacgatttaaagttccatgaagattttgaaaagaaagtgtattttgaagaatatccattaggaataagtgaggtaaattgattgtgatggtttgatggcttataatggctttagaatagacgttagaagaggtgagacaaatggtaatgacaatgaatgaaattaaagagcgtgtgaagccaatagctgaaagatacgaaattcctgtgatatatgtgtttggttcttatgctagagatgaagcgaaggaatcaagcgatattgattttttggttggcactactggtttgccagaaaaatatcggtggtctgtgtatagtgattttttcgatgaattgaaggaagccgttgaacatgagatcgatttagtagagcttgaagcatttgaacaaccaattgattcagaataccagaaagagttttacgatactatgatgaaggagaaagttaaagtatttgaaagagaaaaatagagatattcgtgttctcaagggaacattgatttattgtgaagatgtaaaatcggcactcaatcgttgtagcagaagctttgaagttttctctcacgatagagtgttttttcatgcaatcagtatgtcttgcatgcaggtaggagaacttgctaactctttttctgaagggtttaaggaaagaaatagtggtgcggttgattggcgacaattaaggtcaattagaaatatttttgcacatgcgtatagtaatattaataaacggactgtttgggaacttgcaacagtcttttttcctgtttacgaagaattttgtagacaagaattagcacgattacaaaaagaaggtaggtaaatgtttaaaaaattatttagatatagaggaaggcgtatccgttattcttcaagaaatttgttggcactcnatcgagtgttattttttatgccaatttttgtttgtttaggctattttgtgggctataaatggctttatccattgtatctctcaaatccacctgattggaaaatttatattgtgccagcgttaatcattgtaggtgtttcgataggtgccaatggggnaat

SEQ ID NO: 396 - DNA, 1714 bp; double-stranded, linear
cagatagagaaaaatattaccccgcatacattgcggcatagntttgcgacacatttgttggaaaatggcgcagatcttagaatcgtgcaagaattattagganatgcagatatctccacgacacaaatttatacacatattaccaaacaacgaatggcagatgtttataaggaacattttcctcgggcttaatttgcgagaatgcccacaaacgaataaatttatggtaaactaggaagtcgagaaaagaaagtaggtgtcgtttttgcaagaaattaatttaaaactagatgtctttgaaggaccactggatcttctactacatttaattcaaaaattagaaatcgatatctatgacattcccattacagcagtaactgaacaatacatgtcttatattcatgcgatgcaaaccttagagttagaagtcgctggagaatatctagtcatggctgccaccttaatggctattaaaagtcagatgttgcttccaaaacaagagcttgaaatcattgatgatgaagatttttttgaagaggaagacccacgggaagctttagtagctcagttattggagtatcggaaatttaaatatgcagcgactgttttacatgaaaaagaagaagaacgtaaactctattatacaaaagaaccaatggatatggatgattataaagaggaagatacaacactaccgcctaatcaaatcaatacaattgatttatttctagcctttcatgccatgttagaaaagaaaaaaaatcgccagcctgttgaaacaactgttgccagtgacgatgtttccatcgaagaaaaaatctccgctatttcagagcgtatgcgtcaagtacagaaagggaaggcagtgtcgtttgattctttcttcgattcttattccaaacaagaaattgtgacaacgtttatggctcttttagaattaatgaaaacgggcgcgatttatgctgaacaagaaaataattatagtgaaattttgttatttaatacagaaacccagcaggaagatacaacagaggtggaggaaacacagtgacattagttagtcaaattgaagcaattttatttgtggttggcgaagaaggaattggcttggaagagcttgcgtacttattagagaagtcaacagcaaaaacctatgaagaattaacgaaattgaaagaacattatgcttctgacaataaatcggcgttgaatattttagaagtcggcaatcattttgtcttaacaactaagaaaaaatatgcctcttactaaaaaaatatgcgcaatcgcctatgtcgaacgccttatcacaagcggcgctagaaacattatccattattgcttataagcaaccaatttcgcgtattgaaattgatgaaattcgtggcgtacagacttctggctctatccaaaagttagttgcccgtcagttgatagaagaaaaaggccgcgtagatggtcctggtagagcaattttgtatggcacaacgaagtattttatggattactttgggttgaaaagtttagatgaattaccagatatccaacaaatggaagatgaattagaagaagaactaccaatggatctatkttttgatcgtatcaagaamcgaacccaatgtctgaaacaacagaaggcgaggaagcttaaacaatggaaagttacmaaaaggcattgctcatgctggggtgacttcgcgtcgcaaagcagagg

SEQ ID NO: 397 - DNA, 885 bp; double-stranded, linear
ttcaatcactgcagaatgcatctcgtggacttccattacttggccatctttttgttcatcgatgacaaaggaaccgttggatgttcgttcactgattggatagtttttcgactgaataacttcttgtgtgcctttttgcgtagtaactaataaatctaaatcggtactttcagacataaagacaacacgatgtggatttttcttcaattcccgcaagaccattagtccacgttttgctcgtcctaattgtgttaattcttgggctaacatgcgtttaacaccgccacgttgggtaacgatgacaatcggtgtatccccttcagaatgaaccagtaaaccattaacgacataatcgtcttctttgaggttcattgatttaactccagccgctttactacccacgactggtacttcatataatggataacgtaagccaaaaccgcgattgctaacgaggaaaacatccaataagtcttgatcatttgttaaataaacattggtaatttcatcttggtctgattttaatttcatacaagatgtcgggcggctcttataagtgcgccaaggctcaaaatcagccattttggtttgtttaatcatgccagcttttgtaatgaaaacaaaggtttttgtcggacttaactctttataaggatatacagcaataatcgattcatcgatagcaagatttaaaatggkttgagaaatatgttcgccnatttcyttccagcgtaaatctggcaactcatggacggggcgatagatcatattccctttatttgttactagtaaaagatgatctaatgtattgacttcgccagcatataataaaaagtcgccttctttcatgccgattcttctggttttgatgctgtataagaacga

SEQ ID NO: 398 - DNA, 2927 bp; double-stranded, linear
gcagccacaatatcagcagccgcaacaaccggttgcgcacaacttggagctcttgtaaaagcgcactgcgttccttttctttattcttttgatcttgagaatcttctaaaaatgccgaaaagaaatgttgggaagagagcgtaatcagtttagaaatgctcttgatggtagctttatgttgatccattcttctgcctcctttacgaataaaatagaataaaactcaaatgactaattacctgtattttacctaattttgtgataaaattcaagaaaatatgttcgccttcaataattatgagaatttaccaacgtttctgtttttcgaaaaagaaagtagtataatgtgtgagcatataagaaatacataagattatcggatgtagtcaatagatagaaaaggatgaatagtatgtcaaaaaaaccatcaggttaccaaaaaaaagttctcacggtgttgttggtatcgtttggctttggcgggttgttagcgcagttttcgccgatgaaatcaggtgggttttcaagttggtttgatgattcatatgtcaaagctagtgctgaatcaagtaaaacaaaagaaccagcaccagttaaaattgagaaaaaagtcaaacctttaagctatggacaacaggtcaatcaagaaattgaaaagaagcaatatgatggacatctggatttgccgttagaattgcagacagatgctaaatggaaagacaccgcatacggatttggcaatgtggataagccgaatacaatcgaaattaatggctgtgcgattgtatcgcttgcaatggttggttcatacatggatcaccaagaagttacccctctggatgtgttagcttgggcaaaaaatgacttctttatggaagggcaagggacggcgtggtctatttttagtgcatatgctgaaatgaaaggctataactgtcaagaaattggggatattgaaacagtggcagctttcttgaaggaaggtcatccagtcattatttctgtaaaaccgggctatttcactacaactggtcacattatggtgatgagtggtgtggatgaaaaaggcgatttctggattaatgatccaaacgattcagaagaaaagggccattcaaaacggacatttacagccgaagaagtgatgaatgaagcgttaaacttctgggcattttattaggaataagaaaaggtgtggaacaacaggcagtaccctttgttcgcatcttttttagcaaataaaaggaggcaggacaatggagcgatgtacttgggcaacgaatacaactgaagagatgcaagcctatcatgmtgaygaatggggacgtccagttcatgaagagcaacagttatttgagttattgaccttggaaagtatgcaagcaggcttaagctgggcgattattttgaataaacgagaaacgcttagagcagcttatgatgcgtttgattatcggaaaattgcgcgatatgatgaggaaaaaattttagctttactagcaaatcctggtgtgattcgtcatcgtttaaaaattcaagcgaccatcacgaatgcgcaagtttttcaagaagttcaggcagaatttgggtcctttgatcgctacctctggaactttgtcgatcagcaaccaatcgttaatcactggcagcacccagaagaggttccagcctccacggaattatcgcaacagattagtcgagcgttaaaaaaacgaggatttaaatttttaggtgccacgacagtctattcctttttacaggcggcgggattggtgaatgatcatttagaaacgtgtcagtataaataagtatagaagaattaaaaaggaaggaactagcaaaacgaatggctagttccttcctttttttgcagtgattatggacactcatttaacatcgttgaaacagttttcgccaacttttctattaagaatagtgcaggtagttgggacgttacgtctgcaatggaacttttctcggttgttatatagtaggggatcgtgactgttgaaagttgagcaatcgtgcttttttcactatttgtaatagcaattacatcaatccccatttcgataaaataatcaatattttgccgaactttttgtgtttcacccgaaactgataaggcgataacacccacttttttagccgtttcttcggataatttgctaacgggatgggaaaaaaggtgggatacagaagcagataaattatagatactggaaaaataaatttcaccaaattcagctaggactttggacgttccttcgccaataaaaagaacaaattctttttttgccagtaattccgcagcttgaacaatccgtccttctaataattcttctgatgagcgttgcaaaaaatgaatcagcattgtttcatctaaagattttggttgggctgttttttttcgttcgcttagataattcttcaatttaaatttaaaatctgtatagccttcacactcgaatttttgacaaaaacgccagattgccgttttactgaaatgaatttcatctgctaattctcgaattgtcatataaggaactttttcaatattgtggctaatatacttgtaaatctctaattctgttggatttaattgtggatcgtaggttaaaaacagcatgctgatccctcctgtcatttgtgaacgtaatgtccttttttagggacatggtcttatttgtagattatagcactcaatcagaaaactagctataaaaaggcgccacttagctacaatcaattagagaaacaactaaaaattcatgaaacagaagagagagtggggaaaaatgagcaataaaaaattaattatcaacgctgatgattttggttacacgccagcggtaacgcaaggaatcattgaagcacacaaacgtggcgtggttacttcaacaactgcattaccaacttctccttat

SEQ ID NO: 399 - DNA, 32768 bp; double-stranded, linear
aaaagttatttctgcttaatgatggtctggtcttttaaacagtcaatttctaasaacccttagttatctccataattttttggaagatgtgaagataactaagggttctttttctgttttcaataaaagaaagcaggattctatagaaaaggctactaaaaaagagcggaaatatgctattattattaagaagtaaaaaaatatagaaacaaagggatgccgatgaaaaagtcctaccgtgtcaagaaagaaaaagaatttcaacaggtgtttaataaaaaacaatcttgtggcaaatcgtcgtttcgtggtgtacgttttagagaaaccacaacaagcccattttcgagtggggatttctgttgggaagaaaattggaaacgcggtcacaagaaatgctgtgaagcggaaaatccgcgcgagtttatttcaattaaaagaccgtatctctccagaaattgattttatcgtgattgcacgtccaggattggaaaagttatcgtctgaagaagtgaaagctaatttaacacatgtgttaaatttagctaaaatattagatgtaagagagggaattgagtagtgaagaagtataagcgcttattattaatggctgggttagtgaccttagtttttgttttatccgcctgcggaaccgcgcccgtaagtgaaagtagtacaggaatttgggatcgatacattgtttattattttgcccaagcgattaagttcctatcattaggcggcagtgtcggaattgggattatcctatttacgttagtcatccggattattttattgccgttgatgcatttccaaacgaagagtatgcgtaaaacacaagagttgcaaccgcaattaaaggccttgcaacaaaaatactcttcaaaagatcctgaaacacaacgcttattccgagaagaacagcaacgtttgtatgcagagaataatgtgaatccttacattggctgtttaccactgttggttcaactaccaattatgatggctttgtatcaagccatttcacgcgtgcctgagttaaaagaaggaacgttcttgtggttaagcctcgataagccggatccgtatttaattttaccgattttagcggctgtctttacgtttgctagtacgtatctttcaagtatgagccaactagaaacaaatgcctcactaaaaattatgaattacgttatgccagcgatgatcttctttatggggatttcattagccagcagtttatctctttactgggtggtctcaaatgccttccaaacagggcaaacattgttattaaacaatccattcaaaatccgtaaagagcgggaggaagcagcacgtcaagccaaagcacgggagcgagcgcttgaacgagcaaaaagtcctaagaaaaaagggaagaaaaaataaaggaggtcgttcagatgccgatttatgaaggaaatacaatcgaagaagcaacgcagaaaggcttacaagcacttggtttaaccaaagaggatgttacaattgatgtgttagacgaaggaaaaaaaggatttttaggtctaggaaaaaaacttgcccaaatttcaatggaaccaacgattagtgagcaagtcacagaagcggtcgaagaaacagtggaagatattgttgttgccgatgaagcaacagcagtggaagaagcagttgaggaattaaccgaagcaattcctagtctctcagaggaatcaacacattctttagaaaatctggaagacgaagctgctattattgaattagcgatgtatttaacgaatatttcaaatgaactgaacgcccctgccatggttcgcatagcgcgcgagaatggcaatattatcttccatttagaaacagaaaaacaaggtatcttaattggaaaacacggaaaagtgttaaatgcgttacagtatttagcgcaagtctttattcaccgcattgcaagcaataagctatcgattgttgtgaatgtcggaaattatcgtgaaaaacgtcatgaaattttggaacgtttagcgaaacgcaccgcggaaaaagccaaacgtactgggcggccagtcttcttggaaccaatgccggcttttgaaagaaaacaaattcatcacacgctaagtaaagatgagcaaatcaaaacccattctgaaggggatgaaccttatcggtatttagtggttgaaccagttaagaagtatttttaaacaaacaaagaaacgttggcaactctcagcagggactgaatagttgccaacgtttctttgttaaatgattttttagccgtctccgtttctttttttatgttatgataatcagtaattactccagtagtaaattcaaatgaaaaagttttgtaaagagacgtagggggagcaacaggtatgcgtacggagaaaatactggttgtagatgatgatgcagcagttcgtcgcttgatttggaaagcattacaatcaacaggtattcttatttaccaaagtgaatcaattgaaaaaacaaaagatatcgtgtccagagttacctttgatttgttcattttagatgataacttggaacatgacagcgatggttactacttagtccaaatgattagagagaaatatccactggtgccaattatcttttttagtagcaaaaaagaagaagaggatatcattgcagccttggaaatgggtgtggatagttatataacgaaacctttttccttgaatgtttttaaggctcaggtgattgcttcgttgaatcgagctcgaatgattcgaaaacaattgaatgtttataaaaaagaagagctacaggtaggcgatttccgttttgattatggtcgttatcaactatttaaaaaggatttacctatttcattgtcttcgaaagaagttcaattaattcaattttttctggagaatcccgagcaagtattttctaaagaacaaatttacagcagtgtttggggtactggggatgtcgatgcgaatacgattatggtttttattaatcgtttacgaagtaaattagaagaaaacccgaaagaaccttgttaccttcggaccgtttggggcattggttatacctttacgccagatggttgcgtacaaaaaaaatgaaaaaagacctgcagttgcacgagcgactgcaggtcttttttgcttattcaatttgccgacgttccatttctttcaaaataaattgaagcgaacgatttagatgttcatgggttaaaagtgtgatctggtcaatattctttgttttcattccgcggaaaattaaccaatgttcttctagggcaatactacgacgttctgaggcacgaatcgcaatatctctgaaatagattaagtaagcatggagatcagtcacaattttttttaaacgtagcatctgactcttagtataaataaaggaattaaaatctgaaaagttctgtagtaagtcatctacttggttatttttattgtattgttctccttcgagaagtaaggcttccaattcatcaaaatcttctggtgtcatgagttccatggctttaatggttgctaaagtgtccaaagatttacgaatatcataaatttcataagcatctttcatactgatccctttaaccacgatacccaccataggtatatgttccaccaattgttctttaactaattcttgtaaagcaaagcgaatgggcgtccgactaatgtttaattgctcggaaaattctttttcgttaatccgttcacctgcaggaatatcccctaaaataatggtttttttaaaggcttcataggtacaaatttttagaggtttactgctagttaaatctaagttccgttttactgcttcaaccgttggattcatatgaggcacctccctataggttatttttatagataataaatataatattaaaaatgaaaatataacgcaagaaaagacaaaatgaaaagaaaaccgaggagaaaaggtactcctacggtttcagcgacgacgtttaattttgtggaataaataaaggcatgtgacctaaagcaacaattgtaacaacgaaaataacgaaaattcctaaggcatattttgccgattctttttgccattggcccatatctaaaccagttaaacgtaatagcaagtaaataaatgccactaatggacttaataagtggaacgcttgccccattaaggaagctaaagccatagacatattgtcaaatccataagaacgtccagcttctgctaggactggtaagacaccgaaatagaaaccatcgtttgaaataaagaatgttcctggtgctgaaatgaacgcaatcactaagccccaagcgccggctaattgttttggaataatattaacaaagctatttgctaaggcattggccataccagaaccttggaataagcccatgaagacgccagcagcaaaaactaagataactacttgcacagcatcaccagcatttgcactgatgcggctgctttgatcttttaattttggatagttaatcattaaagcgatacaagtaccaactaggaacaataataacggtggcatttcaatccacgaaggcaaacctaattgaccaacgaatgaacttaggactaaccaaccgattaagacaatcgttaaaataccattgaacgcaaaattctttggacgacgaatttctaataattctgggtcgttaacaatagtcatttcttccaattctttatcagtaagcgttgtcacgcctaagcgagcacgttcttttttccccatgcgataagcaacaaagaagataacatacaatacagataaaatcataccaggtgctaaataagaaagaatgtcggcatcaacttctagtacggccatggcacgagctgttggaccgccccaaggtaataagttcataatggtgttttgtaagataacaagcacacctaaattcatcaatttcatattaagttttttgtagatgggaataaacgcagaacagcaaatcaaggtcgtggttgttccatctccgtttaaggaaacagcagcagcaactaccgcagtagccatcaagactttcattggatcgcctttagcaaagtaaatcatttttttagtgattgggtcaaacaaaccagcatccaacataatagagaagtaaagaatggcaaataataacataataccagtttttgaagtagttgaaatcccatctaagacgaaatttccaatgttgacttcagggacaacaccgtcagcaccaggtggcggactcgctactccagttgcaattgcaatcaaagtaaaaataagaggaataattactaaagatgtaaacggtgacaatttctttttcatgattacatacataaagatgataatcataccataagctaaaatagtgagtaacatgtttttcttcctttcttttttagaacttttttgtaagcgttaacaaccggtgttaataaaaaagaatagccatgagaaatgtttcacagtattctggtttacaacaaaaaatattttttgtgtttgtctatagtgtgagaatatacaaactttcgcagagaataaatagcctaaaacaaaaagaacatcaaaaaaacaattcaacaatcaaattcttattaataacttaatataatattaatagaatcttaacggctgataaatgcttatataccaatgtttacagagtttttttcacaaaataaacaataaaagaacaatctgagctagtgttttcactaggttttttaacggttttttctataatgaacgtataccaagaattagtgaaaggagagacaatatgggcctatttaagtccttattcaagaaagagcaacacacacaggataccgagattaatgaaagcgttatccaacgtgaagcggataacttggaaaagcgatggatagatataccagcatatattcctgctgagccaaaagaatatcaattggtaagtattgtggccactgccatcgcagcaggagagtttccagaaagtcgttttgttatcaaaaaaatcgcaaaacgaaatccagaagcaaaagaagttgccattattgcagccagtatagctgcagagctttcagaagagtctcagctagttgtcaaaagaatttcaaaacaaaaccttgaggaggatcattatgttacgcaaatttaaaatttcaattgatgggaaagaatatttagtcgagatggaagaaatcggtggcgtcccacaaccagcacctgttgcgccacaaccaacagcgccagttgctacgacagaaacaccagcccctgctgttgaagaaaccccagcgtcagcagcacagccagccgccccagcaggagcagatgcaatgcctgcgccaatgccaggaactgtgttaaaagtattagtcaatgttggtgatacggtgtccgagaaccaaccattgttaattttagaagcaatgaagatggaaaatgaaatcgttgcaggaaaagcaggtacggtaacaggaattcatgttacccaaggccaaattgtgaatccaggggaaccattaataacaattaactagaattaatttaagaagaggaagtgatttgtgtggagacactgattcaaggtgttataggaatgggccaagaaccaggacgcattgtgatgatgctgattggtggactattaatgtatttaggaataaaaaaagagtatgaaccaacacttttagtgccgatgggtttaggaacgattttagtgaactttcctaattccggcgtattgagcgctggcggcgagccaggtccgtttaatgttctttttgattttggaataaaaacagaattattcccgttattattatttattgggattggggcaatgattgatttcgggccattgttacaaaatccatttatgttgatgtttggtgccgctgcacagtttgggattttctttacagttattatggctgttttattaggttttgatttaaacgatgctgcttcgattgggattattggtgccgctgatggcccaacgtctattttcgtagcaaataccttacattcaaaatacatgggggccataatggttgccgcttactcctacatggcgttagttccgattattcaaccagtagcgattaaagcagtgacgacgaaagccgaacgtcgtatccgtatgacttatcgggccggtgaagtttctcaaacagcgaaaattcttttcccggttgttattacgattgtcgcagggttaattgcgccggtgtcattaccattagttggtttcttaatgtttgggaacttattaagagaatgtggcgttttggatcgtttatccattacagctcaaaatgaattggtaaatattattagtatcttgctaggactatctatttccgttagcatgaactatgcagagttcttaaaagtcgatacgttgatggttattggcttagggttagtcgcctttattatggactcagtcggcggcgtgctttttgctaaattcttgaatttatttagaaaagaaaaaatcaatccaatgattggtgctgcgggtatttccgctttcccaatgtctagtcgggttattcaaaaaatggctacggatgaagacccacaaaactttattttaatgcatgctgctggtgccaacgtttcaggacaaatcgcttctgtaattgctggtggcttactattagcctttttaacataggacggaaaggagaacgaatacatgtctgttaacatggaagatttaaaaattgcttttgaactgttaggttttggttggggcggcgttttcgttgttttatttatcatttatctagcatctaaattactaacaaaattatttccaattaaaaaataaaggaggttattgctgtgagcagcgtatatacaatgaaaagaatctggttgcaaaaagataaaaaagcttatcaagcttggcgcgaattaatggaaaaagccgaattgcaaacgacagaagcacttgattacaccgttggcatatatgatgacacagcattaatcgcctctggctcgctttcaggcaaaacgattaagtgcgtggccgtttgtaaaaaatatcaatctgaaaatttgttaacccaattggtggttcatctacttgaaaaactgagagaagaaaaccaattacacagttttttgtatacaaaaccaaaaaatgaacaaatttttcagtcgctaggctttcaaaaagtggttgcgaatcaagaggtgctatttatggagcaaggcaaaccagattttgccgattatcttggttacctgacacagcataaaaaagcagggccagccagtagcattgtcatgaatgcaaatccttttacgaaaggccatcagtacttagtcgaaaaagcagcccaagaaagtccgcacgtttatgtgtttgttttatctgaagataaatcgctattttcaaaagaagcacgtttcgcaatggtgcaaaaaggggtcgcccatttacccaatgtgacagtcctatctacagaagattacttagtttcgtctgcgacttttcctacctattttttgaaagaaaaagcgccattagaggtagctgcaattcaagcaacgcttgatgcaacgttatttaaagaaagaattgcgccaatacttgaaattcagcaacgttatgtgggagaagagccttattcagaagtgaccgctgtctacaatcaagcaatgcaacaagttttcggacaaacgataacgctaaccattgtcccgcgattagcgagtgatggagagctgattagtgcgacgaaagttcgcaaagcgatggctgaaggcgacaaagagacactcaagaagtttttaccagcaacaagttatcaatacttagtagaacacaagaaactaatgaggtgaagaaagtgaagattatcaaaaatgctactgcagggacagtagaatcaagtgatattatgattaccgtccaacccattgaatcaacagaaaataccattgaattagaaagtagtgtcgaaaaacaatttggcaatcaaattcgtcaggtgattacgacaactttggaacatttagatgtccaaggcgttgcggtcaaggcgattgataaaggggcattagattgtacaatcaaagctcggatgattacagttttacatcgaggcgctgaaaaagaaacgtatgattggaaggagttggactcatggaacgtttaagaagaacaatgatgtttgtccctggagcgaacgcggcaatgctaagagatgcacctttgtatggggcagattcaatcatgtttgatttagaagatgcagtttcattaaaagaaaaagactctgcccgtgttttagtccattctgctttgaaaactttcgattatggcaatattgaaattgttgttcggatcaatgctttagatgctggtggtgcagaagatattgaagcaatggtcttagctggtgtcgatgtgattcgtttaccaaamacagaaacagcccaagatatcattgatgtcgaggcagtcattacagaagtagaacagcaaaatgacattcccgtaggaacaacgaaaatgatggctgccatcgaatcggccgaaggtgttctaaatgcgcccgcgattgccaaaagttcaactcgcttgattggcatcgcgttaggcgccgaagactatgttaccaatatgaaaacacggcgccatccagatggccaagaactattctttgctcgtagcatgattttacatgccgctcgagcagctgggattgcggctattgatacggtctattcagatgtagacaatacggaaggctttgaagccgaagttcgtttgattaaacagctaggtttcgatggaaaatcggtgattaaccctcgtcaaatcccattagttaatactatttatgcgccaacagaaaaagaaatccagaatgctaaggaagtaatctggggcattcgggaagccgaagcaaaaggttccggtgttatctccgtaaatggaaaaatggttgataaaccaattgttgaacgagctgaacgggtcattgcgttagcattggcggctaaattaattaccgaggaggaaatatagacatggtagtaaataaagtaggcaaagacattcctcaatcttatgcagagcaatacggcatttatgaaggagaattagcacacattggtgcttatcaagaagcgagccgagcaattaaaccagtgaaacctcgggagacaaaacttttaggaagtattcgtgaagcaattgaaaaaacagggttgaaagatggcatgaccatctctttccatcaccatttccgtgaaggagactatgtgatgaatttagttttagccgagattgccgccatggggctgaaaaacatttcgattgcacctagttcaattgcaaatgttcatgaacctctgattgaacacattaaaaatggagtagtcaccaacattacttcttctggtttgagagataaagtaggagccgctatttcagcaggtatcatggaaaatcctgtggtgattcgttcacatggtggccgggcacgggcagtagcagcaggcgatatccatattgatgtagctttcttaggtgcaccaagttcagacgcttatggaaatgcgaatggaaccaaaggaaaagctacctgtggttctcttggatatgcgatggtcgatgcaaaatatgcggatcaagtggtcatcattactgacacattagtaccatatcctaatacccctatcagtattccacaaacagatgttgattatgtggtagaaattgatgcaattggtgatccagatggaattgccaaaggcgcgacacgttttacaaagaatcctaaagaattattgattgctgaatatgccgcaaaaataattacacattctccttactacaaagaaggcttctcattccaaacaggaacaggtggctcttcactagcagttacgcggttcatgagagaacaaatgcttaaagatggcattaaagcaagtttcgctttaggcggaattacgaatgcaatggtggaacttttggaagaaggcttagtagaaaaaattattgacgtccaagactttgatcatccatcagctatttctttaggggaaaatgccaatcattatgaaattgatgccaatatgtatgcctcaccgcttagcaaaggggcggttattaatcaattagacacagctattttatctgctttagaagtggacacagattttaatgtaaatgtcattactggttcagatggtgtcatccgtggtgcttctggcggacattccgatacaagtatggcttgtaaaatgagtctagtgattgcaccacttgttcgtggacggattccaacaatcgttgagcaagtaaatacagtcgttacaccaggtacgagtgtcgatgtcgtagtaacagaagtcggcattgcaatcaatccaaaaagaacagacttaattgattgttttaaaaccttagatgttcctcagtttacgttagaagagttgaaagacaaagcctacaacattgttggcaccccggaaccaattaaatatggagacaaagtcgttgcgttaattgaataccgagatggtagtctaattgatgtggtacgcaatgtttaatggggaaaaagtaacacttttagagatgttggatgctcgcgaacaaagagctgccacacagaaggagttgttagaaacagcaccagaagctagtctcttatctgccacaatgaatattcctggagaagtaaaaaattcgcccaccttaacggctgtttttttagaagtaattgacgaagtcgagcaacaattgctggatcaagtaccgattgttaatttttaccggaatgaaaaaacaggtcctgaatattatttggcggtttcgttagccccacaagaattaaaacaaagaatggtcaaaattgaagaaacacatccttatggtcgtttagtggacctagatgttttatggggaaatgaggagctaaaaagccttcatcgaggagatttaggcttgccaccacggcgctgttttatttgccaagaagtggcgaaagtctgtggacgaaatcgacgtcacagtcttgaagcaatgcaagaaaaaataacagaaataattttgacacgaaaggagcagccaagtgagtaaaaaaattcgttttacagaaacggtgctacgggatggacaacaaagtttaattgcaacacggatgccaacctcagatatgctgccgattattaaaacaatggacgaggcaggatttcatgcattagaaatgtggggcggggcaacgtttgattcctgtgtccgctatttaaacgaggatccttgggaacgtcttcgccaaattcgcaaagaagttaaaaataccaaacttcaaatgttattacgaggacaaaatttactaggatatcgtcattacgctgatgatgtggtgcgggcctttgtcgaaaaatcagttgaaaatgggattgatattattcgtattttcgatgccttgaatgatgtccgtaatttacaaacagcaattcaaacaacaaaagaagctggcggacactgtcaagcagcgatttcttatactacgagtgaaattcataccatcgattactttgtaaaattagccaaagaattaagtcaaacaggagcggattccatttgtattaaggatatggcaggcgttttgacgccacaaactggttttgaattagtgagcaaaatgaaagatgccattgatttacctttagaggtgcatacgcatgcgactagtggtatttctgagatgacctatttaaaagttgctgaagcaggtgcggatatcatcgatacagctatctcttctttcgctggcggtacgagtcaaccagccacagaatctgtagccattgcgttagaagatttaggctttgaaacaggtttaaatatggaaaaagtaacagagattgctgactatttcaatccgattcgtgatcgctttagaagtgaaggcattttaaaccctaaagttaaagatacggaaccgaaaaccttgatttatcaagtgcctggtggtatgttatcaaacttattaagtcaattaacggagcaaggtttacaagacaaatatgaagaagttttagctgaagtacctaaagtaagagcagatttagggtatccaccactagttacgccgctttcacaaatggttggaacacaagccttaatgaatgtgatttctggggaaagatattccttaataccgaatgaaatcaaagattatgtgcgcggagaatatggcaaatcaccagcacctatcgcagaagagattaagcaaaaaatcattggggatgaagaggtaatcacttgtcgaccagcggatttattgaaaccagagttgcatagtttagaaaaggaaatccaacaatatgcaaaatctgaagaggatgtcctattatatgcgatgttcccgcaacaaggaaaagactttttaggacgtcgtgaagatcctttttacgatgtaccgttacagaaagtgacagtcaaacttgacttgccagaatagaacgggcaagtgctccgcaaatgtataaagaagcaagggtttgagcgacgataacggttgttcaaacccttgcttcatcaaatrgaaaaaaggcagcccgtgaaaggaagtgacaatgtgttagaagaagttctagcaattcatcaaaaaaatattggtgtgctaagtcttgaagcaacagaagcggtgttaaaccatcatgatttagccaaaatgtatacacctggtgtcgcagaattgagtttaatgattgcccaaaatcatgaattagcgcgcgagtggaccattagtggtaagttaattgcggttattacagatggatcagctgttctgggtctcggcaatatgggcacgcaagcgggcttgccaattgttgaaggcaaagctttactttataaaaatttggcgggggtcgatgctattcctttagcactggaacaaaaatcagtggacgagatggttcaaacaattgaaaatttacaaaatagttttgcaggaatccatttagaagatatttctgcaccaaaatgttttgaaattgaagaaaaacttcaacaacgtttgaacattcctgtgtatcatgatgaccaagaaggcacagccattgtcgttttagctgggctaatcaacgcagccaaaattaaaggaaaacctttaaatgaattgcgtgtggtgattaacggagttggtgcttctggtgtagcgaccgctaagttatgtattcaagcgggaattacgcatctcaccttagtagatcgccaaggtgttttaagagaagaagacccgacattgaatccttaccaacgtgctttgcttcgacaggtaataaaaccatcagtagaaaacaaagatttagccaccgctgtcgtcaatcaggatgtttttttaggcttatcagaagcggatgtgctaacgccagccctgattaaatcaatgaaccaagacccaattatctttgctttagcaaatcctaaaccagaaattgaaccagccctcgcccaagccaatggcgtccgtttattagcaactggttcttccaaatatccgaatcaagtgaacaacattttagtttttccaggtctttttaaagggttattggcagcgaaaggcagaaaagtcgatgtcggtttgcaaatgacagtagcacgaagcttggccgctatgatttcagaacccacagtagaaaaattcatacctaatgtatttgatggcggcgtagttgacacggtttttaatgctgtactagactatataaaacaagaaaagaccacggcagaagaagggacgtaaaaggcaatgacaaagcaagcaaggagtaaattagcgcagcaagcacaattggcactactctatgaagtgacctgtttaaataaaccaggcttggtggatccagtcgatgcaggcgcccatcaagatatggatgttttcacttttttagaaagtagtgtggttttgactccttattttgaaaccttcgttcaagctgggacagagctacgtcatttgccgattgaggcaacatttcgcacgattcgacaagttggtttagaagcagaacgagcgatgtttgaggcaacagaaggtatcaatacacataaaggagcaattttttctctaggtatttttttagctgtctgtggtcgtctaatgatttgggagaccccttgcaccttacaattgtttcaacaaacgcttcaaacaatgacgcaagacttattggctgactttgaaaacctcgctacgaatgagctagaaaaactaacttggggtgaacgactatttgttcagcatggcttgactggaatccgtggtgaggcgcaacaaggttatcccgctgtctttgaacagggagtgccttattatcaaaaacatcaaggcacacaacaacaaaaactcattgatacgctcctttatttatcgctctatgttgaggatacgaatttgattaaacgaagtcaaaatgtccaaatttttgaagtatatcaaccgttaatccaggaatattttgctttaggggggacacaaacgttacggggaaccctttgcttagaaagattgaatcacttattcaaagaaaaaaattggagtattggtggcagtgcagatgctttaattttggtggtgtttttagataaactaatgaaattaaattggctgacgccttaattaaaaagatagttacaacgctgatttggtcagttattttgaccttatatgcctatggaaaggtctcaagagaattcaagaaagcgattgacaaataccacgaaacacagtatattttattacgaaatcattcttatcagagtatacaaatacgatgataaacagttgaagcgaatcttgatttgcttttcctaaacctgattcttttagaatcaggtttttgtttatctaaaaggcggcattcgttcaaaaacggctgtcgcctttttttatgaaatttttttaatataaaaaatttcataaaaaaatcttaaaaacagaaaaaattgttatagattagagtcatttttttgatgtaaagtttttataacttatgtctataaaattgataaaaacagtcaaagtagtagaaaaaataatagtggaatttctcaaaaaaataaaaaaattttccgttatttaattatcgatttatcaaacgataagttataataaaataatttatttatctttaatgatcggggaggaacgtataaacttcctcattttcctctcattgtataataactcactaatgaattagtgagttttttaacatatccaggatgcttgttatcaaatgaatttttatataaaaattcacagcattatattttgaaaagctgaagaaatgtactaaactgcaggtgttaaatccatttaaatcgctaaagggggagatgaacaactaggggaagctaatgatcttggtatttatcgtttattttaaagaaaagagggacgatcagatgaaaaagaaaattgttgaggattttaatcggaaaagtcagcataaaaaatggacaaaacgcaagatgcttaatttagcaatatcaagtggtttattatttacgtcattagcaatccctgtaagtatagctgttacctctggcacaatcagtgcatcagcagcggtcttggatatcgaactattatcaaatgttacgtcaaataatgacagtggcacttcaacgagtaatcgttggacagccgcaaaccaaaatcaaccagttaatttcacggtttctggtggcgctttagcagatgcttccgctgtgtttagtggacaaaaacaagcggtgttagtggttcctcctgagttaagaggaaatgtagctgcagcaggcagcgcagcaatcaataccaatgtcacgattgatctttcaaaagttacttttttgactgccgttttgaatgcagccaatgatttaaccaatgtgattactcaaattaccagtggggcgttagggaatttaactggtgttgatattgatttgacggaagtgaatcgtcaattggaattagttaataacattgaaaacttaggtgctgcttcatttacagctccggaaacgttagcagctgacggctcatacattagtgcaccgattagtgatggtttagggttagttttagcccaaaatgtttcaaacatcttacaagatttgaatgcggcagttcaagctttggaggcaaaaggtaccagtatcccaagtaatcttgtcgccgcagctataaatgcagccttgcttcctgtcaaaggcacggtaaacgtggctgtttcaggtgctttgcctttattagcggttggtggttcaggcgtaaatgagttagtggatgcttctttactaggcacaaccacggttactttaccaactaccgtttcaacacctcaaaatttatccaataatttagatgctcgttttgtaggaacagtcgttcaaacagatcttttagacgttaatttattagcaacagcagacggtgtatccaacatttattttgctgcaggcactactagtgaagtaaccgcaccaacaatcacaggagtaacaggtaattcaacagcaggttacgaagttaaaggaactgccgatgccaatgccacggttgaaatccgaaatgcaggaggcaccgtaataggcacaggtaccgctgatgggacaggagcgtttacagttaccgttcccgcaggtgaagcaggcgccaatgaaacgttaaccgccgtagcgaaaaacgccagcggyacagaaagyacgccaacaacgttccaaacrccagcggatgaagcaaccgtaaccgcaccaacaatcacaggagtgacaggtaattcaacggcaggttacgaagttaaaggaactgccgatgccaatgccacggttgaaatccgaaatgcaggaggcaccgtaataggcacaggtaccgctgatgggacaggagcgtttacagttaccgttcccgcaggtgaagcaggtgccaatgaaacgttaaccgccgtagcgaaaaacgccagcggcacagaaagtacgccaacaacgttccaaacaccagcggatgaagcaaccgtaaccgcaccaacaatcacaggagtgacaggtaattcaacagcaggttacgaagttaaaggaactgccgatgccaatgccacggttgagatccgaaatgcaggaggtgccgtgataggtacaggtactgctgatgggacaggggcatttacagttaccattcccgcaggtgaagcaggtgcgaatgaaacgttaaccgccgtagcgaaaaacgccagcggtacagaaagtacgccaacaacgttccaaacgccagcggatcctaatacgcccgtggcgacgccaattgttgagactgtaacaggtagtacaacaaaaggctatgaggtcaaagggactgctgaagttggcaccaccattgaggttcgcgatgcagctggcacggtccttggtactgcaacaactggaactgacggaaaatatacagtgactttagattcaggaacagcaacagcaaatcaaacgctgagcgttgtagcgaaaaacgctagtggcacggaaagtcaaccagcaacggcgacaacaccagctgatgtcactgcaccaacagttgataacatcacaggcaactctggttcgggttatgaaattacaggaacagcagaccctaacacaacaatcgaagttcgtgatccatctggggcagtcattggtacaggtacctctgatgcgaatggtgattttactgtaacgctaccaacgggaacgaccaatcctggggatacgttaacagtgattggaaaggataacgcgggaaatgaaagtcaaccgactgaagtccttgttcctgctgatgccacggttacagcaccaactgtaacaggagtaacaggtaattcagttgctggttatcaggtgacaggcaccgctgatccgaatgctaccatcgaaattcgtgatgcagatgggaacgtgattgcaacagggactgccgatgggactggttcctttgctgtgaaccttccagctgggacggcaaatgcgaatgaaacattgacagcgttagccaaagatcctgctggcaatacaagtacaccgacaaccttccaaacaccagcagatgaagtagtggcaccgccaagtgtcgacaaagttactgggaatacaacacaaggatatcaagtgacaggtaccgctgaacttggcaccaccattgaagttcgtgcaacagacggaacagttttaggcaccgcaacaactggaccgactggccaatatactgtgacgttagcttcaggaaaagcaacagctaaacaaacagtgaatgtagttgctaaaaatgatactggacttgagagtcaaccaactacagctatgacacccgctgatgttaccacaccaacaattggtgacattactggagattcaacaactggttatgaaatcactgggacggcggaccctaataccaccattgaagtacggaacccagatggaacaattattggtacaacgacaacggatgatcaaggaaactttactgtggaccttccagcgggagccgctaatcctggtgatacattaacagttgttggaaaagacggtgacggcaatgaaagtcaaccaacggaagtgacggtccctgaagatgcaaccgtagcagcaccaactgtgacgactgttacaggaacaactgccactgggtatcaagtaaccggcacggcagagccaaatgtcaccattgagattcacaatgaagcaggtttagttattgctacgggaacgactgatggtgctggcgcatttacaatcactcttccgacgggcacagcaacagctaacgaagccttaactgccattgcgaaagatgctgctgggaaagaaagtaatccgactgctttcaaaacacctgctgatccagatgcaccagtcgcgacacctactgttgacaaaatcactggtagcacgacaaacggctatcaagtagtaggagcagcagaagttggtacaacagttgaggtgcgtgacgccgatggcacagtccttggcatggcaactactggaactgatggcaaatacacagtgactttagagccagggaaggcctcagctaacgaaacaataactgtcgtagcgaaaaatgcaacaggaaaagaaagtcagccagctacagcaactacaccagtcgacttagccacaccaaccattgattctattaccggaaattctagtaaaggttacgaaatcactggaacggcggagccaaaaaccactattgatgtccgtgacgcagacggaaccatcattgctgctacaactgctaacgaaaccggccaatatacggtgactctaccagctggcgtagtgacaccaggagaaacgattacgattattagcaaagatggcgcaggtaatgaaagtcaaccagctacagccgttattccagcggatgttgttttagcggcgccaactattacgaaggttgaaggaaacaaagccaatggctatacagtcactggaactgctgatccaaatgtcacggttcaattttacaatagcagtgaacaattattggcaagtggcaatacaactactggaggtaccttctccgttcatattgcagcagggttagcaacagaaaaagaaacgttaaccgcactaaccacagatacacaaggaaatgtgagtcctaaaaccacatttatgacgccagccgatattacgggagaaccagagattaaaattgcggcaccaactgtttcttcagttttaggaacgtctaaagccggctacctcatcaaaggaacagctgaaccaaaccgaatcattcaaattagtaaccgactattaagaagtgtgattgctgtaggtgccaccgatgctgaaggcaacttcgctatccaattaacagcgggacaagcgactgctcaacaaagtttacttgcgacagctaccgatggcgcaggacattacagtacggctacaaccttcatgacgccagccgacccaacgaatcctggaggaggcaatggtaacactggcggaaataacggcaatacaggcggcaatacaggaaacaatggcgcaactggcgggaataatgggaatggttcaaacacaggttcaaatccaaatggaggttctggtttaggcacaacaggttctggcttaggttcactaggcaatggcctcggtacaaatggtagtggctaccaccctaaactaagtaccatcagttatggcactggaaatcacgggaaaacaggctacttacctagcacaggtgaaaaagagtcttcagccgtgacaacaagtttgtttggcgcctttgtcgcactccttgcgagcatgggaatcatcaaacgcaaacgtaaaaactagctctctcctttaattcctatagatgagaaaacgtattgttgagaattccccactcaatgatacgttttctcgttccatttaatgaagaaaaattgccaaatagaataaaatgtgctattctattttcagaaaatcgaaggaacaagcagtgaaagtgctaaatccaacctgaattttttaatgcaggaggagtgggcgctttttttgttgttatgaagaaaggaagctaattatgcaatcagctacaatggaatttgatacaattgcggcgatttctacgccgccaggtgaaggtgcgattagtattgttcgtttaagtggcgagcaagcagttgctattgcaaacaaagtttatcggtcaggcactaaagatttagctaaagtccccacgcacacgattcattatggtcatattgttgatccgcaaaacgatcaattgattgatgaagtcatgctttctgtgatgcgggcaccgaaaacatttacacgagaagacgtggtagaaattaactgtcatggcggcattgtcgtggtgaaccaattattgcaattactgttacgtgaaggcgcacgaatggccgaacctggggaatttacaaaacgtgcttttctaaatggccgaatggatctttcacaagcagaagcagtgatggacttaatccgtgccaaaacggataaagcgatgaatgttgcattgaaccaattggatggtaacttgtcgacgttaattcgttcattaagacaagaaattttaaatactttagcacaagtagaagttaatatcgattatccagagtatgatgatgtcgaagaattaaccacgaaattacttttagaaaaagccgaatttgtgaaagcgcagattcaacaattattaacgaccgctaaacaaggaaaaattttgcgagaaggcctaagtacagcaattattggccgaccaaatgtcgggaaatccagtttgttaaaccatctgttacgagaagaaaaagctatcgttacagatattgctggaacgacacgtgatgtcattgaagaatacgttaacgttcgcggcgttcctttaaaattaattgatacagcggggattcgcgaaacagaagacattgtggaacgaattggtgtcgaacgtagccgcaaagcgttagcagattcggatttaattttgttagtcttaaatcaaagcgaagaattgacagaggaagatcgtcaactgttggaagcaacgaaaggcttaaaacgcgttattcttttaaataaaatggacttaccgacaaaactggatcctaacgaattacaagaattagtccctgcagaagaaattttatccgtttcggtgttgtcaaacacaggcttagaccagttagaagcgaaaattgctgatcttttctttggcggccaaacaggcgaaaaagatgctacctatatttctaatacacgtcatattgctttgctggatcaagcagcgctttcgttacaagaagtgattaacggcatcgaagcaggtatgccagtcgatttagttcaaattgatatgacccgttgttgggattatttaggggaaatcgtcggcgatagtgtccaagatgaattaattacacagttatttagtcaattttgtttaggaaaataagacaagagaggaattttttatgaatcaatatcaagcagaatcatatgatgttattgtcgtcggtgctggacatgctggctctgaagcagccttagcagccgcacgaatgggcgttaaaacgttacttttaacgattaatttagatatggttgcttttatgccatgtaacccttctgttggtggacctgccaaaggagtcgttgtccgagaaatcgatgcattaggcggcgaaatgggtaaaaacattgataaaacctacatccaaatgcggatgctaaatactggtaaaggtccagcagtgcgtgcgttgcgcgcgcaagctgacaaacatgcctatgcgacagaaatgaaacataccattgaaaaagaagaaaatttaacccttcgtcaagggattgttgaagaattaatcgtggaagatggcgtttgtcgtggtgttgtaacttcaacaggtgccgcataccgtagtcaagcagtggtgattactgccggtactgccttgcgtggcgaaattattattggtgaattaaaatattcatcaggaccaaacaattcgcaaccttccgttggtttagccaatcatttaaaagaattaggtttagaaatcgatcgctttaaaacaggaacgccgccacgagtaaaatcaagtacgattgattattctgtgacagaggaacaaccaggcgataaagaacccaaccactttagttacagcacgccagatagtgcctacaatcaaaaccaagagccttgttggttaacttatacgaatgaaacaacgcatgaaattattcaaaaaaatctacaccgcgccccaatgtttactgggattgtggaaggtgtgggcgctcggtattgtccatccatcgaggacaaaattgttcgttttgcagacaaaccaagacaccaattgttcttggaaccagaagggttgaataccgaagaagtttacgtccaaggcttatctacttctttaccagaagatgtccaaacagaaatgcttcattctattgaaggattagaaaaagtagaaatgatgcgtacaggttacgccattgaatacgatgtggtagtccctcaccaattacgcccaacattagaaacaaaggtcattgaaaatctttatacagcaggtcaaacgaacggaactagtggctacgaagaagctgcgggtcaaggcttgatggcaggaattaatgctgcattgaaaattcaaggcaaagagcctcttgttttaaaacgtagtgatggctatattggcgtcatgattgacgatttagttacaaaaggcactaacgaaccttatcgcttattaacgtcacgtgcggagtatcgtttgattttacgacatgacaatgcggacttacgtttaacagaaatgggtcatgaaattggcttagtcaaagaagaacaatatgccgcctatctagtcaaaaaagcggctgttgaagcggaaattgcccgcttaggcaaacatcggattaaaccaaccaaagaagtgcaagcatttttggaaactaaaggcgctgctggcttaaaagatggtattttagctagagattttctgaaacgcccagaaatcagttatcaagaagtcgctcaatttattcccgcacctgaagaggcgctcgatccgaaagtaattgaacaagtagaaattcaaatcaagtacgaaggctacattaaaaaagccatggaaaaagttgagaaactaaaacgcatggaagcaaaacgcattccagaaaacattgattaccaagcgattaacggcttggcgacagaagcaaaacaaaaactacaaaaaatccaaccagaaacgattgcccaagcaagccgtatcagcggtgtgaaccccgctgacattagcattttgatggtctacatcgaacaaggaaaaatcgcgaaagtgcaaggataataaaaatttgaagcagttgcttcttcacggatgattgattgtgaagaagcaactgcttttttgttttgaattagtctactcttttttctaaactacaaaaaaagactgtcttaaataatttcacaaactgacctatactgaaagcgcaaacaaatgataggagtggaacaaatgacagattggttaggaattaaaggaaaagtagtgattgttacaggaggctcatctggtattggtcacagcattgttgaaagcttgttagcacaagaggtctatgtcgctaattttgatatttcagcatcagaaacgcaacatgagcatttactctttgtgaaagtcgatgtaacttctcgagcagaagtagaagcaggtgtcgctcaagtggttgaaaaatttggaaccgtagatggcctagtaaacaatgccggcatcaatattccacgtctattggtggataaaaatcatcctcatgggccttatgaattatcggatgaggtattcgacaaaattgtagccatcaatcaaaaagggctctacctaatgagccaagcagtgggccggattcttgtacaaaaacaagcaggtgtcattattaatatgtcttcagaagctggattagaaggctccgaagggcaaagtgcttacgctgcaacgaaagcagcggtcagcagttatacacgttcatgggctaaagagttaggaaaatcaaacgtccgtgtcgtggggattgcgccaggtattatggaagaaacgggcttgcgcactttagcatacgaagaagcattggcttatacacgaaatatttctgttgagcaattgcgagcaggttattcaaaaacaagtacgattccattaggtcgtagcggaaaactccatgaagtcgctgacttagtatgctattatttatcagaccgttcaagctatattacaggcatcaccacaaacgtagctggaggtaaaacaagaggatagaggtgggaaaactaaatgacgctagtaaatagatggtaccaagtaataaaattactagttgatcacaaaggaatgagcttacaggaattgcaagagaaattagccgcaagtcctcaaacagttcgtaaaaacattgatacattgaatgatgaattaatcggtatcgcccaaattattcagaaggaaaatctctttcagttagaaatcaataactttgaaggttttgaagaggttttgtctggacggctaaaaagggaatctgattttaattcttcaagcaagcgtgtttcctacattatcaaacgattaatagaagaagatcaatttatttcaacttatgatttatccgaagaactcgccgttagtcgcggcacagttaataaagacattaagcgcatgaaagagctgattgctccttggcaggttgcggttgtaggcacgccaaaccgtggcattcatttagaaggaaaagagtttgatttacgcttacttcatgtgaattacgtccaagaatattttgaagaacagtttcttcatgaaactaccaaacaaatgatacaaaaaataatcaaagaaacaagactagcgaaacaagatagttttcttttacgaagagtggtttcaattgttttgcagcgtgttttagctggaaaactcattacggaactaccaccagaatatgttgattatgttcgtcataacgagcagattgaagaactgatgtatcacttggaaataacctataatgtaacgttaagccaatgggaacgttcctttatcagctttccttttaacatcaacacaaaccatattcgtaattctttattggctgatgaaggactcttagctgactattttcaaaaaatgatgaaaaaaattcatcattcagttgttgttgaatttgatgaggacttcttgttttcagaaatgaaagatcatttaagaaacgtgatgaatcgactcgtttttcatgtggagtgtcacgatttattttacggagaaattgaacgacaatatcctttggcctatgaattagccaagattggcttgcaagaattgggccgtttgttaaatcgttgtgtgccgacggttgaatttgggtatctcgctttgtattttgaactagcattgagagggaactatgaagcgggagccaaaaaagaaatcgctgtaatctgcagtacaggtcatggaacggccttgatcattcagcggcaattggaaaaagttttgggtccagacgtccagattgcccatttttctgaagaagaggcagagagaagagaattgaatcaatattttgctatttttacaaccattcccttaaaaaatattcgaccacaaacaccgatgatccatttaactaatttatttaacgatacttggctcagaaatgagtggcagagagcaaaagaaattcgttccgtggaatctcaaaatattcatatgacctatcaattattagagaatactcaaggttaccgagcgaatatccagaaaatggttgctgatttagaagcagaaaaattagtagatccccaatttatcgaacgaatttttactagagaagatcaacaaacaactatttttgaatcggggattgcctttccccatacaattaatcaagccttaccaacgattattttatcgattggggtttttgaagaatcactggttacaccagaaggtaaagttgatgttattttgctgttgggtattccagaagagctgacggccactgttgaagcagagttactacaactatatgaccgcttgtttacaatcgcaggagacgaacgtttacgtaatgagttacggaagcaacgagatgttttagcggttaaagagtggatgcaaaggaaggggattatcatatgagttttatctacgtattcggggcgctttttttaacagcttacttcgttcagatagctatgggaatgaaacagattaaacactttaatcaaaactaccaagaattgcgacaattagggaaagtcgcgattggtcgacgtgcagggaagttaaaagcaggcacgattatcttgtttgctgtggattcgcaagggaaaatcttagccgctagaaagatgcaaggtgtcaccgttctagctaaatttcatcccttacctcagtacgtgaacgaggatattcattatatggatcattaccatccactcgtacaaaaggaaaataaattaacccaacaagcgatggaaaatgcacgagaaatttacttacgtgttgagcttggcaattatcaagaaacacaaccattaacgccgcttaatggagccaaaattcaatggcaattatggaaaaataaagtacaaacaaaattgaaaggaagtgtcgagtaatgtcttatattacaaaatttgcggaaggatttatgcaccttttccaaacaggagcagaaacatttatttcttggatgacaggcatcgtacctgttgttttgatgttaatggtagctatgaatactttaattgcttttctaggagaagaaagagtaaccaaagtagccaaactttctgccaaaaatcctgttacgcggtatttagtgctgccttttttatccgcttttatgttaggcaatccaatgtcctttacgatggcacgatttttaccagaatactataaacctagctattatgctgcacaagcgcaattttgtcataccagtaatggggttttccctcatattaatcctggtgaattgttcgtttggttagggattgcgcaagggattgatacgttaggactaaattcgatggacctagcgattcgctatatgtttgtagggatattaatgaattttattggcggttgggttaccgatttcactaccgcctatgtttgcaaacaacaaggaattacccttagtaaaacagtagagattgctgtggattagaaaggagcaaggtgagatgacgtacaatagtattaaggtagttaaaggaaatggcggttatggtgggcccttagtgattacaccgacagaagaaaaacataaatttatttacattacaggtggcggcgagaaacccgcaatcgttgataaaatcgtagaattgacaggaatggaagcggtcaatggttttaagacatcgattccagatgatgaaatcgcattagccattattgattgtggaggcactcttcgttgcggaatttatcctaaaaaaggaattcctactattaacgttgttccaactggcaaaagtggtcccttagcacaatacattaatgagacaatttatgtttccgctgtaggcccgaaacagattacattgacatcagaagaagcttctgctgatacagaaaagcccacctcgaaaaaaacagaatttaaatatgatacaagtaaaaaaattactgaacaaaaagcggaacaacaaagttttgttgcaaaaattggtatgggtgcaggaaaagttgtagcgacattcaaccaatcagcccgtgaaggcgtacaaacgatgatcaacacagtgattccgtttatggcatttgtttctttattaattggtgtgattcaaggttcaggaattggtgaattttttgccaatatcatggcgccattggcaggaaacattgtggggttaacaattattggttttatttgttctctgccgtttctttctcctttattaggtcctggagcagtaatcagccaagtaattggtacgttaattggtgtggaaattgggaaaggcaacattccgccacaactagccttaccagcattgtttgctattaatacacaaaacgcgtgcgactttattcccgtgggtttaggcttggaagaagctgaagctgaaaccgttgaagtcggggtcccttctgttttatattctcgtttcttaaatggtgcccctcgagtactagttgcttggttagcaagttttggattgtatagttaaaaaattttttttggaggatgggaaatgtcagtatttacaacaaaggttcagtctattggaccagaagccgaattatttaaagaagaaaaaatggtcatcttatttggaaaagatgcaccagatgctttagcagattattgttataacattgaggttcagccagtcacagaagcgattacggacaagcaaacgttagtgattgatgaacaaacttaccagattaccgctgtaggcgaggtagtattaactaatttagacacattgggtcacattactattaaatttgatggcgcaacaacacctgaattaccaggtacattatacgttgaagaaaaagctattcctgaaataactgttggtacaacaatcactattctataattatcgtttaagggaggaacgtaaaagatggaatttatgctagatacaattaatcttgaggctattcgaaagtatcagaaaattttaccactggcaggcgtaacgtctaatcccagtattgttaaacaagcaggaaaaattgacttctttgcgcagatgaaagaaatcaaaaaaacgattggacaagcgagtttgcacgtccaagtggtcggtcaaacgacagaagagatgctagaagatgcccaaaccattgtacaacaattaggccaagaaacattcattaaaatcccagtcaatgaagcaggcttggcagccatcaaacaactaaagcaggcaaattatcggataacagcaaccgctatttatacagaatttcaaggttatctagcgattgcggcaggtgcagattatttagcgccatattataataggatggagaatttaacaattgattctcaaaaggttattgagcatttagctgcagaaattaaacggacgaacgcaaagagtaagatcttagctgctagttttaaaaacgtggcacaaattaatcaagcctgtcaaatgggggcgcaagcggtcactatcgcaccagaactcgtgacacaaggcttggcaatgcccgccattcaaaaagcagtaactgattttcaggaagattgggttgctgtttttggagtagaaacggtaaacgaattagcataaaaagaacgagaagaaaaagcggccatttttcttctcgttctttttttgtttcacatgaaacatctacgattattcacttgcttaaaaattagacaattttctttatttgtcaaagaatttcttaaaaaaaagggttatcttttgggtattttttttggtagcagtatgatgagggtatcaaatgataggaggaaacgagaatgagatacacaaatggaaattatgaagcatttgctcgaccaagaaaaccaaaaggtgtagatgacaagagtgcctatatcgttggtggtggcctagcaggtttagcaacggctgttttcttaattcgtgacggtcaaatgaagggcgaaaatattcacatttttgaagaactcacgctgtctggcggttctttagatggtaaatttattccccatgatggctttgtcactcgcggcggacgcgaaatggaaaaccatttcgagtgtttgtgggatctatttcgttcggtaccatcattagaagtagaagatgcctctgtcctagatgagttttaccggttagatttagatgatccgaattcttcaaattgccgcattattcataaccgtggcgaacgtgtccccgatgatggacaatttactttatccaaaaaagcacaaaaagaaatcgttgatttatttatgacttctgaagatcaattaattggcaaaaaaattgaagatgttttcggcgaagaattttttgaatccaacttttggatctattggtgttcaatgtttgcttttgaaaaatggcactctgccattgaaatgcgccgttacatcatgcgctttatccaccacatcaaaggtttgcctgactttacagccttgaagtttaccaaatacaatcaatacgaatcgttagtgaamccattattaagctttttaaccaatcaaggggtagactttcaatatgaaacaacgatcaatgatatccaagtcgacatcaaaggagctactaaagttgctcggcgattattgttgacacaagcgggcaaaaccaaagaaattcctttaactgaaaatgatttagtcttcgtaacgaatggctcaattactgaaagttcgacgcaaggagatcatcatacaccagcaccaattactcatgaactagggggaagttggaatctctggaaaaacttagcaaaacaatccccagaatttgggcacccagaagttttctgtgaaaatttaccagatgaaagttggtttgtctcagcaacgattacgtgggaaaatttcgatattgaaccgtatctttctcggttaacacatcgtaaattacgcacaggaaaaattgtcacaggtggtattattactatcaaagactctaattggatgatgagtttcgctatgcatagacaaccgcattttaaagaacaaaatgatcaacaatctataacttgggtatatggattgctttctaataaaccaggaaattatatcaaaaaaccaatcgaacaatgtacaggccaagaaattacgcaagagttactttatcatttaggggtcccggaaggggaaattgaacgtatttcagaagaatcggctaccactattccggtttatatgccgtttatcacttcttactttatgttaagagaaccaggcgatcgaccattagttgtaccaaacggctctaaaaatcttgctttcattgggaacttcgcagatactgaacgagatacggtgtttacaacagagtattctgtacggacagcgatggaagctgtttatcaattgctagaggttgaacgcggagtaccagaagtgtttgcttctgcatacgacttgcgcgtcttagcaaactctgtttattatttatctgacaagaaaaaattaacagaaatggat

SEQ ID NO: 400 - DNA, 5960 bp; double-stranded, linear
acccctttttagttcgttcgacaaacccanggctatatcccaggntccaatgaccaagtattggtaacgaattaaccncctatccaatanaattgaaggaaatgaacctacaacaattaaaaaagctgtatcaaaaagtcttaaaaaagcaaaagggttgttgaaatagaaagattttaaaggagattaaaaatgaacgatttatggaattttttagataatcatcctgaagagaaagaattgataaaggcaaaagcattacaaggttatacagttgatggaattttaaatgatcaacttaattttgttgctctagatactctatctattggtctggaaaaatttggaaatattcattatagtatccaaatcccagaatttaatgaattactaagtaagaagatggtagtactttttgttcctgcggatggagtgggacactctggcgccaaagaaagatattttggattgagacaatggaataccctgtctcaatctgttcgaaaaaataccatcattcttagaatagctgatgttggctttgtgtcaggatcctattacacattatttgagcaagaaattttggatttaattgaagcaaagaaaacagaatttggactgaagcatcaagatataatcttctatggaaactctagaggcggaacgggagcgttattattaggtattacaggtaattacaaaacagttagtgtagatccagtaattgatcgagagccttgggtaaacagcgcggatggtagaatagatcgccagttaatgtttgatttcgtagaaatggatttttcaaaccgaataaaagataagatggaacagtcaaactatgaattagaaaacattacggtgattgcttctgaagcaaataaaaaaatgtatgagaaaatttaccccttatctaatggttttaccttgaaaaaattagaattaatgattgattctgaaaatacaattggtatacacggccttacgataatggaaagtattcatttacaattagcgttaataaataattatttatttgattaagtaacagagaaagtaggagcggaaaaatgaaaaaagcagcmattatgggctggtggtataaccaaaattatggatcaatcttaacatactatgctctaaacaaatatgtacagaataaagggtacgagacggttatgattgatggaccactaggttataaaaacagaagtaactttcgagcatggatgcctttagcgtataatttttttaagaaaaataatatgccctatactgaacaattaacaaaagaaacgttaccgacattgaacgatttagaaaatctagatacctttattttaggctctgatcaaatgtggaatccctggaatggttgggtagacgacgatgatttcttagattttgtttatcctcgtaataaaacaattgcttattctgtttcattaggaaaagcagatacaagtaaatatgatcctaaatgggttgcaaaccgcaaaaaagatattacacagtttaatcatgtttctatgagagaagatttttctgtacaaattatgaaagatatttttcaagaagaagttattcaggctttggatccaacctatcttgttgaaagaagtgaatatgattctttagctgatcaagctacgtttaaacgacaagaatcaggagattatatggctgtctttttcttggatattaacaaggaaaaagttcgtgtagcactagcgatcgcagaaaaattgggactgaaattagtggtcctgcctaatcctttaaaaggacgtgaactagcgaaaaaaacgtttcctaatacagtagaatatgtttctgaagatacaccagaaaatttcttatctgtttatcgagaagcaaaatatattattactgattcgtttcatggcactgtttttgcgactattttccaaaaaccgttttcaattttttataatgaacaacgtggaattgaccgctttaatagcttgatgaacctgtttgagcttggcgaaactagacgtgtctatgagcaaaacacaaaacaagaaattgaagaaaataaaaatattagtttagcacttgactatcaaaagaccgctggaaagattgcagagaaaaagagatttcagataagtggttaaccgatgcgttgacaagtaaatttagcccagatgaagacgaagtatatgatgaatttagacgatatattatcaataaacctttggatttttatcgagctaaaacaactgttccgatttccgcagcaattgttttatcgccaaatggtacgataaaaaattccaatcctaatgaaagcttttggaagctaacagataaagaattaatttttatgaataatcatcgtgaagtcactacaagatttaatcgtgaaaagtttaagggaaaggaaacgttcagtccttttagaatcgtcggtaaatatgtgaaagatgaaaaaatcgaacatgttatgtatttgcatccgatacaaaaacctaagcctaaaccgaaacaaggcacagaaaaaaaagcattagcaattcccgagaatcttttaacaagaaaacaattaattatgaaaattgtgcaaaatgagagaattcgttcgtggaaacaagatcttttagaagaattaccagatttagagttatttgtaggtcgtgaattaaaagaatatgcttcgaattttgttggtggtccagcagatcttttaatttttccaaaaacgatagaagaagttgctttaattgtaaaatatgctaaaaataatcagattcctttaactgttatcggtaaaggttcaaatattttagtccgtgatggtggtatccgtgggattactttaaatatgactgccttgaattatcgtaaaattacggggaatgttttaacagtttcggcaggtgcaagtttaattgaaacatcttattatctactagaacacttgaaatgcggtttagaatgggcagataatattccaggaaccattggtggcgcagtttatatgaatgctgggacagttaaggatattaatagcatgtttcttgaagctacgattgtagatgaaaatggagaaattaaagttttaaataaagaagatgttcaatttagtcatcgctatagttcatttatggatcatcctgagtggattattctagaaactaaattacagatttcagaaggtaatttagaaaatatggtaaatgacatggtaggaactgtcgaaattagagaaaggatgcacccactaacacatccaaatcatgggtcaacttttacttggggacgggcgcctcgattaattcaacaagctggcttagttggtactagaattggcggagtaaaagtatctgaaaaacatccaggtttctttatcaatgttgaacaagcctctgctcaagactatgaagcattaatttatttaattattgcaaaagtttatgaattttctggatttttattaaaaccagaagtgagaattttaggtgcaaatatgtgggaagcaagtttaacttttaaataaacaggggagtgtgtgacatgaagaaaataatcacaataattgtgtctttagcaattggtatcggttgtggtttttggtcaggatattacatcagtaaaaaatattcagaaaaccaagagacaactatttccaaaagtactaactcagaacaacctttgattacaaatggagagtatcaagtaacagctaattgggattggaaaacattagttgttaaagataatgtgtggacattggatggcaaacgtatttatgatgtttccactacaaatgataatattgtgattttaaagggaaaaaatttgaaatcacttgtagtttataaaatagaaaaagataacgaaaaaatcaacttatattcttacacaaaagaaggcgttgggaaaaaagtattagctactctagtgaaaaaataaataatgcatttggtgtttgaaataaattgaaagtaactttgttaggagaagttagtaaatgaaatacaatacgaaaaattatgactatttaattgttggttcgggaccttttggggcaacgtttgcttgtgaagcagctaaacgaggaaaaaaagtattagttattgagaaacgtgctcatattggtggcaatatgtatacacataaagaaaacgggattaatgtccatgactatggtgcccatatttttcatactgacaataaagaagtatggtcttatgtcaatcaattgacggaattcaatggctacatcaatcaagtagttgctaattacaaaggggagctctacaacctaccattcaatatgaacacgttctaccaaatgtggggggtaaaaacaccagctgaagcacaagcaaaaatttcagagcagcgggaggcagctggaattaaaggcgctccmaaaaatttagaagaacaagcgattcgtttgataggaacggatatctatgaaaaattaattaaaggctatacagaaaaacagtggggacgtaaggctacggaattaccaagttttattattcgccgtttgccaactcgttttacttttgataataattactttaaccatcgctatcaaggcgtwcctgtcgacggttatacagctatgtttgataaattgttagagagtgaattaattgatattcaattgaataaagactttttggcagagaaagaaacttacttatcagagtttccaaaaattgtttatacagggatgattgatgcattctttgattattcttatggcgaattagaatatcgttcagtacgttttgaaaatgaaacagtagattcaaacaatgcacaaggcaatgccgtaattaattacacagatgcggaaactccctatacacggataatggaatggcgacattttgatcaaaaggccgatgaaaacaaaacgattttgacgaaagaatacccacaagattgggatcgttcaaaagaagcctattatcctgttaatgatgagaaaaattcacttttgtttagaaaatacaaagaaaaagcaaacgctcaagaaaaagttatttttggtggacgtttagccaattatcaatactatgatatggaccaagttttcggagcagctttgaaagcagtcgctaaagaatttggtgaaatggccaactagtgaacggttagactcggaggaacaaatggaaaaagaactgaaagttagaacaaaattacttaccaaagaatacagtttagcgcaaacacgtattgacaaattgaagacactttttagtgtttttcaaaacaaagttcccacattttgggcgttaaaaggtgttagcctcgacgtatattctggagaaacaattggtattattggtttaaatggttcaggcaaatccactttatcaaatattatttcaggcatcacccctcaaacgtcaggagaacttgaaataaatggtgaagtttcaattatttcgattggtgcaggactaaataataatttaacaggacgagaaaatattcgaatgaaatgtttaatgttgggggaaaagaataaagaaattgatgccaaaatcgatgatattattgaattctcagaattaggcgtttttatcgaccagcctgttaaaacttattctagcggtatgcgtgctaagcttggtttttcaattgcggttcatcaaaatccagatattttagtgatcgatgaagcgttatctgtaggagatcaaaccttctataataaaggcttaaaaaaaatgcttgcatttaaagagcaaggcaaaactatcttttttgtctctcattctattcaacaagtagagcaaatttgtgatcgtgtcgcttggatgcattatggtgacctacgtgcattkggkgaaactaagcatatttaaaggatatcgtgctttctgcaccgtataaycatttcmctgaaccgcaaaaagaatcgtatcagagagaggcaaggccaaacagagaaattttccttg

SEQ ID NO: 401 - DNA, 1268 bp; double-stranded, linear
aaaagttcaaaacctttttgtttaatcacattttgtatggcggcgacgacttcttcaatcgtcaagcctgttgtatcgattttcacagcatcacttgcttggacaaggggtgatacttctctggttgaatctaaataatcccgacgttcaatctccgccttcaaggtttcaaaatccgtctcaatccctttttcttgattttctttaaaacgacgttctgcacgttcttcaacgctagccaccaagaatatctttacttcggcctttggtaaaactgcagtaccaatatctcgaccatccatgacaactccgccggcttgaccaattttctgttgtaacgccaccatttcttctctaacttttgcatgttttgaaacagctgaaacagcattcgttacatctggctggcgaatcgcttcggtcacttcatgaccgtcgataaaaacacgttggccattctctgcttgctgaaaagaaatagtgtggttgacacaaagcgctactaatggctcttccgcttgaatgtcgatttgattttgcaaggccagatacgtaatcgctcggtacatggcacccgtgtcacaatacacataattcaattgttttgctaaaatttttgcaactgtacttttgcctgacgaagctggtccgtcaatagcaatactgattttccccatgaaaaaactccttaactgatatgcatctttttaaatgcgcttcttcttttatattaaaatcagaagaaaagaacttggatttaaactgatgacgagtctctaacgaaaaagcaataagccgaaatccctcgaaagacgcaaaacatctttcggaaatttctgcttattggcattctcatgtaatcatccgtcgcggtttagcccttgaaagtgctgtccaaacctctttttctggattatttaatacgtaatggttgtcctggataaaacacagatgtatcaatcccaggatttaacgctaaaatttgttctaatgtcattccgttacgttcggcaacttgacgtgccccttcgccactttgaacggtatcataaacaggttgttggttctgcgcttgttgctgttgttgattttgagcttcttgttgttgttgctgctcttgttgttgctgttgctgttgttgtgcntgttggtcctgttgttgctgtgcagcnatgcttgaacttgaaggtgttgtattttcagctggttggctgcttgctggttctgagctttccactgattttggacgtactttctttgtttcnttc

SEQ ID NO: 402 - DNA, 1204 bp; double-stranded, linear
cttttgtgccacaatccgttcctcccaccttggcgtgcccaaacaaggttaatgatttgtataaacaatttccaacatcaatagttgggaccactaaaatatctgcatcccccatgataggaccgctgtaacgtttatgcgcaaccgcttcttcagaggtcgctaaatcaagcgaaagtggcccaaaaaccgtagcctcttgttgatcattaaaatgtgccgtgacttcttttgctaaaacagacgaaggcattttaggattgaaattttccgctgcgcttaacaaagcaattttcgggtgatgcagtcccaatttttgggcgacttctttagcattttcaacaatttcaatgagggtcgcttgagtgggggcgatattcatcgcacaatcggttaacaagaaggtttttcccgcaggcagctccaccattgctacatgggaaagaatcggtttattttttaattgatgctcacttttcaacatttctttcagtaatgtgtgggtctgaataattcctttcaataaaatttgtgcttgaccggttgcaactaaactgacagcttcctgtgctaccgcggcctcatctgagcaatgaacatatttccaaagattttcagtatcaagattttcatttgtatcaaatacaataaactgcaacggttgctcggcttcttttagtgcttttttaactaactgtaaaatctctggttgtgaacctcctgcaattgaaacagtgatcattttctcacctcattttttcttctttacactttaaatctaccttagtatgtaaacgcatacaaattgttaatttttatgtcctcattaatattttttatagagaaggaaaagcttagtaaatcaagcttttctttctctaaacaattgttatctaatttacttttcatgaaaaaacttcttttctaagaatgaaaggaaaacttatgcttcggcacagctgtttatttatgtcagatcctaaagcatgttatactttagatacttatttttaggaggaattaaatggcactactactattctttttgtttatcgccctactaggatttggtatattaaaaattaataaccgcagtatcctcggcggtatcactctggcttccggcaccttattgtcattagtcaccttactatttatcggattagacaaaatttatttacattttaagaatggcgacctaatt

SEQ ID NO: 403 - DNA, 4996 bp; double-stranded, linear
ataacaaaacactactcttctatcmataattgacttaataattgaatttcttgrttcttagktaagtcaattgttttcatkgtamccgctgtggctaamcctaaatagattaccaccattttaggaaataatncgacaaatttyccttkgyccatttgkacatattttttatccaataataaacgctcttcaaaaaaagtttgaagcatttgctgcaattcttcttcataaccatgtgctttcataaataacgccgtatagattttttgatgtttttgggcaaataatataaagttcagacccaatgcaatcactgggtctgaggcaccgacatctgctttataaaataattgcatacgatgaaataacgatttaattaaggttcgttttaaatcgtccatgttgacaaattctaaataaattggctgcgtagaaatccccatagcatctgcaatatttctagcagttaaattagaaaaacctttatctactaaaattttttcagctacgtttaagattttttcctttgtatataccttcgttctaaccattttcataccccttttctcttttagttaacaataactttattatgttcacacaaaagaaaaccattttcattatatatataatattttacacttttttatgcgtttcttttctcaaaattttctatacatttcaaaaaaattgagaattttcatcgcctataaacaaataggtccagaacaaaaggtcatcaccttttgttctggacactaaacggctgcactctttattcttctatttgtttgccttgttctttggcaagctcatttttatcataagctacaaagaacggatagtaaatcaaaattgccactagaattaaaacaatattcaaaacagcagcacgccaatcgccgcctgtcgccataaaggcgccaattggtcctggtaaggtccaaggagcggtaaagacaacttcacttactaaacctaattttgtggcaaaccaagcaatcgttgctaaaaccattggtgcaaagataaaaggaatcattaaaatcggatttaagacaatcggtacaccgaaaataactggctcattaatattaaaaatagacggtgctaaaatagcttttcctagttttgaaccatattctgattttgcccggaaggctaataatatagctaaaccaattgtggctccagcaccaccaatccaaataaaccattggtaaaaaggttctgccgcaatccgaggtaatgcttcgccagctgctttagcagtcgtgttttcctctaatagttgtagccatagaggacgcgccaacgatcctacgattgaagcgccgtgaatcccaaagaaccagaaaaatgtggttaaaaagactaacagcaagacactcaataaagagtccgctgcttgaactagtggtcccactaagttccctacaaatgtgtgccaatcaaagcctaaataataagtgattgaaccaatcaataacatgacaattaaagtcggagtcaatgattcaaatgaacgagcaacagcaggtggaacgttatcaggcattgtaattttgaacttagacttatctgtcactcgatagatttcgacagcaataattgacgtcacaatcccgacaaacatccctgcaccacccaaattagccattggtaaaacaaacccrgraacgccagctgctttactggcttcttcaggaatcgctacaggtactaatgttaataaaaaagcaatcgtagccaaaatccctccagagacttgatcaagattatatgatttcgctaaactagcgccaatgccaaaagtcgcatataacgccataatgtacattgtcattcggtaaggcaataagattgtagcagcattacttgttaaaaattgagtaatgccccaagattctggtaacggcggaaacgcaataattagaaaaaaagaaccgacaataattaaaggtaatgtcgcaataatcccatcccgcaccgcacgtaaatggcgctgattggcaattttagccattggtccagctagatgattttcaatccaaacagtcagtttatctaacataaataacactctcctctgtttttctcttaaaaaataactcctttaatcagccatamataagagataagctctaataaaataagagarattaaraacaaccaaataaaacgcttacaaaaacctgttttcktttcaataaaataatgttcatcggcaacggccgccacttgtggcaagtgcgtgatacacaacacctgcgaattttctgaaattkgataaattttatcggcaatcgcctgtgctactcggccactaactcctgtatccacttcatcaaaaacaatactagtgatcccttgcgtttgagaaaagattgttttcatagccaacatcactcgcgaaagttctccgccagaagccacccgaactaacggttttaatggttcccctgggttagtagtaatataaaattctactccgtctaagccattttcttgtaaatgctcaagttctgtaaagcggacttcaaattcagttcgctccaaatatagttcttttaattcggttaaaatttgttgttcgagctctttggctaggcgctttcgttcttttcgtaaagctaacgcttgttgatgagccgcttgttgtttctctgcaagcaacgcttctaagtcacctgtaccgccttccaaaaaatcagcctctgctaactctttggtgatttcttcatagtaagataaaatcgtttcgattgaatcgccatatttacgtttcatttgacggattaattccaaacgattttctacttcattcaagcggccttcgtctagttctaagccatcaatcaacctagaaagatctccactggcttcttgtagtaagtagtaagcattttgaacagtatctgacaatgttttatattctgaatcaagggattcaatcgaagcgagttcattcatacttgttccgattttatccaaactactatcgtcttcaccatttagcgcggcataactaatcgtcagtggcatcagcaatcttttgaaaattgttcagttwattgcgttcttcyaacaattgttcttcttcgccagcgactaactgtgcactagcaatttcatcactttgaaaatgaagcatgtccattctttgggcaaattctttttcatttttttgtcgctttctgactttggcttcgagtgcgcgatactcttgatacgcctgtgtatatttttctttgactgctaaaagttttttcccaccaaattcatctaacatatcaatatggcgttcactttgcatcaattcttgatgttcgttttggccatgaatatctactaaatattccccaattctttttaaattagtaatgttgacaatccgtccgttgacacggcaaacatttttaccagaagcggaaatatctcgttgaatcactaaagaatcttcttctgtttcaatacctaattcttctaataatttctttaattcttgacttttcggcattgaaaaaagtccttctaaggtgcatttatttgctccttgacgaatatagtcactggagccgcgtccgcctgtgagtaatcccattgcatcaataatgatggatttccccgcacccgtttctcccgttaaaacggtcatacccatttgaaactctaattgtaacgaagagataatcgcaaaatttttcacggaaagttcttgtaacatcttgttcacctcattctttatagatagcttaacagctctttatgaagtttttctgctgcttcctcagttcgtgcaatcatgaggacactatcatcatcgttgatgacggcaaaaagtttctcttggtaattcttttcgattaaactaccacacgccgccgcattgccaggaatggttcgtaatacgacatatttttccatttgttctgcagctacaaaggcatcttttaaaagctttgcaagtttagcactcgtattagcttgtgtttctaatggaaggctatatcgataacccccttctgcagatggaactttgatcagtttcatatctttaatgtcgcgagaaattgttgcttgtgttacagtacgcccttttcttgtaagtagttgacaaaatcttcttgcttttgaatatttttttcagtcaataaacgtgtaattaaacggtgtctatcttgctttctcatggcgccgctctccttttcagtttactcttgccctcatcatagcttatttttatgcattttaaaagatgaattactagatttatacaaaaaagaagctttcacctataggcgtccacttctttcttctaacttttctcatcattccgctaatttttgatgcgcatgcgcgacaacttcttcaatggattctggcgcttgataggatccttccccttcaacagaaactaaatgtgccaaaaattcaatgtttccttcgccaccagtgattggtgaaaaatctaagtttttcacatcataaccgttattcatggcaaagcgtgtaatttcctccacaaccatttgatgggtttctggatcacgcacgattccttttttcccaacaaactctttgccagcttcgaattgtggcttaattaacgccaccacactaccgccttttttcaaaatatcatgaagaggtggcaaaattaagcgtaatgaaataaaggaaacatcaatcgttgcaatatccggcaccccttcagtgaaatcttcaggtttactatagcgaaaattggtacgttccattaccaccacgcgttcatcttgccgaattttccatgctagttggttatagccaacatctaaagcgtaactcaaacgagccccattttgtaaagcaacatcggtaaaaccacctgtggaggaacaatatctaacattgttttgccttgaacgttgattgcaaaaacatttagtgccttctctagttttaagcccccacgagaaacataaggcattacttggccttantatgtaagggt

SEQ ID NO: 404 - DNA, 1926 bp; double-stranded, linear
caccgtggngaactcttttttgggtaaccnggatggttttttttggacatactattccncccttgtctatctaattgactaccntccgataaatcttatgtattttcttatatgcttcacacattatactactttctttttcgaaaaacagaaacgttggtaaattctcataattattgaaggcgaacatattttcttgaattttatcacaaaattaggtaaaatacaggtaattagtcatttgagttttattctattttattcgtaaaggaggcagaagaatggatcaacataagctaccatcaagagcatttctaaactgattacgctctcttcccaacatttcttttcggcatttttagaagattctcaagatcaaaagaataaagaaaaggaacgcagtgcgcttttacaagagctccaagttgctgccgcccaaaaatccttagtggtcttacaattgaaagaagtccctacagcgcataaattcgaaacggtgattggctggattgtctcaaaaaatatttcggacaatatcgttgttcgtttacaaacggatgaacaacagttgcgcatgattcctgttgcttctgtcatgaaagtcagcacgttagccaatcgtcaccaacgtcaaattcactagaatattgaagtctttataaaataaatggaaaccaccaaccctggcgattgcaggttggtggtttcttttatttatgactttagtcaaaatcccatgaaacttctgacttaggactcaacttatttcttaggaacaaataattgcggtgctacttttgccaataagcctagaactagacttacatacaaacaattgacgacggtacttgtaccgtttagaacaamggaatagagatatgggctcattccttctggtgcatacatgccccaaaccaatacacccgcccaaaaatgccaaaaccagcgggcgaagactgccacaacacttcctaaaataatcgtacgaatggctgattttaaacgattcgcttgaaaatacagttgaatttttctagcgaatacgccacccattcctccaaacgcaaaagcaaagggatattcaaaaataatctgtggaacggacaagaaatttttcatggctgtaccgagaataatatttaacatgccccaaacaaagcctgctgcaactccaggaagcaacccacgacgaaacgaataaagaactaatgggaccattcccaacgataggtccaagccactattggcaaattcaatcggtaaaaaagagagggccattgccattgctgcgacgactgttccttctacccaaatacgtaaatccatttttctagccaaacaaatttcctcctatgttctgacgctctcaaccactaatacatcgttattttaccatagggactttagaaaaacacgtttgtcgaacaagcaaaaaaatagctgatcagcatttaagggaatcaactcctactcaaacgcatgccagctactttttatccattaatcgtcccgctcagttgtcaaaattttaccagaatgagcatcgatttttacctctattttttgttggccctctttcactttcacttcccaataggtgattcctaattctttctctaacttccaatctgttgcctggccgactttcgctgctttttcagccaaggttgtggcttgttctctggaaatgatatttgttaaatcaagtgcctcttcttgcattttaacgccattttgttcatcggcatccaaggtttcgactttttcttttgtgaattcgcctgtttctgcgttcacttcaacttgatattctttttgctgatccacgccttctatttcataaaaataacgtccaaaatctgtatctaactgcagacttgttattttagcttctggatattttttctcaaatgctgtcgttacttt

SEQ ID NO: 405 - DNA, 1479 bp; double-stranded, linear
gatttctgctcactctttttgatgggaaaagtcatcaggacacggttcgttacatcaatctcgaaggaggcgaaaattttgagtagtgctgtggaaactgtaacaaagttagtcacaccaatcttagaagaacaaaattttgaacttgtggaagtagagtttgttaaggaaggaaaaaattggtttttacgagtatttatcgataaagaaggtggcattgatattgaggaatgtgcctttgtcagcgaaaaattaagtgaaaaactagatgcaatggatccagatccaattccgcaagcgtactttctggaagtttcttctccgggagcagaacgtccgttaaagaaagaaagcgattatgaacaagcggtaggtaagtacattcatatttctctttatcaagcagttgatggagaaaaacagattgagggtaccttagtccatcttgattcagaacaattaacattaagtgtaaaaattaaaaccagagtgaaggaaatgacttttgaacgtaaaaatatcgcaaaagctcgtttagccattcaattttaatcaacagactcgaatgtaaaaaagggtccactaaaagttttacttttagctaggcctgtgacaagttttaacgagaagtttttcccttggaagaagaaccactcgttcagctttaacgaatccataggaggaaaagaaaaacaatgagcaaagaaatgttaaatgcattagacgtattagaagctgaaaaagggattcctaaagatacggtgattgaagcgttacaagcagctttagtttctgcatataaaagacattatggacaagcaagcaacgtcgaagttgaatttgaaccaaaaaaaggcaatattcatgtgtatgctgtcaaagaagtaacagaagaagtatttgattcacaattggaagtttcattaaaagatgccgttgcattaaatggtgcatatgaaatcggcgacaaaattcgttttgaagttacgccaaaagactttggccgcattgctgcccaaacagcaaagcaagtaattttacaacgtgtccgtgaagcagaaagaacaattatttataatgaatttagcgaatatgaaaatgacatcatgcaaggaattgttgaacgtcaagatcgtcgttatatttatgtaaacttaggtaaaatcgaagcagtcttatcaaaacaagatcaaatgccaaatgaattttaccaaccgcatgrtcggrttaaagtttacgtatcacgtgttgaaaacaattcaaaaggcccacaagtttttgtaagccgtagtcatccagatttactaaaacgkctttttgaacaagaaattccagaagtttatgatggaattgttgaaatcgtaagcgtcgctcgtggaagngggcgatcgttcaaaagtagnccgttcgttcaacagatccnaatattggancccgtggggtacccgtggttggtccaaagggccacgtgtccaggcg

SEQ ID NO: 406 - DNA, 5454 bp; double-stranded, linear
caggtgcagtaggaattgctttttttgctggaaatatganacaagacaaaaggatagcagataggcaaaacaaaaaaagtgagaagaagtarggagaatatttatgccagttaataaaaatggtttacctttttatctcgacagaaaattagatgtaatacgctttggagttgatccggataatcatgtgaaagaacaacaactttttaaatatccggttaaaacggataagccaaataaaaaagaacgtttcattgaaaaagaaagtgaatctttaattcaattaggatataaaattgtagttgatacagttactggtgttaattatttagagagccctagaggaggaattacacctttgcttgatgaaattgggaaagtttgcatcgataaaattagtaagtaaataaaacccacccctgaaaatctttttttgggggttattctatattcaattattaatgataattatagtgatgagagagcaattctaagccattttcacaaatattgatcggtagttatgcaatgaagagattttaacgttcgctcttacaggattaaatatgatatgtagatgaaaataaaaaaatctctakttaaatacgaataattgttcataccaggcatgtggccaaccatcaaaagacgaataactggtttcgctttgctcaackggccttcaacgttttgtatagtttccctctctgcgttcagtccaactatgccaaaagtttacaggtgtataaaaaaatacggaaaactgaattttactagttgcaaaagagaacattcgttcgtataatgggttagtagaaagargggatttkggatgaatttgacgttcgattatacgaargaacccagtcgtgatgtgttttgtatcgacgtaaaaagtttttatgctagcgtggaatgcgtagaacgtggacttgatccattgaagacaatgcttgtggtcatgagcaattctggwaaattcaggtggcctggtactcgctgcttcccctatggcaaaaaaagtattaggtatttccaatgttacaaggaaaaatgaagttccggaccacccaaacttaattattgtacctccacgcatgaaattatacatgaagaaaaatcaagaaattaacaatttatataaacgctttgtttctgatgaagatcattctgtattcagtgtcgatgaatcgtttcttgatgtgactgcttcgctgacctattttaagtgtgacaccgcctataaactggccaagattattcaacgtgtgatttataaccatatgggattgtatgtgacaatcggaattggggaaaatccgttgctggccaagttagcattggataatgaagcaaagaatgcaccaggctttgtggctgaatggcgctatgaagatgtgccagaaaaagtttggccaatctcccctcttacagaattttgtgggataggaaatcgcatggctgctcgcttaaaaaagctaggtattcggtccatttatgacctagcgcacattgaaccttacatgttaaaagagcgttttggtatcatggggctacagctgtacgcgcactcatggggcatagatcgtagttttttagggcaaaaagcgggacggccaacagaaaaatcatttggcaatagtcaggttttacccaaagattatgcaaataaagaacaaataaaattggttttgaaggaattgtcggaccaggttgctagtcgcttacgcatggcatcgtgtcagacaacctgtgtctctttgtttgttggctactcaaaaggtcagacagacaaatacggccaaacaggctggcgtagacaaatgaaagtagaaccaagtaataatacaaaagttttgactgaacatgtactgcgtctttttgaagagaattacgcaccaggggtcgacgtacgaaatttaggggtatcttatggccgtcttgtatggaacaaaaatttacagctggatttattttctgttccggaggagcaaattcatgaaacggatatgtattttcttattgataaaatacgtcagaaatttgggtttaaagctctgatacatgcttcttcactgatggaaggcgccacagcaatttcacgagcaagccttgttggtggccatgcaggtggaactgttggcttaggtacaaccaaatgaagcaaaatagaaaagaattttcttcttatttttctcgctcaatcaaacaaaataagccattatatttattacttatgtcttcagaaaccaatccttttcctataccagttataggaacttttcgaggatatgcggaagaaaacaaaataataattggtgaagattcctatagtatagaagaaattgactccgtgtgtatgtatcgtcattctagcagaataaaacaagaagaaagagtaaattcaaacccttttcaaggtttggtctcccctcctttttcaaaaaaagagcagaaaaagttagatgagtattttagcgattgggggtttcgtaatgaaggcatatgattataatggtaccattattcctctaggagatagcgcccgccaagtggcttatgtagaatgcagctgtggctgtctagcaagcagagttacgaatgactcaagcaagtataaatgttcctggtgtaaacgagtttacacgcttagaaaagatcataaaacagctagataaattgttgaaggttttattattaaattggcagaatttcaaattatgatataattmatgcggcagctcgcctcgattggaggtgtgttatttgtgaaagatttaatgtcgttggttatcgcaccaatctttgtaggattggttctggaaatgatttctcgtgtgttggacgaggaagacgatagccgaaagtaagctgctatcaacacacacgctagaagtcgcaactagtgtaaaaaaaagcaatcctattcgccgtaggattgctttttgtgttatctgtacgatttaatgtcgtttcgcacttttagtatagcatatttttattttgggtcaagttttgtgactatgcaggaattggtaaagaatacagtggtagcaattttcatcgatgctattttattaataaaatagtagtagaaaaatatatttattgataaacttatagttatgaatctgtatagttagttataataattggtatttttttaggaaaatttgagcttttgaattgaataagaaggagtgattttatggatttaaagtacaatgtttttggtaattcaatgtattctttgaaagaaatggagctaattcaactagcttcacaatggttttatgatgcaggaaggttgcctagtagtgcatgggcgcaagtaacctatggggatgtcgctgttgatagtatacggaaaattttatctagtcaaagtgagccgtatcactttggaggagttgataatatttttcctccctatttacatgctattagatcagcagtagaaatgtataatgatttttgtagacatgcaccaccgtatttctttaataagacttcagatgaagaaatagaaaaagtaatgaatatttcagcaaattttggtattgagttaaagaaagaatattttacacgtttcacaatgctagaggaaatattagttaaaataaaagatgatattgatttctttgaaaataattcaaaactgatggaataataaagtgctaattatacggacaatactttataattaattatacagagcttttaaggctatttcataaaaaaacaagtagtaaggggcacaagcatttcctttattgcttgttttttgataatatattactgcaaacgcattaatatattaagaaaggaaacttacccaccatgcctagaaaaacctttgtatatccacacccaatcaatacttatatcattaagcaactagggattactgtagaggaattttgcgaactacactccttctctcaaggaactatttcttcttggatcactcgcaacaaaaaaatggaaactttaccagtctcctttatctactctctttccttatctgctagcaagactatggaccaagtctattcagagcttttaaaactgcaagacgattatttgctacacttagaacgccacagacgaactaaaaaaattattgaatgaaaatacttttttactatcttactattttactacaaaaaataaaaacacaagagcaatgtttgtacagcatttcttgtgtttttattttattaaacagtatcttttatttttgtttctttttgtctcgtgattcataagctttcatatacatttcaaacattgtacgttgttctggttctaatgtgttatctaatctatctaacatgaacgatacaatgtcgtcttgtgtttcaaaatctaaagtattctgaaacgcatttattctattgatgttactcttttgtatcctaattgtactatatactttatttttagcaggtcgcccaattcgttttgatcctgaatcacttgctgaactttcttcttttgaaaaactacttaaatcaaaagtagtttcaggttctgaaatttcagttgckttaatttcttttgattgtttacgttcaggatccttatgaaatgtatacttactcattagcagtcgtcccttctgttcgktcaattatttcatcagataatttgtkatacaattcatgaacttttctatcatgaaaatcatataattccgtatatccttcttctgatatacctttacgatcataacgttttaaccgttccatgtgtctaacaattgtattaaacaaagtctcatcaccaaaagcgtctttggcatctttaattatttgattatcaattccagaatcgttttycaacagcactggaagtaccccagcgatatcaaagtcaatgtttttataagtatcatacaaggtttgcaagtattccccaaaatgcttctgcaccatcaagggagcgttgctgcgtttgcaaaacaattacaatgtaattagaagaataaagagctgtatcggtaaatactgaaagtgtaggaggaacatcaaatataatgtaatcataatcattttcaattggtttaagtaattcactaaaaaatgctattcgtctctctttgtagtttttctctgtcggcataattgttagctcaagaaaatcaggataattaacaaagtctttgtgtgaaggcaataaatacaaattaggcattacatttacaacagcttttcctaaatttccttcttgaattgctaccatcatcgtttcttttataggtagttctttattattttgtaatccatatgttcttcgcaacaattgcgttgaatttgcttgtgggtctaagtcacaaactaaaactctaaaaccttttttagctaattcataggctaccattacagaattagtagtcttcccaacgccgcctttgaaatttccaaatacaatttttttaaccatacaatgact

(The sequence listing continues in the following parts.)
